United States Patent Application Publication US 2020/0377945 A1 - sequence listing, part 21

SEQ ID NO: 4069 - DNA, 107947 bp, Unknown
  gut microbiota DNA sequence
ggtagccgttgttgtccataagatttctgagttagttttatgcaaagataggatttttacaaatattacccctcaggtttttacattgaccccttttacctttatttcttcattgtcgaaagtgccgggcttgaagaatacgatttgcagaattcccgatttccgattattgacggcttgtatttccgtatcattccgttctattttcagatgacggcaggagtatgttttcattttttccggatggttgattcccggtacaacgatatatgcgtaagatgcgtttcggggagattgtccgtgattaatgaccagattgaatatcggcatgctgatttccgtagcaggataattgaaattgatttttgcccagttgcctttttgtctgtccatctttagctttatattgtttccctgagggaagagataggcgatgctgtcatgccagatccattgcggagcctgctcaaaagcaaattctccttgggttgcttgctggagcgcttttcccgtatttatccatacatttccatccagatggcattgattgacagtggtaacgatgtctgtcggaacatttgaaccgatttcactgcctaagcaaaccacttcgttgtcgaacataaaccatgatttttgagcttttacaccatagtcatccatcttgaaagtcattacaccgtatttcccatcggacactccccctgtgaatgtgcaggttcctttgcttccccagtcaacgggattgcgtttttcgcctgcaggcaaggtggttcccggtattctgtcccactcccagacggggaagatgtcggcatactcattgccgttgacgcgaatgttggtggcgccgtcactcatataggtcccgtatagattttcaccgttaccgctttcggtcttgttggtgcgtgttgaagaggtgcgcacggaaaagtcgtaattttgtcggttgtgtagcatatagtctgagcaatgatacattgtattcttgtccgaacgctgatacgatgcttcctgggtgaggaaacggcgggcaatgtctgcatattcgccggcatgtttggcatcaagggcctgcaggtttctgaacagggctgcgcaatccccgtaatccaatgttcctttgcggctgacacctctgcctgttacactgaagtccagatacctgcttcggaatacattgaagtaggtgttgcggataaagttggaaaacaaggtgagtttctccggattcatggcatattttgttccgttgaggatattgcccatgcggactatgttgtcaacgaacactgttccgtatccgccgatgtaaagttgcggcccgtgctggtgataagacaagtcttcctgtatgccttcgtttgcaacgatttgtacgggatagaatatttcatcggcattgacgcgtacaatactgtcattcttcaacaggcagcctcttattaaatgatgaatggcaatgtccattttattggcgccggtccatttgcgtgggtcgctgcgttcgcccattgcttttaaaataggcatacggatttcggacggaagtttcctttgtcccgcatccatcagagcaaggagcgaggcttgtgtttgcggaacggaaatctggttataccaccagttgaaacaggtagggtcttgtttcacccaatactgcagggcatctctgattgcattgtataatacctcgttaccgtaataacgtgattgtttgtcggtatatgaggcggctattgtaaccaaacgtttcaggtgttctaccggttcccagttggtacggaaaaagcaggcataatcgaggtcgctccatttaccttccggaagcatggagcgcagtaatttttccgttgcgcggtctgcttgctgtgtggtggttttggcatacaattcttcgcgtatccgttcaagtatctgctcatattcgtcttgcggaatataggttgggctttggcttcgctttccgttggcgggattatagcgggcggaataggaaggggtctcacgtgttatctttcccgccatttccagggtaactactcctttggcagctctgttagtatatatttcggttacgaggttgatgtcgttttctgttctgccttgcgggtggtagaccaaccgtattatgccttcctcaccgggttgataggctttttcagtccattcggacgaggtgcatccgcagccggtaatgatgtttttgatagtgagaggtttgtcgccggtgtttacgaaccggaagtcatggctgacattcccgtcttgttcccggacggttccccaattgaatttggtttctgagaatgtgatttcttgtgccggtagcagactgtttacagtcagcagcacgattcctaaagtcagaattcttttcataattcagcagtgagattagatttagataaaaaagaggttatgtcaaaagccttttatccttttggcataacctcatattattaggtgagaaaaattattccgcttcgttgattgaattgtcaatcaccttgattttctgtttaaccagttctatgtcacctttcagcttctcgactttacggttaagttcggtcaggaggctgttgcctttcttggacgaagcagtcaggaagcctaagttgttttcgtaagtctgcaattcgtttttcatgttttcgcaggcgcgtaccagtttgtcccgttcacgataaagggcttgcgggctgccttcctggatactgctgatggacgatttgaaattactcaacttcttgttggaagcactgatgttgaagtgttcaaacagcttgtctatccggctgtggtattgtttgtaaattttgtctttttctttgaatggtacatgtcctatgccgttccactctttcataagttcgcggaccagttgggtggcttcttccacatccattgtttcgtcaatggctgtcagcttttcgataatggctttcttcttttccagattctcctgttcaacggaacgttgtgaggaagttgccttgtttttctgttcaaagaagtaatcgcaggcggagatgaaccgtttccagatagcatccgaatatttcttggcaacgggacctaccgttttccactctttctggagtttggtcagttcgtcagctgttgctttccagtcggtactgtctttcagggcctctgctttttcgcataaggcacgtttcttttcaagattcccgttcatgccttctttcagggatttgaagaattctcctttcttctggaagaactcgtcacaagctttgcggaagcgttcgaatatcttcacgttcatcttttgcggagcaaaaccgatggttttccatttattttgcaaagcgatgatttcctgggttttgttttcccaggaagcgaagttggtaagttcgctgtaatcaatggcctcgatgatttcgcaaattacggtcttttggtcgagattatgttgctcggcctctttcagggcttcaaaatgctgctggtgacggcggttcacagtagtagaagctgctttgaagcgtgcccatatttcatcgcgcagctctttggctaccggtcctgtatcgcggaattcctgatgcagtttctgcaattgatggaaagcggaaacaacatccgcttcgtctgccagtttctcggcagcttcgcaaaggtggttcttgatttcaagattcttcttgaagtcatattcacggaattcgttgttcagttttaaaaggtcgtagaacttttcgacatacagctggtagttcttccacagctcgttaatcctggcttgcggcacgattttaacctcattccattgctgttgcaatttcttgaattccgtatagttcttgttggcgtcttccggagattccaccaactctttcagttcctcgatgatggaaagcttgatttgcaggttgagctctttctgtttttcctgctctgcattgagtgcgtttcttttttccttgatgacggacatggtattcttgaattcctcttccaaagtatcggcttgtggaacgaactcttcaatagttcctccattctcaacgaacagcttcttggcggcttcctgctctgagttatgtagtttgtagaaagcctgtttcaaaccgtctatctccgatttggcagcattctctacatctgcggcaatcgctttaagcttgttcagaatctcttctttagtgagtttttgaactgattcggccggcttgtcagttaaggttacctcagcgggagtttctgttgttgccggctcagaaacctctgctgtttttttgtcttcttctaattccaccggcttgtcggggagattagtgtcatgagtgtccgtcatttgtatttactttttagaaacgggatatcccgttcgggttacattaggttacaaattaatgaaataaaatgattacttcatacttttttcatcgttttttttcgatttagccgtttcaggccaatagtacggtgatgcccatatacatcatcatgccgataatgtcgttggtgatggatatgaacggtcctgtggcaatggccgggtccactttcagcttttcgagtgtcatgggtaccaacgttccgaaaatggaggcgaacatgacaacggcgaacagactgatggataccgagtaggtaactgtggccgtaccgccgaaccgtacaaaattgtatatatacaccagcaaggatatgatggttgcattgattgccgccactacggattccttggcgatttgcttgaatgtgtctttggcatccaaagaactgttggcaagtccctgtacgataattgcagaggattgggttcctacatttccgcctgtaccgccaatcagagggatgtacagcgccatttcgggatgtgcggcgaaggtagcgtcaaaattacccaatatcatggagttgccgataccgcccagcataccgataagcaaccacggcaggcgtgcggaagtctggcgcatgacgttgtcgtccgtctccacatcctgtgacaaaccggatgccaactggtagtcgcgttccgattgctcacgaacctcgtccatgacgtcgtctacggtaatctgccctaccaggcggcctatgctgtcgacgacaggtactgccaccaagtcgtatttctcgataatctgcaccacttcgtctgtgggagtgtctacatggacggaaatggggtctttcctcattacatgcttcactttggagacggaaggagaggtaatcattttctttagcgggaatacaccttgcagccgttcgtcatcgtcaatgacatatacgtagtagatttcgtccaactgttcggcttgcaggcgcatctctttcaggcattcaggcatactccagttctcgttgacggttaccatttccgtacccatcaaaccgccggcggtatcttcatcgtacttcaagaggtctacgatgtctccggcctgctctatatcctcaatatgcgacagtacctcttcttttttctcctcgtcgaggtcacgcatcaggtctacggcatcgtccgtatccatataatccacaaaccgcttggcaatggtttccgaaggcagaagttccaggaattctttccggacgtcttcgtccatttctaccagtacgtcggcggctgtttcgttgtcgaggagacggtaaacgaagcgtgcctcttcgggcgcgaggtcattacacagttcggcaatatctgccggatgcaggtcgataagaagcgccttgacgttttccgcgtctttctgctctataaagcttttgactttatctatgtattcttcgtctatttccataactcatagtgtattggtaatagtgtaccgttaagggctgaaaccgttaatttctcatttttctgtcgtctctttcaatgctgtttccacctgattggtcaattctataaactcctgtacggaaagttgctcggggcgtttgttgaagagagggtcttcggtcagcggacattctttgccgagtatcggttttatggaattacgcaaggttttccggcgttggttgaatgtggtttttacaacttgtttaaacagcttttcgtcacatcccaattgctgcgtgtcattgcgcgtcatgcgaataacggcgctttttacttttgggggaggattgaacacgtgttcgcttacagtgaagaggtattccacccgataccaagcctgtatcagtacactcagaatgccgtatgtcttactgccgggaccggctgcgatacgctcggcaacctctttctgtatcatgcccgtacagcacggtatcagttctttgttatccagcatcttgaagaatatctggctggatatgttatacggataattgcccgtcagtacgaaaggctgtccgtcgaacaggcgttgcaggttcattttcaggaagtcgtcttcgatgatgttatcctccagttgcgggtaggcttcccgcagataggccaccgattcataatccacttccacaacttttaccgtgcgctctttgggcaggagaaattgggtcagcactcccatgcccggtcctacttccaatatcggaagattgggacaggcgtctacggtgtcggcaatgtcctgtgctactttcaggtctttcagaaagtgctggccgagaaactttttaggtttaactaatctcatgtatcaactaaatcgttacttttgcggttcaaaggtaatccttttcggcgaattacgagttacaaatcacaaattacgacgcgtgccggatgaattttaagggaaaacgatgaataagataataaaaaaaacattgaaaatcgtgttgcccgttcttttgggctgttttatcctgtattgggtgtatcgtgattttgattttgaacgtgcgaaagaactgcttttgcatggcactgactgggggtggatgcttttttcattgttttttggcgtaatgagccatgtgtttcgcgggtggcgctggcgacagacgctggaaccgttgggggcttatcctaaaaggagcgattgcgtggacgccattttcatttcctatgctaccaatttgatattgcctcgtgtgggtgaagtgtcgcgttgcggtattctggctaagtatgatgatgtatcgttttccaaatctttgggaactgtggtcaccgagcggttggtggacaccttgtgtattcttttgattacgggacttacctttctggctcagatgcctgtgtttctccgtttctttcaggaaacgggtacaaaaattccttcgctgatgcatctgttgacatcgccctggttttatgtctccctgttctgtgttatcggcgtgctggtgcttatgtactatctgatgcggatgctttctttttttgagaaagtgaagggagttgtgctgaatgtatgcgagggggtaatgtcgctccgcaatgtgaagaacattccgctgtttattctctatacattgcttatttggggatgctatttctatcatttctatctgactttctatagcttttcttttgcggagcatcttggctttcaggctgcaatggtgatgtttgtgggcgggacgtttgctgtaatcgtacctacacccaacggggcaggtccctggcattttgccgttatcaccatgatgatgctttatggtgtgaatgctacggatgctggtgcttttgcactgatagtgcatggcattcaaaccttgctggttgtgttgctcggtatctatggcgggctacatgtttcgttggtaaaccgtacgaaatgaatgacttgaattgatactttcacagaaatataaacacataaataacctatatgtctgatactttatcatctgcatttgcagatacgaagccgcattataacatactcgacgggctacgtggagtggcggcattgacagttgtctgttttcacttattcgaggcttatgctaccagccatttggaccagaagattaatcacggatatttggctgttgattttttctttattttatccggattcgttgttggctatgcttatgatgatcggtggaaaacaatgcgtattgctgactttcttaaacgtcggtttattcgtttgcatcctatggtcattatcggagcgcttattggagctgtaatgttctattttcaaggctgttctgtttgggatgtttcacaggtgcccgtagtggcgctgataattgctacgctaatgaatgttcttctgattccggcaactcccggtatggaaattcgaggcgtaggtgaaatgtatcctctgaacggaccgagttggtctttgttttttgaatatataggcaatattctatatgcattctttctacataagctctctacaaaagtcctttccatattggtgttgtcagcgggttgcggactggccatatttgctctttgggggccgcttggtgatatatgtgtgggctttgctttgacggaagaaaatataataggtggttctttacggttgctgttctcatttccggcgggattattgttgtcacgtatattcaagcctgtcaaggtacgaggagctttctggatagggagtttctctattgtggttttatcggcggttcccagaattggtggcagtgaacatttatggatgaatggcttgtatgatactatatgctttgccgttgtattccctttggtagtctgtcttggggcttcgggaaagactacggataaagtcacgacacgggtttgcaggtttctgggagatatatcctatccgttgtacatggtgcattatccttttatctatctgtattatgcttgggttaaaaatgagaaccttacattcatacagtctctgccgggtgcggtagcacttgttgcgggttcagttgttttggcttacttatgtctgaaactgtatgatgaaccggtacgcaggtttctatcccggcgacttcgtataaattgaacggggttttaccgatttttgcaattccgattagagcgatattgaaaaataactcttatatttgcgaaaacaacttttataattatgagtacaatcttgcagttagctccacaaaatgtgtggaagcatttctattcgctgactcagataccccgtccttccggacatatggagagaataactgagttcttggtaaattttggtaaaagtctgggcttggaatcatttgttgacgaggttggcaatgtcattatccgtaaacctgctacaccaggtatggaaaaccgaaaaggtgtcattctgcaggcacacatggacatggtgccgcagaagaacaacgatacggttcatgattttactaaagaccctattgaaacgtacattgacggtgattgggtgaaggccaaaggtactactttgggagctgacaacggattgggcgtagccgctattatggctgtacttgaggcaaaagacctgaaacatggtccgttggaagcgttgataaccaaggatgaggaaacgggtatgtatggcgcattcggcttgaaaccgggtacactaaacggtgagatcttgttgaatcttgattcggaggacgaaggagaactttatatcggttgcgcaggcggtattgatattacggctacattggaatataaggaagagactcctgctgctgatttagtagctcgtagaataactttgaaaggtttgcgtggcggacattccggattggaaatcaatcagggacgaggcaatgccaataaattgcttacacgtatcgtacacgatttgctgattgagttcgattgtcagttatcaagttttgaaggtggcaatatgcgtaatgccattccgcgtgaggcacatgccgtattggtatttaatcccgaagacattgaaggattggaagactatatcaaggaatatgaggtacagattaatgaagaatatacctcgattgaagaaggcattgttgtaaaactggagaacgtagacttgcctgctgccattgttcccgaagaaattcaggataatatgattagtgtattaatggcctgtcagaatggggttatgcgtatgattcctactgttcccgatacagtggagacttcttccaatctggccattgtaacgattggcggcggtaaggctgatgttcgtatattggctcgcagctcttgcgatacgatgaaagatttcctggcagatagcctgactgcatgtttctctatggcaggtatgaaagtagaactgagcggcagttactccggctggcagcccaatgtggattctccgattctgcatgccatgacgttgtcctataagcaacaattcggtatagagccggctgtaaaggtgattcatgcaggtttggagtgcggtattatcggcgccaactgtccgggacttgatatgatttctttcggaccgacgttgcgttcaccgcattcgcccgatgaacgtgcatatatcccgtctgtaacgaagttctatgacttcttggttgctactttggaacagactcccgaaaagtaattttctttatacataacaatgtgaaagcagagtgtggttgcgctctgctttttttattgctgccattttcatcctggtctgtcagaattactttgctttcctgacattttgtccttgcttgctactgtaatattgcaggaaattgatttaggtcaagaaatatgttttaaaacatgtttttctatatgttttcacttgtaatcttgaacaaaggccttatttttgtgttgtaaaacatagaaatgataggataacaagttatttttaagaataacaagattgattttaggaggataacaaaatgaaaaagttaagaaaattgttcagacatttcggtgaagccgataagaacatttggggttatgtaatgctttaagcattcattccccctttttaagagagaaagtagttttcagttttcaagatgttagtttagttttttaaggttatgagaaagaaaataatggattcattcagacgtattctcgctgaggtaggtcgtaatgagatgttgatgatgggatataccatcaagaaataaagaaaaaagtgttttcagggtatcagtttaatttttaagattatgggaaaaaagattgtaaattcttttaaagacattctctccagagttggtgagaattggattgaagcaatgaagtattataactacccgagatgagtgtagtaattgataagaaaccgggggatatgttctgagaatgtatccccccggtttctttttataaccgtaggtttttatgtcagtatatgctttgtttctttattttttctaaaaagctggtacaatgtggttattattttgttatttttacagtggacattcatgtagcggagatatgaatgcagctaatcatacagataaatctttattgtttgattcctgattcgcataaaaaaacaaaaactaataacaatagaatagctatgaagaaattccaaagattttgtacattgtttctgctgatgatcgggttgtgctcctttgctttgcacgctcagtcctatgcaggtttgtggaggcaggtggagcaggctcaaaagaagagtttgccgcaaacggtagtgaaactgacggagaaaatctaccggaaagccgagttggagaaaaatgctccgcaaatgctcaaggcatatatctgtcgggaggcctatcaggaaagactgactccggatagcctgtatacgaatttgaagaagttggaaagttgggtggaatcggagaaaaacctggtaaataaagctattctgcattcattacttgcccgcgagtattcggactatatgcggcataaccggcgacagttatcagaccgtacggcgctggatgtggacgaagctcctgccgatatcagggaatggagtactaacctttttgttgctaaggtagatgaacataacctggcttcattgaaggactctgttcgtttgcttgaggtctcttccaaggaatatgtgccttttgtcgagcttgaagacggaagccgcttctatgggcacgatatgtatcatctgctggcggcccgggctgtcgatacttatcagttgttggacggctttcaggtggatacattacaacgtgcccgcatcaacagtgtttatacaaatatgataaatgcttatcggcatcgcgttggggcagaagatgcggtagtgctggcaacgcttgattattggaagtggaaaagtaccggcggcggtataagtcgggagccttatgccacttatcgggaacggaaagaacggcttgataaagagcatcttgaagtgttggataatctgattcgggaatatggcggtcgtgagatttgcgcggaagtttacattgataaagccgcttggcttcgcggtttgggagcgtcttatatggatgaggttttgcaggtatgcgatgaaggagtgaagcgctatccggcttataagcgtatcaatgaactacggaacataagggagagtgttttgcagccttatttgaatgtcagcactcaagagagcgtttatcccggtgattcgttggagttgaatgtgggttatcggaatctgaaaggtttcacactgaatctgtaccgtacgaatctctccgaagtgccctggatggatgccggaatcaataaggctttctatcagaagcatgcccgtaaattatcagctacccattttgaactgaaatcttcggacagcaaaagcgggaaagagggagaactgttgagcggtttgcaacgtatggttttgaaatgccatgtgccggacgaattgggcatatatatactgcaaattgtacctgatgccgcaacggcccgtactgcagagcactttctcgtctcgacccgcttcaaggtgttgacgctttctttgccggataataagatggaagtggttacggtggacagccgtagcgggcaacccatttccggtgcaaaggtcagtttctattctgcttacaatgaagaaaaccgcaagctggtgaaaacagttgtcaccgataccggtggaaaagcggttgtggaatgggataaggctatccgcagttatgtggcacgtaagggaacggatacagccatgatgcctcagaatgtctatttgaacagatattacgaacgcggagagtcacgtccggaagagcatatcaccctgctgacagaccgcgccttgtatcgtcctggtcagaccgtttatgtcaaaggtatcgcttatgaacaggaggcggacaaggctcacgttttggcagggaagagttatcaggtacgtttgttggacgtcaacaggaaagaactggtacagaagaatgtaagtaccaatgaattcggttccttcaccacagaatttgtgttgcctgcagtctgcttgaatggtaactttacaattgatgtaaaaaacaacgcttccgtttccgtacgggtggaggattacaaacggcctacctttgagattacctttaatccggtggaggaggctttctgcttgggagatacggtggatgtaacaggcaatgtcaaggcatataatgggacggcaattcaggatgttccgctgacatataccgttacccgtcgcagtaaccggagatattggggagatggggccgtatcgcttgtttcggatacggtgcaactggatgcgaaaggcaacttttccattcctgttgttctgaagccggatacggatgcggataatacgggtagggaacgtttctcctatcagatagaggtagcggtgacaagtgatacgggtgaaacgcagacctcgcactactttctgaacgctacccgtcgggcttatttctttgtgtccgacatcagcagggacttatgcaaggaagattccatatcgggaatgctgtcggtaatgaatgccgttaatgaaacgctgtccatggaagggatgtgccgtctttatcccgttcttgattccaagacggggaaaatctccgacaagccggtttatgagagtgcgtttatgtcgggcgaaaagaaagactttacagcttggaaacaactgccatcgggagagtaccgcttaattctgtcggtgcgcggtcgcgacggcaaggaagtcagcaatgcggacaatgcggtgaacattgtactgttctcgctgaaagatgaacgtccggctgtgtttatggaaactttcctttatgaaaaaaatacggagttcgatacgactcatccggcaatcttctatttcggcacttccatgaaggacgcatacgtcctggtagatgttttcgggcagaaaggcagattggagagccgtactttgtcgctgaacgactcgattctccgtatggaatatccttatcgggaagagtacggagacggagttgccgtgcagtttactttcgtaaagaacggactgctatatacccgtagggtggaattgaggaaacgtctgcctgaacggacgctggatatgaagtgggaagtttttcgcgaccgtttgcgtccggggcaggaagaagagtggaagctggtcatcaaaactccgcaaggttttcccgccgcagccgagatgctggcaatgatgtacgatgcttcattagaccggatttatagccgtaaccagtcattaagcgtttattacaaccggtatattccttattactattgggatatcagtaataacaacggaaagagttatgctccttacttcccggtgaagtcatggagagttcctgtttggcgcttcgactatttctgttctccttataatgggggggcggaagtactgcaaatagtagagaacgatgcggctctctgcgagccggtaattatggggtatggagccacacggaccaaaatggaaacaggacgtgcagttgaagtgaagtatgttccggtacaggtagaagaaggagtggcagatgttgtttttgagtcggagacgattccgcttgatgaacaggcgttacagcctatggccgatttgcgtactaattttgcggaaacggctttcttttatcctcagctacgtactaatgaacaaggagaggtcgctttttcctttaccatgccgcagagtctgacacgctggaatttccgcggttattcccatactaaggatatgatgacaggcatgcttgacgctactgctgtcaccgccaaagagtttatgcttactccgaatatgccccgctttgtacgggtaggcgataagacacagatagctgccggcattgccaacctgacgggtaaggcaataaaaggcacagccgtattcacccttttcgatccgatgacggagaagattatttccaccggtcgccagaagttctcggtggaagccggaaagacagcatcggttagtttccggtttgatgtaacagaccgttacgaactgcttggtgtccgtatagttgccgacggcggtactttcagcgatggtgaacagcatttgttgcctgtactgagtgataaggaatatattacagagacgcttgccatgcccgttcgtggtgaagaaacgcgtactttctcgctggacagtctgttcaacggtaacagccgtacggcaaccgatcgtcgcctgaccgtggaatttacaggcaatccggcatggtatgccgtacaagccctgcctgtactgagtgagccttcaacggataacgccatttcctgggcaaccgctttctatgccaacactttggcgggatatattgcaaatagtcagccgcgcattaaagcggtatttgataactggcgtctgtcgggtggaacaaaagaaactttcctcagccggttggagcagaaccaggatgtgaagaatattctgttgggcgaatctccttggttgctcgaagctactacagaggctgaacagcagcagcgtatcgctactttatttgatgttaaccaattaaattaccgtaatatggcatccttgctcaaactgaaagaattacagggcgaggatggtgcatggagctggttcggcggcatgtccggtaaccgttatgtaacgggatatatcaccggactgcttgtccgtctttctttacttacggataaggcattgccggaagaagcagcgatgatgaaagccaaggcctttgactatctgaacaaagaggctctgaaagaataccgtgctatccgtaaggcagagaagaacggaacgaagattaccgttttgtcggatgccactatggaatatatgtatctggtatctctcggttcggtaaagctctccggagaatatgcaaaagcattcggttacttccttaccaagctaggacgtaatcttgagagcggtaccatgatacgtaaagcgcagacagccgttatcctgcagaaggcaggacataaaacggaagcggatgagtttatagcttccataaaagaacaccttgtacagacggatgaaatgggagctcattttgctttccatgccaatccttatacttggggtatgatgcctgtacccgctcatgtagctgtaatggaagctctgcgcgaggcaggcggcaatgatgctttggtagaagaaatgaagctttggctgctgaaacagaaacagacgacaagctgggattctccggtagctactgctgatgcggtttatgcgttgttgtgtcagggtagcaatttgctggaaagtaaaggagatgtccgcattactttgggtgataaggtgttggagactttctctcctgcaaagaccaccgtacccggattgggatatgttaaggaagtctttgcgcaagtcagtcctgaggtgaaagcaaagtccgttaccgtagagaaaagggatgcgggcattgcatggggagctgtctacgcacaatacttgtcgcccatatccgatgtgaagcagcagggcggagcattgaacattgagaagaaactctttgtagagcgcatgtcggccgacgggcagaaatctttgcaaccgttgacagaggtagcacagctcttcgtgggtgataagattgtttcccgacttaccgtccgtctggaccgtgccatggatttcgttcagttgaaagaccagcgcggagcttgtttcgaaccggaaaattcgctttcgggttatcgctggaacaacggggtcggatattatgcggaagtggaagatgcaggaaccaatttcttcttcgatcatctgggtaaaggcgtttatgtattggaacatagctaccgggtggctcgtggtggtacgtatgaaaccggactggctaccgtgcagtgtgcctatgcgccggaatatgcttctcactctgctggaggaactgttattattaaataggccggatagatttacttgctatcgaatgtttataggttataaaaagcagaacgaaaatctgtgtatctcgcttaaaagctttacatttgtgcaactaatttagaagcaatataaatgagacgcagttttatcactctatatgcgcttgcagctacggcattgactgccgtagctcaaccgcgttttacctctaatacggaaacgtatgatttcgggcagattgaatggaaacatccggtgacggtacaatattccataacaaacacaggtgaccggcctttggtgcttaccgaggtggaacccgattgtgcctgttccgtggcccaatggacaaagacacctatcgctccgggagcaaagggaacagttaacgtcacttttgatgcggaggctttggggcatttcaacaaatccgtagccatttactgcaatgcacaaccccatctggtctatttgaagttcaacggtgaggtggtgcgtgaaatcaaggactttaccaaaacccatccatacctcatcggacagatacgtattgacaagaacagtcttgattttcccgatgtacaagccggtgagaagccggtgatgcatatcggggtagtgaacctgtccgatcgtccatacgaacccgtgttgatgcatctgccgccctatctgcaaacggaagtaaaacccaatgtcctgcaaaaaggggagaaaggggtcattaccgtcacattggattccgaacggctgacggacttcggactgacgcagtcctctgtctatctggcacgttttgcaggcgacaaggtgggcgatgaaaatgagatacctgtttccgccattcttctgccggacttttcgggcatgagcgatacggaaaaggcgaatgctcctgttgtcaacctttctatcaaggatattgacatgagcacagcattggcaaagaagtcgaaggcacgtcaggatattgttataacgaataccggacgttctcctttgcaaatcagcaagcttcaggtattccatccggcagtgggagccggtttgaagaagagcgtgctgaaaccgggcgaaagcacccgtctgcgtgtaacggttgtaaagcggaatattggaaagaaacgccgtcatctgcgtttgctgatgattacgaatgacccgatgcagccgaaagtcgagattaatattaaagcgaaataaaccataaatcttaccatggaacatccagaaaatagcggagaatataaaggtctggttgtcaatgcaggcattgagcaaccttcgtccgtcaatccttatttgaagcggaaaccgaaaaaacgtcaactttccgttgcagagtatgtagagggcattgtgaaaggtgatgttacgatattaagccgtgccgtgacactggtggagagtgtaaagcccgaacatcaggccatagcgcaggaggtgatagaaaagtgcctgccgtattccggcaattccgttcgcgtaggcatcagcggtgtgccgggagccggcaaaagtacgtctatcgatgtattcggattgcatgtattggagaaatacggcggcaagctggctgtgctggccatcgaccccagcagcgaacgcagtaagggcagtatcttgggcgacaaaacgcgcatggagaaactctccgttcatcccaaatcctttatccgtcccagtccctcggcaggttcgttgggcggtgtggcgcgtaagacgcgtgaaacgattgtactttgcgaagctgccggatttgataagatatttgtagagacagtgggtgtgggacagagcgagacggctgtacattcaatggtggatttcttcctgcttatccaacttgccggtacgggcgatgaactgcaaggcatcaagcgcggcatcatggagatggcggacggtatcgtcatcaacaaggcggatggggataatctggaacgtgccaagctggctgctgcccagttccgtaatgcactgcaccttttcccggctccggagagcggctggacaccgcaggtcctgacctattccggcttctacaatataggagtacaggaagtatgggatatggtgtataagtatatagacttcgtgaaagataacggctattttgaataccgccgtaacgagcagagtaaatattggatgtatgaaaccattaacgaacaacttcgtgacagtttctatcataatcctacaattgaggcgatgctggccgataaagagagtcaggtattaaaaggtaatctgacatcctttgttgctgccaagaacctgttagatacttattttgcgggattgaaaaattagtgggatgcacttcaaggcatcttcccccttactatttgtttttaggcacggattacacagatttactttattcttttccgtgtaatccgtgtctaaaagaaatcaccaactgtattttgacagtctctcgtttcctacacctcttttccttccttctcaaagtctttgcgtgatttgctttgcgtaacgatatatacaccgagaaataccagtgcgatggcaatacctttttccatattgaatgtagccatgccgattatgactgtaacgattgaagccacgataggttgcatatagttgtacatgcttactactgtggggcgcaacagcctttgtgccgtcatgatacatatataagccaggaagctgccgcctaccaccacatagcctacttgtaacagtgccgcagtagagatttcagcccattgtatggcagctacatcatggtaagagaaagggatataacacatggaggcatatacaaacatccatttgttcagggttataggagagtatttctgggataatcctttgaatacggtcaggtaaatagagaaactgatttgggcgatgaggcacagcaagtcacccatgatgctgccattgccgcttcctgcattgctgctgctcataatcagtatcaatgcgcccatggcgcctacaaaaatgcccaatacttttttattcgtaacgggctctttcagataaatggcagctacaatcatggttacgataggaagagtggtggttacgatagaggcatcgatgggggaagtcatggacagtccgaagatatagactccctgattgaataccagtgcgaagagtgcggcaaagaatatcttcaacatatcccggtggtctacctgctcgcgtttgcagaacagtgagagcaaccagaaacaggctgctgcacctaccatgcggaaagtggtgacggatagagctgagaactcgactaatgcggatttgccgacaggtgccattaatccccataggatattggcggtcagagcgaacagatgaccttgtatgttcttgttcatattgtaaaatgtgtattatttgtggtgaaaaacgctgcaaaggtaactattttctcaatctctttctttatatttgctacacgaatatatagaaaccatggaagtacaggccaattacatcagacgtatcgaaatacacggattgtggcaccgatacgatatagcttgggagttgcgtcccgatgtcaatatactttccggcatcaacggagtaggaaagactacgattttaaaccgttcggtaggctaccttgagcaaactacgggagaggtaaagagtgatgagaaaaacggtgtacatgttttcttcgacaatccggaagcgacttttattccttatgatgtaatccgcagctatgaccgtcctcttattatgggagatttcaccgcccgcatggcagacccgaatgtaaagtccgaattggattggcaactctatctgctccagcgccgttatcttgattatcaggtgaatatcggtaacaaaatgattgagctgttgagcggtgacgaacagcaacggagtctggctcccgccttgtctgtgcctaaacggaaatttcaggatatgattgacgaactgttcagctatacccgtaagaaaatcgaccgtaagagcaatgacattgtcttttatcaggacggcgaacggctgctgccctataaactctcgtccggcgagaaacagatgctggtaatcctgctgaccgtgctggtgcgtaatgaggagcattgtgtgcttttcatggacgagccggaagcatcgttgcacattgagtggcagcaaaaacttatcggcatgatacgcggactcaatccgaatgtgcagctcattctcaccacccactcgcctgccgtgattatggaaggctggctggatgcggtgaccgaagtggaagatatttcaacggtgattggcggcaggtgagtatcaatcgcacatcactgaatattcattattaaatcaacatttattttggcaacatctctccgacataatcttacttctgcctatttggacgccgcacacaaattctcgtcaaagaaagggcgcaggcgtattgtggcgtatgtggaaagctatgacgacatcgctttctggcgtacccttctggctgagttcgagaatgaggagcgttatttccaggtgatgcttccttccgccacttcgctggcaaagggcaagaaaatggtgttgatgaatacgctcaataccacggaactcggacgtagcctgatagcttgtgtggacagtgactatgactttctgttgcagggagccaccaatgtgtcgcggaagataaaccgtaatccttatattttccagacgtacgggtatgccattgagaatttccattgttttgccgaaagccttcatgaggtttgtgtacaggcaacactgaacgaccgtcacatccttgatttccccgcttttctgaaacgctattcgcagatagcctatccgctgttcttatggaacgtctggttttaccgtcggcacgatacgcatacatttcctatgtacgatttcaattcctatgtccgtttgcaggaaataaacctgcggcatccttacagtgtcttggatgccatgcagcgtacggtatctgccaaactttccgaaatggaaacccgtttcccgcagtatatagaggatgttgaccggttgggtgaggaactgcggaaattaggattggttcccgacaatacctatctctatatgcaggggcatcatatcatggattgtgtggtcctgaagttgctgatacccgtttgcaccgtactgcgccgtgaacgcgagcaggaaattaaacgcctggcagagcatagcgaacagttccgcaatgaactgacgggttatgaaaacagtcaggtcaatgtatccgtcatgttgaagaaaaacagcggttacaagaacctttatctctatcagtggttaaaagaagacatctgcgagtttctcgaacgggaaaaactctgacgccctatttatactttatacctcatattttatacctaactatcatggatatactaaagaatatcgacgaattattgatttcttggggaacagccccttctttggccgatatgctcgatcagtttatagcttttgtgcttgtgcttatcgttgcgtttctggctgatgtcatttgtcggaatatcctgttgaaagtagtggcgcatttgataaggaaaacaaaagctacatgggatgatattgtttttgaccgtaaggtactgattcacctcagccgtatggtggctcccgttatcatctatgtctttattccggtagcctttgccgagacgagttcttccacgttgggctttatccagcgtgtctgcctgatttatattctaatcacattcctaagttttatcaactcgtttctgaaagccgtttatgccgtatacagcgagaaggagcagcttcgcgaccgccctttgaagggtatgttgcagactgtccaggtgatactttggtttgtaggggctatcgtggtggtaagtattctgattgacaagtctccgttgtcgctattggcgggattgggtgcttctgccgctatcctgatgctggtgttcaaggactcgattatgggatttgtttcgggagtgcagctctccgccaatgatatgctgaaggtgggcgattggattgcgatgcccaaatacggtgcagacggtacggtgatagaagtcacgctgaacaccgtgaaagtacgtaactgggataataccattaccacgattccgccgtatctgcttgtcagcgactcattccagaattggcgcggcatgcgcgagagtgggggacggcgtgtcaagcgctccataaacattgatatgaacagcgtccggttctgtactccggagatgctggacaaataccgtaagattcgtttgctgaaagattacgtagagcagacggaagcggtgatagaggagtataataagaaacatcatatcgacaattccgtccttgtcaacgggcgtcgtcaaaccaatctgggtgtgttccgggcctatctgaccgcttatctgaaaagtcttcccgatgtaaacaaggaactgacctgcatggtgcggcagttgcagccgaccgaccacggtattcctatggaactttattttttctgtgccatcaaggactgggttccatacgagggagtgcaggcagatgtatttgaccatgtgttggccatcattcccgaattcgatttgcaggtattccaatcaccgtcgggaagggatttccaaagggtgctgtcttaattcctgaaggataattgggtgcagatgcttcatgggaattcggttgtgcgggcagaaaaaacatacagcctgcaaaagtttgaaccgttgcaggctgttgccctgataaactttataaagagaatttggaatgcgtgcgggttattttatccagtttcctttcatccagtcgcatgcggctttaatggcgtcgaaggaagcgtaggacagcgtagcatccactttgttgcttgttacggcggtgaagtcgtcgttggtgtaatctccgtcggatttcaatgcggcagtgacggtcatattggtgagtctggaagtaccgtttttcagcgaggcattcgttaatgcgctctccactaccagcggttgtcccttgccgcatactttggcattgtctatatcggcttgagtgccgcgacgcagacggatgccttgtttgctttcgccgttacctgcgaggatgaggtttttgagtacgggatgcgatacgggagtggctgcattgtcgttttcgttattgtccgcttcgatgaggcagtcgcagtcgtatcctaatgtggctttggcttcctgataggcaacgaggtcagtgccttttccgttccagccttcggtccagtcgaaagagtcgtcgctgcaacttaccactaccatattgcttacgtttaccgaaccgccgaagaactcgaagccgtcgtcagaacctttgtaagcctcgcagtggtctacaatcgtaccgttacctacaccgtaaaaggagattccgttggcttcatgctcttcgtcgaaggcaaatccggtgtattccagacggatgtactgcaatgttccggaattgtcggcatcgtcattgccgccatatacggcgccgcctatctctgaacttcctttaccgccttcggcattggtatgcgcttttccgcagatatgaatgccgccccatgctccgggttcctctttttcgctggtcatgacgataggtttgtcgggcgtgcctacggcattgattttggcaccttgcttcaccagaatatagtctacgatattgtcatagacagatataatctttactccttcttcgatgttcaatgtggcacctgcctctacaatgtattcaccgctcagtttataggtgttgccggctttcagggttacgtcttcggttattgtacctttcaggatactgccgttttctatcccgttgcctttgtcattgttgctgtcgttggtgttgtcatcgctgcaagcggtgagggacagcattccggctgcgagagccagcgaatagaatttcgatttcattgttttcataattcaattgttttaagttgactgttcgtctgtttgataatctatttaaaaggatttataatttgtagctgaagccaatttcaaagtcagtaccttttttatagcgctccacttccacttccgtgccggtgaaaggcacttcttgcttaaagatgacgttacggttcagcaggtcgtttacttgcagtttcaggctgaaatgcctgttgaggtcgtatccggcactgaagttcagtgtgtgcagagtctgttgcttgatgtctcccagattggatacgcccaccgcatggatgcggctgccttgcagattgtagagtaaggcgaggttcagttgccgttcttcaccgaaacggggagagtaggtgaggtctgcattggccagaatgggagaggcgccttgcaaaggacgttctttgttggtgtaagcgccgccttcgggcagttttacgttggtatacatatagctgaggttagcacccaaacgcaagtcttttatcaattgtttgcggcattccacttctacgccggcagccattccgttgtccgcattccggaagctgtgcagggtagctccgccttgcaatgcctggatacgttctatcgggctgtcgaggtatttgaagtaaccggtcagcgaaatcatgtctccgtttttgccgaagcgttcgtaacgcaagtcgaagttgtagttgtagccgttctgcaactcgtcgttaccgcggatttgtgccgagccgtaggattcctgatagaggaagggagccatttctatgaatgatgggcgggtaacggtacgggatgcggagaaacggatgctgttggcgtcgtttattgtgtacttcagatttagggtggggaagaaatcgtttttatccagattgcgccgttcggcataccagtcgccgccgtcagtggcatagtccacccactgtttgcttatttcgtagcgtacgccgaggtttacaagtaatgacggtacggggtagaagtcggtcagcaggtatccggagtaaatttcatttcctgcgcggtagctgtctttgggttgcatcacgcgttgtaccgttacgtttccgtctgctatgttctcttggttcaggaagccgtctgtatcgtagatgtcggtaacggtgggattaattttgttcaggttgtagtagaaacgggttgctttgtagtcgcggcttttattcttatagttgaagcccagtttcagaaaattgttttcgttccacttccagcgcagggcgaggttgccgttccactccttttcatccaggctgccgaaatagcgcatggtttcctggcggttcagtttgaacaggccgagtgtgccgtcatcattctttatatacatcacttggcgtctgtccggttcttcgcttcctgtcttgctgtacgagccgccccaggtcagttcccaacggtcttgttcgccgaagttgtgaaggccgttcagttggtggttctgcaaagtgtagatatgtgtgatgttattgcttccggtcagctcgtgctcttcggcatctgttccctcacggcgttggtaagtgtctgtggcattacgcgtatagaagaaagtatagcctatgcggtcgtgccggtgcagcgtgtagcctatgtatcctaatgcagcgagtttcagttcttgggcatagctgtcgtatgagaagttgtcctgtacattgccggttgcttccagggttttatagaaagcgttgtccatattctgatagccgttgccggcgcttacggatgccagtatgctgagcgtttggctgtcgatgctgatgttcttgccgaagccgaggttaccgttaaagtccggcagggttgatttcttctttacggcaaacgaggtgtcgaatatatttccggtctttacatagttgtcaaaatcagacagaggcatatcgagtgccgcctggtccacaccggaagtcttgaacaatgagccgttgcggttcatctgatagcggtctttgcccagggtattgaacttcccgccggtgttgaaactgatgctgaagaaatcttcggcgatgttctctttggtactgatgtctatgtgtgcacctgaatagtcggcaaaggcttccgcgttatataccttacttacggtgatgttctgtatggtgctcgacggaaatagatccagcggaatcagcttgttgtcgggattgggagaggcgatggggaggccgttcagggtagtcgtgctgtatcggtcgcccaatccccgtacaatgagctggccggcatcggcaatggagataccggtaatcttttttaccccttcttctacattgcttatacctttgatgctcatctcttttgagccgatgttttcgatggcgagtgtagctttcctgcgctccatttgcagggcacgttcgccctcaaggtttttccgggccactacggatacttcgcccaaagtctgtgcgtcgctttccagttcgaagttcagcacgacatcggctttgcctgactttacattgtttacaacgatgtctttgtagcctatatattttatggataatgtgtagatgccgtttgttacattcagggagtagttgccgtccatatcggcgatggcgccttgcgtggttcctactatctgtacggtagctccggtcagcggttcccgggtctgtttgtcggtgatggaacctttgatagtacctgccatgactgtcatgacagaaagcgtaaggaataaaataaggaagaatatctttcctaaatctaatttcgtactcatctcttttatgcgtttcttaatccgctgcaaagatgcgccgaacgtgtttcaagagtgatacatacattatacattctgttttcgtttgtatgaaggagctgttacgtaatccgtacgattttatcatgcggtataatataaataataatattaaatacttgtttgtttgagttttatggctatatttgtcccattatcaataaacaaacagacaaacaaattatggatgttccccctcacaatgataacgaacgctttcggcgtttgtctttgcttgggcgcattggttggtgggaagccgacttttctgctgagcagtatttatgttccgaatatgtatgcgatttgttggggatgaagggggacagcctctcttttcaggatttcggtcggatgattcgtgaggattatcggggacgcatcaccagagagttcctttccataaaggaagtggaggtatacgaacagacctttcctatccatacggcaaccggagttgtctgggtacattcccgcatggggtatagagagcttgcacccgatgggcatctgaaagctttcggaatcctgcaacgggtaacggaacccgtaaacaaagaggataaggaccgcatgtatcatatcaataatttgctgtatcgccagaactctatttcccattccttgtctcattttcttaaagacgagtctgtagcttccggcatctacgaaattctgaaagatattttggactttttccatgccggacgtgcgtatatttttgagtatgaaaaagattatacttttcagacttgcacttatgaagttgttgccgaaggggtgttaccggcggtagaagcattccggaatataccggttactttcatgccgtggtggactactcaagttttgtcgcagaaacctatattgttcgagtcattgtataagttgcccgaaatggaagaaggcgaattccggttattggagcagcagggtatcaaagctttaatggctgttccattggtggcgaatgatacggtgaaaggttttatgggagtagatttggtagaccgtactatcttgtggagcaatgaagactaccaatggttgggatcgttggccaatatcatcagtatctgcgttgaactgcgtaaaacgcaggatgaggcaatacgggaacgtcaggctttggaccgtagtgagaaactctttagaaacatttttgccaatataccggctggggtggagatttatgatactgacggctttctggtagatgtcaataacaagaatatagaaatattcggtatccgcgataaggcggatgtgataggtatcaacctgttcgagaatcctaacttgtcacctcagttgatagagcagatacgtgaccgggatattgtagatttcagattggattatgaatttgaaaatgtagagggatattatccttccggtaagcgcaataagataaacctatataccaaaatcagcaagttatatgatagtaagggtaactttaccggatatgcctttatcaatatcgataataccgagcgtatggatgctttgaaccgtatttgtgattttgagaacttctttctgttgatttctgattatgcaaaagtaggttatgcaaagtcgaacttgctggataggaaaggttatgccattaagcagtggtataagaatatgggagaagatgaaaatacgcctttgtcggatattataggtgtatataacaaaatgcacccggatgacagaaagcggattttggattttctttataaggcacggcttggagaagtaagagacttcaagggagagatacgtattttgcatccggggacggaagctcaatggaattgggtgcgcaccaatgtggtagtcaatcaatatcaaccggaaaacggtgtaatagagcttatcagtgtaaactatgatattacggaattgaaagaaaccgaagccaaactgattgatgctaaagagaaagccgaaacggcagatcgtctgaagagtgcttttcttgccaatatgagtcatgagatacgtactccgctgaatgcaattgtaggtttttccagtttgttggtgcagggagagaatccggaagaacgggagcagtatatggcgattgtggaagaaaataatgagttgctgttgcaattgatatccgatattctggatttgtcaaaaatagaagccggaacctttgatttcgtaaaacaggaattggatgtgaaccaactgtgtgaggatatggtgcgtacgatgaaactcaaagccagaccgggagtagaggttgtctttgatcatcgcctgccggagtgtatcattgtgagtgatcgtaatcgtttaaatcaagtgatagcaaatttcatgaataatgcgataaaatttacttcgaccggtagcatacgtttaggttatgggcaggcagaaaccaacttgctgcgcttttatgttgctgatactggcatcggcattatacaggaaaagcaggctgagatatttgaccgttttgtcaaactgaactcttttgtacatggcacaggattgggattgtctatcagcaagagcatcgttgagcaactgggcggcactatcggtgtggaaagtgaatcgggtaaaggggcttgcttttggtttacattacctgttgcttgataagaagtatttttccacttttgctgatgttcgggtaagggtaagttgcatgagtattgggtgaagttggcgatgcagcctttaccttgcttagccatcgcggcactatccaaagtttctcaagactggcgatgtccggcacgttaccgacgataccgattacatcttcaccataggttttcagttcctctacacgcttgtccagttgttcctgacggatgtctaccgcaacgactttagcgccttgttgcataaaacacttggcaatgttgccacccaatacgccacctgcatcggtgatgactgctactttacctgtaatactgaattgttcgtttataatctttttctccttttttcttttttatacgggaaagcacgcgaataaagcatgaaaaatataattccttatactttattattttctgcttcacgtatctatattgtatattttatacttgcgttttcttttgtttcatttagttttctactttcgtactcatctcttttatgcgtttcttaaatctgctgcaaagatgcgcagaagtgttttaagttatacattctattttcgtttgtattaaggagttgttactcatttatagcaaaaaaaggatgttttatatcaaaatagttattctatagtgtttttaagatttatatttttgttgcagtaaaacactgtgttcgaaaacgctaatttaaactaattgtaaaccaagattattctatgagaagcaggaagaaagaaggagtatattttatgagtatactcaagcgtcaggtgctgtttgtgctctttgcttttgcagcaaccttatgcgcattcgcgcaaaacaaaacaatcacaggacttgtggtagacggaaacggtgaatccatcatcggtgccagtgttcttgtcaaagggacaacgaacggaattatcactgacatcgacggtaagttcacactgaatgatgtgcctgaagcgggagttatccagattagttatatcggctacaagactcaggaaatctccgctaagaacaaggccaatcttaaagtggtgcttgtagaagacaatgaaatgctggatgaagtagtggtagtaggctatggtgttcagaagaaatcggacgttaccggtgccatgattcgcgtaggttccgaggaactgaattcacgtccggtagccaacgcctttgaagctatgcagggcaaggcagctggtgtagacattgtcagcaatgagcgcccgggcgaagtgggaacgattaacgtacgcggtgtgcgctctttgagtgccagcaatactccgctgtatgtagtggatggtattcctttgatgtccaatagcggtattgaaactttgaatccgcaggacattgagtctattgatgtattgaaagacgcctctgctacggctatttacggttctcgtggtgctaatggcgttattctggttactaccaaatccggtaaggagggtaagatgtctttgaactactccagtacggttactatcgaaaacctgcaggactattccgaaatgatgaactctgcagagtatatcgattggcgtcgttggtcttattactatctgaatccttccaaatatcctcgaggagaccagcccactaaagagaacgattatgagatctttttaggtgctacagaccctacggcttggaaaaacattgaaaaaggctgggcaggtggtacttgggacggctctcgcgtacctaatacggattggtgtgatatggttacgcagaccggagttacccatgaacacacgttgagtgccagtggaggtacggacaagatgaaaggttatgcgtctatcggctatttggataatgagggtacggtgaaagggcagtcttatactcgttatactacaaaactgagtttggatttgaagcctactaaatggtttaatttaggattgaatgttaatggtacgtttagtgaacagcaatatggttcgtctgcaagttctgtcggtcagttgataaagggtatgccttctaacttatatgcagcatctaccagtttgttcccttatgcttcaccttatgatgaggatggcaaccgtattgaatatcccggtggtgatgataaagtaaagaatgtaatgaatgaatggaacaacagtcagaatgaacgtcgtatgttccgtgctatcggtagtttgtatgctcaattggatttaggtgaaatttacgctcctttaaaaggccttagatatcgttttaatttcggaccggatttccgttattatagaaacggtacattccgtaatgaagagtcaattagcagtgaaggtaagaatcgcgcttccttgtctaaccagtctgacttttcctggacgttggataacttgatttactatgacaaagaatttggaaaacattcagtgggacttactttattgcaaagtgctacagggtatcactacgaagaatcctctatggcggcagaaggtattcctttggaaagtgcgaaatggaatgcgttatcaaaagaaaatgtctctttgctggatgagtggaatagcggactgattgagaaacagctcctttcttatatgttccgtgtgaactatgactataataataagtacttattgacagtttccggtcgttgggatggtgcttcacagcttgcagaaggcaataagtgggctttcttccccagtgcggctttgggttggcgtcttgatcaggaagagtttctgaaagatgttacttggttaaaccagttgaaattccgtttgggtgttggtgttaccggtaattcggctatcgacccttatcagacgaagggtgctatagtttcgctctattatccgttcggttctgcgcttgctcccggttatgccgcttcggaaccattgattaaagatggagctgtggcaatggccaataagaatttgtcttgggagaagaccacgcagtataacatcggtcttgactactcggttttaaacggacgaatttcgggagttcttgatttctatacttcacgtactactgatttgttgatggcaatgacaattccttcattgaatggttatactaatacgtatgccaatgtaggtaaaacatccaatataggtgtggatataacgttgaataccgttaacgtcaaaacacgtgattttgaatggtctaccagtattaatgctgcatggcagaaagacaagattgatgaattggcaaatggtaaagaggacgatataaataataattggtttataggacaggcgttgggggtaatttacggttacgagtgtggcggactttggaaagaagaagacgctgccgaaatggctaagttcaatgccaaagggcattcattccaagcaggtatggtacgtccgatagaccaaaatggtgattataaaatcgacccgaatgacgatcgtgtaatcataggacatactcgtccccgttggacttttggcatgacgaatacgtttacttacaagaatttcgacctctctgttatgatgtacggacgcttcgattatatggtagataccggcggtgaatggcagggtggacgttatatgcagcgtaagataaattattataacgaaaacaacaagaatgcagaatatcagaaacctatttacaatattggcggtggagacccttactatcgtattgtaggttataagaacggttcatttctgaaagtacgtaacatatctttgggttacacttttccgcagacgctcatcaaaaagtggaatttatctaatttaaaggtttatgtacaagccaagaatccgggacgaattttctctaatattgatttcctggaattggatgcttcgcaagcgtttacttctacttggaaccgtggattcacaattggtttgaatgttggattttaaatgtcattaaaagtattatgattatgaaactacataaaaaaataacatttggcttgttggccttgactttggtaggtccgatgacttcttgcagtgattttctggatgaggagttgactactcagcagaatacagatttcttcgatactcaagaaggtatcgaccgtttggaagttagcctttactataatttacgtttccattttgcaaaagagtgggcatgtgccactactaactatggtacggatgagtttcgtgtaggtggcgacggttctaatgcttcctggaataattatgatggaaacttccagtcatcgattgtcagcaactctaccaatatgtatgaagtttgggatggcatgtatatcggtatcaacaatgccaatctgctattgagtaaggttactccggatagttacaaagcagacaataagaatacttatatgggagaagcttatttcctgcgcggattcaattatctgaaactggtatctcagtatgggggagttcctttgaaacttactccgagcgaaactccggaacgtgaattttctcgcgctactgccgaagaaacattgcaacaggtgatcagtgacttaaaagacgcttataagtatctgcccgaaacagctcccatgacaggaaagatgacgaaagatgcagcagcgcattttcttgccaaagcatatttgttgcgtgccagtgagataaatgatgattggaacagcgcaacgaaagaggatgatttgaaagaagcattacgtttggcgcaagaggttatatctcatcgtagtttagctccgaattatgcagatttgtggaattatactgagccgaacggtgcaaacgagcaactggatgaaataattttggcagctcagttctcttctgacaaagcaacggaaggagctaatggtaatcagtgtcatctctattatgtttccgtatacaaagatttgccgcaaatgcaacgtgatattgctggtgaacgcgagtatcaacgtcttagaactacttattatatgtacaatgtgtatgatatggtcgatgactctcgtttctggaaaagttttaaaacgaaatatgcggtgaacaacccgcaaaaaggttccggatacgcacacggtgatttgggtatcatgtatgtaattaaccgtcccggtgacactcgttttgatgctgtacagcttaacaatcaggtgacttatgacaagacggggaaaacaattccgacagtgtttgtagcttatccgaaagaccgcaacgcagaagatgatgaggctttatatgattatactaatcgttattgtacgttgaataagtatattgacggttcccgtgaatcgagagacagtcgtgttggtttccgcgatggtattcttgcccgtttgggtgaaacctatttgattgcagccgaagtgttgattcgtcaaggcaagtatcctgatgctttaggctatatcaatgatcttcgtgcacgtgccgcttataaagcaggagaagaccgttccgcatattgcgatggtggtgctgcttataatgataaagcgttgggatataaggatgacggtgtgaattcttattttgcggagaattcttattatgagtccaacaatatcgacagaaacattaaatctgctacagacttaaagattacggatattcacaacttgccggccgaagatgaggctattatcagtaaattagggtatagtacggattatgaccgtatgctgtgtctgttgctgaacgaacgttctcgtgaactttgcggtgaatttcatcgttggcaagatttatcaaggacgttgactttggtcgaacgcgccaaagcatttaatccggatgctgcccccaatattcaggaacgtcataatttgcgtcctattccgcaaacctacctggatgctatccaaaaggacggtcatgcgttaactcctgaagaaaagaaagcggaacagaatcccggatattaatcggcatccattataagtttataatacagtgaagagaagaaggctctctgccaatcggggtagagagccttctctttgtgtttctttccggtaaaataaacaatcgaagattgacggggttatactccgctgaatgcgctgaaaccgccgtcaataggaagcaatgcacctgtaacgaagctagcggcatcgctgcacaggaactgtacggctccgttcaattcgttgatgtcgccgaagcgtttcatcggggttttggccaatactttcttgctgcggtcggtcagtgagccgtcggggttgatgagtacggcgcggttctggtcgccgatgaagaagcccggggcgatggcattgacgcggataccgtctccgtatttcagtgccagttcgcttgccagccattgggtgaagttggcaacggctgtcttggctgccgaatagcccggaacgcgggtgatggcgctgtaagctgccatggaagatacgttgacgatgcagcccttaccttgcttagccatcactttgctgaacactaaagacgggtaaacggttccgttcatgttcagattggtcactttttcccagcaggagatgtccatgtcgtagaagtgctggtcgggagccagagttgcgcccggcatatttccaccggcaatgttgagcagaatgtcgatacgtccccacttggcaacgatgtcatcggcaagtttctcaagactggcgatgtccagtacgttaccgacgataccgattacatcttcaccataggttttcagttcctctacacgcttgtccagttgttcctgacggatgtctaccgctacgactttagcgccttgttgcataaaacacttggcaatgctgccacccaatacaccacctgcaccggtgataaccgctactttacctgcaatgctgaattgttcgttcataatctttgtctccttttttctttcttttctttttttatacggggaagcacgtgcataaagcatgaagcgtatcccccctcatactttattgtcttctgcttcacgtatctatattgtatattttatgcttgtgtttccttctgtttcatttcgtcttgtaccactgccatcatgccttccacctgtgccagcgccagcatacggccgtggaatgaatagccgggattatatcccttgtcctcatcgcccagcatcatccgtccgtggtctacacgcatgggcaggttcgggttttcttgctcgaagatgcggataaggtcgatgaggtgaccgcgtcccgtcaggtgggagctttctatgaagttgccgcccggcatggctgcggtgctgcgcagatgcacaaagtgggtgcgtgatgcaaacttcctggcgagttcgcgggtgttgttatgctctcccgcgctgagcgagccggcacagaacgtcagcccgttgtgtggattatccactgcattcaggaaccaggcgatgtcctcttcgttggtcacgatacgcggcaagcccagtacctggaaaggcgggtcgtcgggatgtacgcacatatttacgccgtactcctcgcacaccggcataatggcggcaaggaaataccgcatgttctcgcggagcgcatcgcggtcgatacctttgtacaaagccagcagattcctgaatatattcaccggattcttgtcgccttccttgatgttgccgtttacgaatccctgcgtctttacgataatcgcatcgacaaggctgtctttttcggcttcggtgatggtcttgtccagttcggccactttagccagctcttcggcggagtaatccttttcggctccctcacgttgcagaatgcgcaggtcgaaataggcaaagcgcacccggtcgaagtagagcgatgaggttccgtctgcccaggggtgttgcaaatccgtgcgtatccagtcgataacgggcatgaagttatagcatacggtctttacaccgcatttgcccagattggcaagactgattttgtagttctctatcagttgttcgcgttccggtccggcatatttaatggcctcgcatacgggcaggctctccacaaccgaccagcgcaagccataggactcgatatatgtctttaaatcgttgatggcttcttctgtccagatttcgccgttgggcacatcgtgcaaggcggtaactatcccttccacaccgatttgccgaagcatatcgagcgttattttgtctttcttaccgaaccatctccaagtcttttccatacttctttttgtattaatgatttaaaatgattatttactgcaaatgtaggcactaaaacagtttgtatataaacggatatttgcaggatgtttgcagatatttgcgtgtattgaaagaataatgggatagcaacctttgcaacgaagtaaacggctttcaatcaatactatataagtaccaatataatatctgcgtttggtacgggaaataccaacggttggtacgccttgtaccgcactttggtacggctcctaccacagtttggtacagctcgtaccacgctttggtacagttcataccacgcttcggtacgtctcctgccaccggttggtatgctccgtaccaaccggggtattctttccgtttccctttgtattttcttttttcccgcagacttattgttattattcgctatctttgtgtaaggataggatgcggctcggcaaaccgggagatgccgtatcaacatcaggcagtgttatgagacagataataaacgaacagctccagatatcggagtccaacccgataaaggcgcgctattacgactacgaccgcttcacttacccctggcatttccacagccagtacgaaataatctatgtgaagaaaagctgcggccgttgctttgtgggcgattgcatagagcgtttttcggaaggcgatgtggtattgttcggtcccagcctgcctcattatatgcggagtgacgatgcttatcacggcgataatccccggttgcgggtgcaaggaactatcattcagtttgaggagaacttcatgcaatactcgttcgaccattatccgcagtttcaccagatacgggtgttgctgaaagaggccagacggggtgttgtctttcacacggccgatgccggtccggtacgcgacatggtatccgcttttcccgaactgaaaggattcggacagataaccggtttgctggatttattgcaggcattggcggtatccctcccaagaaggatgctggcaagcccttgctactatgagaagtttcccacagcgggaaacaagcgtatcgataaaatcatctcctttatcaacagcaactacacccgttctctcaagctcgacgagatagccgaaatggcaaatatgaacagcagcgccttttgccgtttcttcaaggacgccacggaaaagactttcctgcaatatgtggcggacatgcgcataggttatgcctgcaaactgctgaccattggcgatatggaggtttcacagatagctgtggagtgcgggttcgactctattccgcacttcaaccgcaccttcaagcaactgacgggactgacaccgacgcagtaccggaaccagataatgaaataattccccccttcaccctccgtctcccataaacaggagtgtgcgaaagggtgaaggggggatgtggtaaaagttattttacggcaaacagaccgttacataccgaacgagaacttgtcgatggactggtataccacgctggcaatactcagcgccacgatgcccagcgtacagatggcaaggccggcacgcgtgtagttatcgctgcggaaagcggcgataggctcatcgctcttgttgatgtacattgcctttacaatcttcagatagtagtaaagcgacagaatcgtattgattaacgcaatgaacaccagcagatgaaaaccgctttcgaatgccgccgcaaagatgaagaacttcgagaagaagcctgcgaacggcggaatacccgccagcgagaacagtgccagcgtcataaggaaagccagcttagggttggtggtgtacaatccgttgtaatcttccagtgtaaacttatcggcgcgcaatgctacaatcgtgataacggtaaagacggcgaggttggcaaacaggtaaatcagtacgtagtacaccagcgacgtcatacccagcgacgttccgctgataacacccagcatgatgtaaccggcttgcgagatactggagaacgccatcaaccgtttcaggttctcctgacgcagcgcaaagaggttggcgagcgtgatagaggcgatgataacccagtagagcacttcctgccattgcgtcgccatcggtgcgaataccttatagaggatggtcatcagcacgaatgccgccgcacctttggagataacgctcaggtaagcggttaccgtactcggagcaccttcgtatacgtcggccgtccacaggtggaaaggaaccagcgaaatcttgaatcccatgccggagaagaagaatacgaatgtcataatctgcaacgggcttccgtccagatgtgccggaatatcggcaaagtagagtgtgcctaccgtaccgtatatcagcgaaaggccgtaaagcagcagcccgctggagaagagtgcggtaaggatgtacttggcgcctgcttcggcagagtggtggcggtacttgtcgaaagccaccagcgcagccatggggatgctggccgtttccagtccgatgaagaacatcaggaagtggccggcggaaatcatgaagtacatacccagcagcgtggagagtgtcagtacatagaactcgccctgcttgattgccgcatcggggcggcgcatccactcgtgcgccataaggaacacgatgagcgtacctacgctgagaatggatttgacgatactctgtatcggctggttatggtacatcccgccgaaagcgtcggctgccggaccgggaacgatggttataagcgtatggacgatgagcagggcaacgggcagcatggtgttcaacatcggcttgccgtcatgcttgtgcgcatccggactcatgaagaggtcggctatgaagaggataacgataaccgctatcagcgacagctcttctttcattaatagaaattgggagtaatccatgttatttggtgattagtgattagtgtttagtgagtggctaataggttgactaccggcagcacgctgtctccaatcatgttgcttatccacagcggagcaagacccagtccggctacgcaggcaatgaggatgattacggcggtacgttcgtcccaggtggcatcggtcaatgtcaggtggtgcttgttggtacaggttccgtagaggattttaccgacaaggcgcaggatgtagactgcggtaatcacaatactcgtacaagcgatgacggtccatgcgcggtggaaggtatcgggatgctggaaagcgccgttgaagattgtcatttcggcaatgaaaccgctgagtcccggcagaccgaggttggccagaccggcgatgacataggataccgccaggaagggcataatcttcatcagtccgctaagctcgcgtacatcgcgtgtgtgcgtccgtccgtatatcataccgataagggcgaagaacagggcggtcatcaatccatgggaaagcatttgcagcacggcacccgtacaggctgtccggttcatcatcaggatggcgaaaagcaccagtccgcagtgcgatacggaagagtaggcattgatgtacttcaggtcggtctgcacgcaagcggagaatgcgccgtacactacggagatacccgtcagtacgaggaatatccagcccagctcctgtgcggcttcgggcatcaggtacatggcgatgcggaagcagccgtagccgcccagcttcatcagtacgcctgcatgcagcatactgacggcggtaggtgcggatgcatgaccgtcggggctccaggtatggaacgggaacagagcgcccagcacgccgaaaccgaggaaggtaagcgggaaccagatgcgttgttgctccacgggaatattgtgcagttgggctatctccagcaggttcatggtggtggcgccgctaccgaagtagataccgaggataccgataagcaggaaagcggaaccgcccatcagcatcagcgtcagtttcatggcagcgtattccttgcgtcccgaaccccatacgccaatcagcaggtacatcgggatgagcgctacctcgtagaacatgaacatggtgaacaggtcggtcgagataaagaaaccgaacacacccatcgacagcagggtgaaccacaggaaatattctttggtcagcggttgcagacgccaggaagcgaatgtacccgtaaacacgataatggccgagagcagcagcatggctaccgagatgccgtccacccctacggaatagtggatgttgagggcgggataccaggctacatcggcacggaacagcatttcatccgtagcgccgccgtgacgggcttgcaggtagacgacggtcagtccgacggctgcaacgagcaatgccgaagcgccggctaccatcaccgcacgtatctgtgcgatattacggctgagccagaggcccaacagcatcagcaaggggatgagtacgaatatggataagaaattcatctttataatatggtattaattgttattgttctatatggttgatacatcactatcaatttccgtttctcgtttacagcaacagcagcagtatcagtgcaagcgtacccagcaggaatacgaaggtgtattgctggatgcgtccgctttgcaggccgcgtatctcgtcgctggtggcattggcgccccaggcaaggaaatcgaagaagccgtccaccacatgacggtcccaccaggcaatggggcggctgatgcagccgaagatgatgcggtgggtgatgaactggtagacctcatcgatgtagaagcggtgataggctgccgtccacaagccgttgaagcggcgggcaagcgcatcggcaaccggctgtttttcgcctttatacatataagtggctacagctatggagataaccgcaatagcaatgcttgttcctgctacgctccagtcgaggtggatggtataggcttcgccgttggagctgacgaagtggccgaaaggaatgaatccggcaactatcgtaactgcggcaaggaacatcaggggaacggtcatggcaaggggcgactcgtgaggcgtgtgctgatggctgtggctttcatcgcttgccgacttctgccccggctccgaactgccccagaaaatgccgtaatacagtctgaacatatagaatgcggtcatggcggcaatcaccgtcataatccaacccatgacggggctgaaccggaagcaggccgtcagtatctcgtccttggagaagaatccggagaacgggggaatgccggcaatggcaaggcaggctatcaggaaagtgatgtgcgtaaccggcatgtatttacgcaggccgcccatggcggacatctcgttgctgtgcaccgcatggatgatgcttcctgcaccgaggaacagcaacgccttgaacatggcgtgcgtaaacaagtggaacatgcctgccatataacccagtccgccttcgtgcgggtctgtggatgtacatacgccgagcgctaccatcataaagcctatctgcgagatggtggagaaggcgagtacacgcttgatgtcactctgtacacaagccacgctggcggcatagaatgcggtgaatgcgcctacataggctacgaggtgcagcacgtggggcgcatagtcgatgaacagcgggaacatgcgtgccaccaggtatacgcctgccaccaccatcgtagcggcatgaatcagtgcgctcaccggagtaggaccttccatggcatcgggcagccagatgtgcagcgggaacatggcgctcttgccggctccgccgatgaacatcagtcccagcgccagcggaatcatggcagcgccgcctttcagcaaggccatttcattgggttggaaggtgtaggttccggcatagtaaccgtaaaccaggataccgataaggaagcccaggtcggcaaagcgggtcacgataaacgctttcttgctggcggcgattgctgcgggtttcgtgtagtagaagcctatcagcaggtaggaagacacacccaccagctcccagaacagatacatctggaagatattggttgccaccaccagtccgagcatggacatcgtaaacagcgagaggaaagcgtagtagcgttggaagccgcgttcgcctttcatatagccgaaagagtagaggtgcaccatgaacgatacggtacttatgacaatcagcatcatcaccgatatggggtcgagcaggatgcccaggtcaatgctgagtgtcggcgtaaacggcagccatgtgcagttgtaaggcatcagtgtggcaaatgtgccgtctgccagccgcggggcggtgaaatagtgtattgcggtgaggtaggagagtaccgccactgcacccagcacagccgtgccgatgagtccggcagtgcggtgcgacatccatttgccgcccagtcccaacacaaggaacgagagcaaaggaaggagaaggattagaatcgtatattccataattgttgaattgagaattgaaaatggagaattgagaaatgctgctcagtctctctttttgtttttattgaatggctcattatgcaggcggtctgcacaactctatgcagggtgtctgcacagtgctatgcaggacatctgcacaggcttatgcaggatgcctgcacaggcatctaccatttgagttcgtccagcttgttcacctgtatgctgcggatattgcgatagatgttaatcatgatggcaatggccacggccgtttcggctgccgagatggcaatggagaacagggagaagaagtaaccttccagtccgccgggaaacaggaaacggttgaataccgcgaagttgatgtccgtagcattcagtatcaactcaattgaaatcagtatcgccaacgtattgcggcgggtaaagaacccgtagatgccggcgaagaacatgatagccgagactatcaggtaatattccatgtgtatcataaatcttatcttttacgtgctattaacaatccgcctacgatacatgccagcagcaggatgctgacggcctcgaagggcaataggtaaccgtatttgtcgccgctcagcatgtggtggccgatggtcttgatgttgacttcgagcggttcgatgtctgtggtggcgatgaacttatgtttcagggttatgaacagtacgatgacggctcctgccacggtagcgcccagtccggcaaggaacttgctgcgtttcagcttggccgccatgtcaccttcgccgctggtgagcagaatggagaagacgtagagcacgacgataccgcccgcatagaccataatctgtaccgaaccgaggaacgtatatcccagcaggaagtagatgcctgccgtgccgaaaagcacgaacagcaggtatgtggccgaacgtaccatgcgtctggtggttaccgtcagtatggagaatacgctgatgaaggccgcaaggaagtaaaatactattgtttcaagattaaattccatgttattgattactaattatgaatgactgattacttcgctgcttcaggctggggagcggcgggtttcttcttctcttctacgtgactgcccggatggttcagcgtcagtaccagtttgctgcggtcgaatacggcatgctcgaagttctggtcgaacgtaatggcatcgtgcgggcaggcattgacgcaaagctggcagaatatgcacgaaccgaggtcgtattcgtacttcgccaatatcttctttttcttgccgtcttccgtttctatcgtctggctcgtcaccttgatggtgtcgttggggcaagccgtctggcacaagccgcaggccacgcaatggtgttcgttcttctcgttgtggggcattgtcagcgtgccgcggaaacgttcggagagtttcagcgtcttccggttttccggatactgttcggtagtcttcttccgccagaaaacggtcatggtggttttcatgcccgtcagcagggaagtgataccgtgtatgaggctgcctatgtaagaattatgttctttttctttcattgttgtaattattatttagtgttgcccgaaaggaaatattgctccggtgctgtgccggcttagaaatgcaattcaaatactacgattaataccattagaatcaggttcaccatgctgatgggaaccagatatttccattcgaggttcagaatctggtcgatacgcagacgcgggaatgtccatttaatccacatcagcaggaacaccacgaagaatgccttgccgaagaaccatacaaagcccggaatgtagtccattacagcgttgaagccgtccaggccgacgatgtgcaacggcatccagccgcctaagaatatcgtggccgccacactcgctacgatgaacaggttcaggtactctgccaggtagaagaagccgaagcccataccggagtattccgtatgatagcctgccgtcagctcgctttcggcctcgggcaagtcgaacggaccgcggttggtttccgcattgccggcaatcaggtagatgatgaaagctatcagagccgggatgtgtcctttgaagatgaaccagccgtcggcttgtccggctacgatttcggagaactgcatcgtacccatcaggactaccatcgtcaggatgctcagtccgcacgagagttcgtaactgatgatttgcgcaccgcttcgcatggctccgataagcgagaacttattgttggaactccagccggcaagcaggatacctaccacgccgatgctcgaagcggcaagcaggaagaacacgcccacgttgaagtccagcacttccaggcctttgctgacaggcaggcaggcgaaggtgaggaacgaggctatgatgaccatgaacggcgccaggttgtagaggaatcggtcggagaacttcaggtcgatgatttccttggtcaacatcttgataacgtcgcacggcacttggagcaatccccattttcctacacgcatcggaccgaggcggcattggaaaaaggcgcatattttgcgctccatgtaaatcaggataatggcaagcactgcatacatcagaatgatgcatacgcctatcactacacattcaagaaacaccgccagaccttccggcatgagggaggtcagcatctggtgaatccaattggttactatactaaagtcaaacatctgtttatttacggttttacgatttacgatttgatgtatgtctgctgtctgttattgacgttctttttgctttttaccgttatcggtcgatatcgggtactacatagtccaatgtaccgccgatagcgataaggtcggcaatctttgcaccgcggcaaatcgtatctacggtagataccagcggaagccccgtgctgcggaagtgcaggcggtagggtgtcttgtcgccgtggctctcaaggaatacgccgaactcgccgcggctgccttctacggcagcgtagtaagtaccttccggtacgcggataatcggtttcatcttctcctggtatgcaccttcggggatattgtctatcagttgttcgatgattttcaggctctccatgatttcgtccatacggatgaggtagcgtgcccaggagtcgccctcggtgcggacaatctctttgaagtccaccttgtcatacaccccgtaaggcatgcgcttgcgtacgtcgcacgcccaaccgctggcacggcccgtaccgccggtggctccgaacgctatggcatcttcgcgggagagtacgcctacgcctttcagacgctgctgcgcaatgatgtttcctgtaaacacgtcgtggtattcgtgcaggatgccgcgcaggtatgggatgaactctttgactttcttctggaagtcgggggcgatgtcggcttgcacgccgccaatcgtgttgtaattcatgatgaggcgtccgccgcaggttccttcgaagatgtcgagaatcttttcacggtcgcggaagccgtagaagaaggcggtcagtgcgccgagatccattgccagacaggagtagaaaagcaggtgcgagtcgatgcgctgcaactcgtccatgatggtacggatgtactgcacacgttcgcttacctctatgcccatggccttttcgatacacatacacaaggcatggcggttctggtgagcgcccaggtagtccagacggtcggtcagcgccagtgtctgcgggtatgtaaggctttcgcacatcttttcgataccccggtggatatatccgcagttggcatcgatttttttgatgatttcaccttccagcgatacgcggaaacgcattacgccgtgggttgcggggtgttggggaccgatgttcaccacatattcgtcgtcgccgaagagttgcgtttccttgttctttaccgttccgtccgggttcagttccagttcggtggtggtatcaatcgtttcctcattgtccatgcgcagcgggttctgtgcttccgggtcgtcgtctttacgcatcggatgccctacccagtcgttgcgcaggtagaggcggcgtatgtcggggtgccctacgaataccacgccgtagaagtcgaacacttcacgctccagaaagtctgccgctttccagatgtcgcatacagagggaagttcgggatgctcgcggttgagtgtggcggtgcggatggcagtccgcttgccggtgacggtggattccaactgatacaccacgccaagtccgcgcggagtgtcgggagtgtctttggcggcatccggttcgccccagtccataccggtgaggcattccagaaagtccatttgttcttcctgccgcaggcgcagcatttcgtcatgcaaggctgcgggttctatatatcttatttccatactcatattcatattcattcttccggtcgttcttctttttggtttacaccgccaaagtatttctctatttttactttacgctgcaactgcatcattccgtagtagaatgcttcggggcggggagggcatccagggatatatacgtccaccggcaaaatcttgtctactccgttcacaacgtggtaggacttcttgaacgggccgccgctgacagcgcaaccgcctacggctatcacatacttagggtctgccatctggtcgtacaagcgtttcagcaccggagccatcttgttcgtgattgttccgcacaccataatcatatctgcctggcgcggactggcacgggctacctcaaacccgaagcgcgccatatcgtagcgggctgcaccgagggccatgaattcgataccgcaacagctggttgcaaacgtaagcggccacagcgaattgctgcgtccccaatcgatgaaatcgtccagaacgccgatagccacattagcgccgccggcattaagttcccgaaccaatttctccaacgtttcgttgtctgtaaactcctcataagggatggattttattttgggtttcttcgttacttccattccaacgctcctttcctccaggcatatgcaaggcccagaaccaatataataaggaaaaataaaatactgaaaagtccggcagctcccagttcgcgtgctatgactgcccacggaaacaggaacaccgtctccacttcaaacatcagaaacaggatggcaaacaagtagtaacctacccgaaactgcatccatgatttaccgcgggtgggaataccacattcgtacggctccattttctgcacattgtacgaacggggggctatcgcattggacaatgcgatgacgatacccacgaaagcaattgccgtcagcaagacggctaccaacaaagtaaagttcataaatccgataagattttagatatataaaatatagatatacagcactaaaacagcgataaagcgataaggtgacaaggtgataatgctttgccctttccttaaatgataatcttccttaacccgattatgtaataatgcggaccgggcacggtaagacagtgtacattcggcatacggtcatagctttgcgcacgcagcagttgctgcatacggataatatcagtgcgcaacagggaacttttgttgtttggaacctgctggctttccacatgttccaggcaagaagcggcggatgatgtatgtctgtaataattatgaatgacctgttgggcggtaggcgcctgcgtcaaaatgcaactctctgctttgcaaccggccggagcgcacaaaaaatccgcagcctctattgcaccgttgtgtaataaaaccgcgagtatggctatcatacaatattttatgcactgtttcatacctccctatctcttttcagggcgcaaagatataacaagtatctctcattttgctatctccgcataacaaaataaggctatttttacactttttatcctaaatcaattccgtttccagaattccggggtgaacaaaagtaagacggtgaacaattccagacgccccaataacatgaggaatgacagtaaccatttggccgcatcgggcagggcattccatgaatatgccggaccggtgtcacccaatccgggacccatattaccgatgctggatacaacgcaaccgatggactcttcggcacctatgcccatccccatcattattaatatgctgacaatgatgatgatgatgtataaaaagaagaatgccagtactgtagagacgatggaaggcgatatcacctgtttgtttacacgaaccggcagtacggcattagggtgaaggatatgcttgaattcattgcgcgatactttggcaaggattaccatccggatacatttcagtccgccggttgtactgcctgcgcaagctcctattaccatgacaatggttagcaatccccaaagcacgggtgtccacagcatgtagtcgtctgtggcaaagccggtagaggtatgcaacgatatgacctggaacagtgatttgcggaaggcctcttccgctcccatcggactggtatagtagagcacaacggcaatgatggcggtaaagcccgctaccgaccagaagtaccattttaattcggcattgtcaatgacttttttgaacttccggttgacgaagagtagcagcaatgtaaaattgataccagaaatgaacatgaagacagagatgacatattctatatagggagagttgtaataggctacgcttgcctgcttggtggagaaaccacccgttcctgtggtggcgaaggcgtggcacacactgtcgaaccagttcatgcctcccagcattaacaggactacgagaatcagagtaaggctggtatagatgctccatatccatttggctgtgatgccgatgcgcggatgcaccttgtcgtgcgtggggccgctggcttcggcggcaaacacctgcaggccgctgaccccgaagatgggtaatacggcaatcgtaaacatgataattcccaaaccgcctatccattgtgtcataccgcgccagaacagcaatccgtgaggaagcgattctatattatccagcacggtggctcccgtacttgtaaaaccggacatggtttcaaagaaagcattcgtgatgtcagggacatatccgctgatgtagaaaggcaacataccgaaaagagaaaaagccacccaggcaaagctgaccaggacgtaaccgtcgcggcgggtaagttgtttctcaccaccttttccggcgatagccatgagcagacccactcctgctgtgatacctgccgatttccagaaatcgaggagggcttcgtcattatagtagtacgatattgccgaacatgccagcaacatgactgtctccagcagtagcagaataccgataatccgtataattgtcttaaagttaatcacgcttgtttggattttaagtcgttaattttgaattatgggacggggcgcaggtgcagccaattcataattcagaatttataactcccgattaattaaagtatttttcgattttcttaatcatcatgttcaggcagaataccaccacatggtcgccgggctgtatttgcgtgttacccataactaccacaccctcgccgttgcgtatcagtccgccgatggttgtccctttgggcaggccgaggtctttcaccggatgtttggttatctttgaacctgccttgacggtaaattccgctacatcggcattggcaaaggtgaggcattttacgttgctcacatcggcatccagcatcatctggtagatatggctggcggcaatcatcttcttgttgataaccgtgccgatgtcgaggctttcagccatgcctatatagtcgatattttctacttcggctacggtttttcttacgcccatgcgttttgccgccagacaggcaagaatgtttgtttccgagtttccggtcagtgccacaaaggcttcggtattcttcaatccttcttctatgagcaggtccatatcccgtccgtcgccgttgataatcattgtcttgtcatccagcagttcggtcagacggttacagcggttcaggtcattgtccacgattttcacctgcatatagtcggggacatattgtgcggtacgtacggcgatgcggcttccacccataatcatgacattgcgtacgtcggcataatcttctttgcctgctatcttgcggatatatggtacgaatttgcgggtagtcgtgaaataaacaatatcatgcagtttcacaacatcatcgccgcggggaatcagtgtttcgttaccgcgcttgatggccaccacatgataaggcaattccggtccgcccaactgatgcagggggatgttcaggatttctgctttttcgcgcatcttggctcctatcagaatcaatgctcctccgcaaaattcccaccattggcgtacccagctcatacggatagaagatacaatctcttttgccgcaagcatttccgggtatataagcgaatctactcctaacttctggaaaaattccttgtttttgggcagcagatattcgtaattgtcaatgcgccctacggtttttaccgcacccaggttggttgcaagcatacaggcggtaatgttacggctttcgtcgggagtaacggcaatgaacaggtcggcctctcccgctcccacttctttcaatccttttatggaagtgggggaggcgttaacggtcatcaggtcgaagttggaactgagcgtgctcatcctttcttcgttgtcgtctattaatatgatgtcttgcttctcgcgcgacaatagtttggccaaatgtgtgcctactgcaccggcacctgcaatgattatcttcacaatgctttaagaaatgaagaataaagaatcaggaatgaagtacggaggcttgcataacgcagcccggctcttcattcatcattcctcattcttaattaatatattatagattccttcttcgtccattccgcacagccggtgcagctcctgtaccgtaccatgttctatgaatgcgtcgggtacaccgatgcgctcaacgtgcggggtatagttgttgtctgccatgaattccagcacggcgcttcccatacctcctttccgtgtgccgtcctctatggtgacgatgcgcttgaagttacgtcctgcttcatgcagcaatgcctcatccagcggtttgaggaagcgcaggtcgtaatgggctatggagagccctttttccgcttctgcccgttcgatggcgtgtgcggcagtatttcctatcggtccgatggtgatgacggcaatatcctttccgtccttcagtttgcgccctttgcccacggggatttcttcgagcggacacttccagtccaccagtacgcctcgtccgcggggataacggattacgaacggacctttgtccggcagttgtgccgtgtacatgagacggcgtaattcatgttcgtccatgggcgaggatatggtcaggttcgggatagggcggaagtaggcaaggtcgtatacgccatgatgcgtcgggccatcctctcccaccagtccggcgcggtccagacaaaggacaacgggcagcctcaggagggcaatgtcgtgtatcacattgtcgtatgcccgctgcatgaaagacgagtagatgttgcagaaaggttgcatgccttcctttgccatgccgccggagaatgtggctgcatgcccttcggcaatgcctacatcgaatgcacggtcgggcatggacttcatcaataggttcatggagcatcctgtgggcatggcaggagtaactcccactatcttcggatttttctctgcaagttctaccagcgtctctccgaacacggtttggtacagagggggcaggttgctggtgtcggtggtgatgcgctctccggtttcggggtcgaatttgcccggtgcatgccagatgcccgggtctttttcggcaggttcgaagcctttgccttttacggtgtgcagatggagtattttagggcctttcaagtccttgatgtcccgtaggatgcgggcaagattcttcacatcgtgtccgtttatgggaccgaaataacggatgttcatcccctcgaagatgttctgttgttgggctgccattgatttcaggctgttggagaagcggatgagcgctttgcgccggtcctcgttcagcacacccattttgaacagcattttggatgctttgaagcgtagctggttgtagcggttcgatgtagtcaggttgaagagatattgcttcatgccacccacactgcggtctatcgccatgtcgttatcgttgaggataatcagcaggttgttgttggtggatgaggcgttgttcaacccttcgaaagccagtccgccgctcatgctgccgtcgccgataacggctaccacatggcggtctttctcgccttttctggctgccgccacggccatacccaaagccgccgaaatagaattggaggcatgtccgcaggcaaaggtgtcataatcgctttctacgggagtgggaaaaggacgtatgcctttgaatttgcggttggtgcagaaagcctcgcgacgtccggtgagcatcttgtgcccgtaagcctgatgccccacatcccatacaatgcggtcgtatggagtgttgtagacgtaatgcagcgcaacggtcagttcaacagtgcccaggcttgcggcaaagtgtcccggattgcaagaaagttcttgaatgatgtcttgtcttaattccttacatatctccggaagttgttccacgctcaatttgcgcaaatcctccggataagaaatggaatttagcaagttatatgttgttgactctgttttcatcactgtactgaagattacaaaatgcaaaaatagcaaaagaaaacggatggctgtatcattttgtctgttttttgttttgccacttgtcttttgcgggaatttgtccggacgttttcgcctcttttaacagaaatgctttccctttgcgaagcgagtcttctggattggcgtacgggatatgtccgacacccgggtcttggtatatccgacacccgggtcttggtatgtctgacacccgggtcttggtatgtctgacatccgggtcttggtatgtctgacacccgggtgtcagacacggtgttcttgcatacgcggatatgtatagttgcctgaagaagcaacggagcatgtcctttgcggtttttagaaggtgcttttccggtttttgcagtatttctttgtatctttgcagctccattgaattaagttacgtatgaacttcattactcctgtcgaacttcccgcccatctgccttgcttgcggcatacggaccacttgctgctgctgggctcctgctttgcagccaatatgggcgcaaggtttaccgaagcgaaattttcctgcgatgtcaatccttacggcgtactttataaccctctgtccatatccgccgctttgcgtgaaatcgtatttgggaaagtgtatggtaaggaagatctgtttttctttcgcgattgctggcatagtcccatgcatcacggagatttctcgtcaccgttggcagacgaaacgttgaagagaatcaacggacggattgccggtgcgcacgaacagattttccgttcggcgtgtttgctgctgactttcggcacatcctgggtgtacgaacaaaaaaatacggggcgtatcgtgggcaactgccataagctgcccgagaaggagtttacccgcaggcggctgatagtagatgaaattgtgtcggactatgtttcgctgctatcggggctgttggcgcgcaactccggattgaaggtgatatttaccgtcagccctatccgccatgtacgcgaaggcatgcatgccaatcagctcagtaagtccgtcttgctgctggctgtagacaggctgcaagctgcttttccggagaatgtattctattttcccgcctatgaactggttttggatgaattgcgggattaccgcttctacgctgaagatatggtgcatccctccgaagtggctgtgcagtatgtgtgggaacgcttctcgtccgcctgtttttcgccggagacgttacagatcatagaagaaagtgaaaatatacgtagggcattggcacacaagccctttcatcccgactctgaggagtataagcgttttttaggacaaattgtgttaaaaatagaccgacttaacggaaaatacccgtacttagacttccaaaaggaaagagaattatgtcatacacgattgaagatatagctcgcatcatcggcgcgcggcggataggggataggcctgccgctatcgactggttgcttacagacagccgttccctgagttttcccgaagaaacactgttttttgccttgcctacaaagcggaatgacggtacccgttatatccgtgatttgtatgcgcgcggcgtgcgtaattttgtggtcagcgaagagaggctgaatgaggttggaatcggagaaccgaaagttgaagacgccgcacggcaggaaactgtggatactgctgcgatgcagccggctttcaacttactggtcgttcccaacccgttgaaagccttgcagaaattggcagagcaacatcgggaccggtttcagattcctgttatcggcattacaggcagcaacggaaaaaccattgtgaaagagtggctgcatcagttgctgagtcccgaacggatgataacacgctctccccgcagctacaattcccagataggcgtacctttgtccgtgtggcagatgagtgaacaaacggagcttgccatattggaggccggtatctcggaaccgggagaaatgcgtgccttgcagaatattatcaaacctacaatcggtatcctgacaaatataggaggcgcacatcaggagaatttcttctctttgcaggagaaatgtatggagaagctggctctctttaagaactgcgatgtggtgatttataatggtgacgacgagtttatcaacaattgtgtgggtaaatccatgcttgccgcccgtgaaatagcatggagcaggaaagatatggagcgtccgttatatataagtaaagtggagaaacaggaagattccactgttatttcctatcgttatttggatatggacaatacgtttacattgccttttatagatgatgcttctattgaaaattcgctgaactgcctggcggcttgcctgtatctgatgcttcctgccgaacagataacggaacgcatggcaaagctggaaccggtagcaatgcgtttggaagtaaaggaaggcaaaaacggatgcctgctgataaatgacagttataactctgatctcggttcgttggatatagcgcttgattttctgtaccgtcgctcgcagagtaagggtctgaagcggacgcttatcctttcggatatattggagacgggacagaatacgccgactctctaccgtcaggtggcacagttggtaaacagccggggaatagagcgcataatcggtgtgggaaatgaaatatcttcatgtgccgcacggtttagcatcgagaaggctttttatccggatacggctacgctgattgaagccattggccggggagaactccggctggagaatgaaataattctgattaaaggggcgcgtaagttcggtttcgatgcgttgacggaagccttggagaagaaagtgcacgaaacgatattggaggtaaatctcggtgcaatgatcgctaatctgaatcattatcgcggcaagctaaaacctgaaaccaaaatggtgtgtatggtgaaggcttccgcctatggcgcaggttcgtatgaaatagccagaactttgcaggaacatcatgtggattatctggctgttgctgttgccgatgaagggtcggatttacgtaaagcgggcattacggcaagcattatcattatgaatccggagatgacggcattcaagacgatgttcgactataaactggaaccggaagtttacagtttccatttgttggatgcgctgattaaagaagctgagaaagaaggtatcaccaatttccccattcatgtgaaactggataccggcatgcaccggttgggatttgctccggaagatatgccccggctcatagaacgtctgaaaggacagaatgcggttattccccgttcggtattttctcattttgtaggaagcgacgctcagcagttcgatgcttttacgcgtaaacagatagaaacttttgaaaaggcttccatgcagttgcaggaggcgtttccgtataaaatacttcgtcatatctgtaattcggccggtatagagcgttttccgggagcacagtttgatatggtgcggttgggaatcggattgtatggcatcagtccgatagataattctataatgcataacgtcagtacgttaaagactaccatcctgcagattcgtgatgtgcccgaagaagatacggtgggatatagccgcaagggacatttgacgcgcccttcacgtattgctgccattcctatcggctatgccgacgggttgaaccgtcacttgggcaatggacacgcctattgcctggtgaacggacagcgtgctccttatgtgggcaatatctgtatggatgtttgtatgattgatgttaccgacattgattgcaaagaaggcgacagcgttgagattttcggagatcatcttcctataaccgtcctttccgatgtgctcgggacaattccctacgaagtgcttacaagtgtttcgacacgtgtgaagagggtgtattatcaggattgagaagatgacaaggcgtaaagtatggaatatacttcatattttatactttatactttgtatttcgtgcttcgtacttcataaatcttcttatctttgcaatcaaatttaatccgatatgattatgacaaacttacttttattaggtttcttgcccagcggttccgagtggattatcatcgcattggttatcttgctgttgtttggcggtaagaaaattcctgaactgatgcgcggtttgggaaaaggcgtaaagagtttcaaagaaggggtaaacgaggctaaagacgaaatcaataaagcaaaggaagaggtggacaaacctgtagataataagtaataaggtgatgaagcggttgttgtcgtcccgttaccttgttgttttaccgccttgtcactctatcgctgtttatgtttatggcagataaagagttaaccttctgggatcatttggacgaactgcgccgggtgctgttccgcattcttggtgtatggtttgtgttggctgtgggttatttcattgcgatgccttatctgtttgataatgtagtgctggctccttgccataatgatttcatcttttatgatttgctgcgttatatcggtgaagtatttgacttgcatgacgaattctttacgcaggagttccagataaaattgataaatattaatctggccgcaccgtttttcatccatatatctacagcattttggatgtcggtggtgacggctgcgccatatgtattcttcgagatatggcggtttgtcagtcccgcactctatcccaacgagcgcaaaggggtacggaaagcgctcggtctgggtacggtgatgttttttgtaggagtgttgctgggttactttatggtatatccgctgaccttacgttttctatccacttaccagcttagtgcaacgatagagaaccagatttctctcaattcgtacatcgacaattttatgatgctggtactctgcatgggacttgcttttgaacttccgttggtgacgtggttgctttcgttgctggggttggtgcataagacattcctgcggaagtatcgtcgccatgcagtggtgatcattgttattgttgccgctgttataactcccactggcgacccgtttacactgaccgtcgttgccgttccgctttatcttctttatgaaatgagtatcctgatgattaaggacaagaaagcggatgaaaccgaggagattatagagaccggagagagatgaatgctgaaatagaggaatatttttatttactgcgggaagtctgtcgtgcagatgactcttctttgggaaccgcttaccgtcaattgcgggaactgctcgagcatttatgccgtacgcaaatgacggatagcagtctgcaaatgaccgaccttgccgcccgtatcaattttgtatcttccaagctggggctgaccgttgcagagcaaaatcgcctgcatactttccggcttgcctctaatgctgtccttaatcgccaggcagagccttcacgcgaaaaactgctgcgtgatgccaagacggtatctttctttgtaaagcgtataaccggtgaagatattccggcagacctgtatcgtctctttccgcaggctgatgccacgtacattgcagctcccccggcaagggaacgtgtacggcgtatgcgcgtcaattttcagtatgccgatacggattatctgtatgtactgcctgtggatagcgtggcggacgaaccgttgcgagtacgttataatgtgcctcaaatcaatgatgaatttgctgagacttgtggtttgttgtggcggcatgcccagattaatctgctggatgtggcagtagatggggcaggtgtgcttacaccctctttcattattttagaaccggattatctgcttgatatcagctcattggcagaatgtttcagggaatatggccatcacccggcaaactatatgctggcaaggttgcagatgcccgacaatacccgtcctcttttgttgggtaatatagccaacctttttttggacgaatggattcatgcggaaagtgaacctgactatttggaatgtatgaagaaagcgttccgctcatatcccattgaactggctgcctgcgcagatttgcgcgaccgggagaaagaacgtgaattctttgccgactgtaaacggcattttgataatatccggcaaactgttacagatactttccgggcttcggggtatgaactggacaaaacggatgccgtgctggaaccgtcttatatatgtgaggcgttaggtttgcagggacgtttggattatatgcagcgtgatatgtcgtctttcatcgaaatgaaatcgggtaaggcggatgagtatgctatccggggcaaggtagaacctaaagagaacaatagggtacagatgctgctgtatcaggcggtattggagtatgccatggggaaagaacatcatcgggtgaagccgtatttgctctatacacgctatccgttgctctatccggcacgtccttcgtgggcaatgctgcgccgggtaatggatgtccggaaccgtattgtagcgaatgaatacggcatccagttgcgcaatagtctgcaatatacggcggagcgtctgcgcgatattgctccgggaactctgaatgagcggcaactggataatacattgtggaaacgttatctgtatccttccatcgatgcggtgacacagaagattcatgcgttgtctccattggaacagtcgtatttctatgcgttgtacaattttataacaaaagaactctatacttcaaaatccggtgatgtggagtatgaaggacgcaccggcgcatctgctttatggcttgctactttagaggagaaaagcgagaatggagagattttatatgatttggcgatacggcaaaattgtgcggcggatattcataaaccttatttattgctggagcgtacacatacggatattgatactttgcccaatttccggcaaggagacgccattgttctgtatgagcggaatgtcagtgaagataacgttaccaataaaatggtgtttaaggggaacatcgaggaaatttccgattgcaatatccgtatcagactccgtgcggcacaacagaacgtcagggtcttgccaatggaaagccgctatgcaatagaacatgattatatggatacctcttttcgctgcatgtattggggattgtcggcctttttgtctgcaacgaaagaccgtcgggatttgttgctgaatcaacgtaaaccggaatttgatactgcccttaacggagctatatcggctgctgccgatgattttgtacgcattactttgaaggcgcaagctgctaaagactatttcttgctggtaggtccgccgggaaccggtaagacctctcgcgctctgcgcagcatggtagaggctttttatagggaagggaaagagatacttttgctttcatatactaaccgggcagtggacgagatatgtaagatgttgacagccattacaccggaggtcgacttcatacgtatcggcagtgaactttcctgtgacggcgtgtatcgtccgcatttgatagaaaacgtgttggagccttgctccacacgccgggaggtgcaggagcgtatggcgcgttgccgaatttttgtgggaacggttgctacactgtctggcaagaccgaattgttccgtttgaagacttttgatgtggccttgatagatgaggctacccagatattggagccgcaactgttgggattgctttgcatgcgcggcgttaccggcgggaatgctatagggaaatttgtcctgataggtgaccataaacaattgccggctgttgtactccagtcatcggagcaatcggaaattcaggatgaaggtttgcggggcatcggtttgcataacttgaaagattctctttttgaacgtctttatcggaatgccattagtcaacaggcggttggcggtcggcaaacctctgctttcaactcccggttttcagctttcaattctcttgatatgctttgtcgtcagggacgtatgaatgtggaagttgcagcttttccgaaccgtgctttctatggcgggttgttacagccggtaggattggaacatcaaacaggggttcttaaactgtctcctcagctttctgctgatgaatttgccgctttgctgacccggcgggtagcttttcttccgtccgttcccgaaccgcctatgcagtcggcaaagatgaaccgttcggaagcaaaaatcgtagccggactggctgctgctgtctatcggcagtatacatttgccgagggatgcttcagcgcagcttctactttgggagtaataaccccttatcgtagtcagatagctttgataaagaaagaaatagaagctttggaaattccagccttgaatgaaatcctggtagatacggtggagcgttttcagggaagcgaacgcgatgtcatcatttactctttctgtgtgaacaggttgtctcaactgagatttcttgccaatctgacagaggagaacggaatacggatagaccgtaagctgaatgtggctttaaccagagcgcgcaagcagatgtttataatcggagtccgacaattgttggagcagaatccaatctatgcgcaactgttgaaaagttgtgattcataaggtacgaaacgtttcctattgccgtagattgcagctatttcttcatttaataaatcttaaatattttctttctctttatatgctttattaataacatcgtgtgttataaagccttatctttgcagcacgtttttttcatagagatttagatttaaggttagaagaattgtggaagtcgtgagacttcccttttttttatcccttaattcttgttctctcagaatttaccgacaaatcttatattgccaagaggatataaaaaaaagctctttcatgcgaaagagcttttttttatatctatatattctgtctgtatcagttcagtacgatgggtttgtatttcggtaccagaagcttcatgatgcaccagccgataaggtaagcaacggcacagatgcagaatatgatgaagtatccggctgccttgccttcgaatcccatgaacatcatctgggtttcatcagcgtaagtaaacagtgtgcccgagcctttgttgatgaggaacgagccgataccgcccgccatacctcccaatccggtaatggtagctactgcacttttggggaacatatcgcccactacggagtagatgttggcagaccaggattggtgagctgctccggcaatacctataatgataatcggataccaataggagtattctcctaacggttgtgcaaatagtgcgagtaacgggaacaaagcaaagatgaacatggctcgcatgcgggctgcatacggattcataccggttttgtttatgatgatggtaggcagttttccaccatagatagacagcatggtaatggcataaagtacgaatatcagcaactgtgccgttccgctgtccgaagagaatccgtagacatcggagatgtaggccggagtccaaaacaggaagaaccaccatacaccgtcggtcatgaatttgccgatggcaaaagcccatgcctgagggtattggagacattctataaatgacatctttctttcaggtttttcagagacagccttgtcttcttctctgagtttatcttgttcgatataagcaatttctgctgcattgacgcgcgggttttcatgaggtttcttatacatgaacatccacatgcccatccagacgaagcctaatccaccgatgacgatgaacgccatttcccagccgttgcctacaccgatgctttggaagtaccgtgctaaagaggggatggtaacaggagctattaaagcacctactgtggcgccggcattgaaaatggaagtcgagaatgcacggtcttttttcgggaaatactcggcggtgactttaattgctgcggggaagtttccggcttcaccgacactcaatatcacacgggcagcgatgaaaaagtaaacactggtaatggcaatagtcgatgctacggcgcctgttgcagaaatcatggctgcggcgtcatgaatgcccactacatgttcggttgcccatccgcaaacggcatgcaggcaagctcctaatgaccatacgaagatagcccagagataaccttttttggttcctaaccaatcgatgaagcgtccggcaaataagtttgcaatggcatatactatggaaaatacggctgtgatatctccataatcggcatctgtccaatggaattccggggcgataaaatctttccaggtaagtgataatacttgtcggtcgagataattaactgttgtcgcgaagaataacatggcgcaaattgtccagcgatagttagacattttgcccaatgtgttctgatttgtactcatgataatagatttaatttataatgtcgcaaaaatacgcgttcttgtgttatgtgtatgtgtaatatttggtagaaatcatggagaaaatgacaaaaataggcatagttgagaacaaccatgcctattttcttatctacggatattatttcatatctgtgtatttgatttcatctttgtcgctgtacttcaggttctcacctcccataccccagatgaaagtatagttgctggtgcctgcagctgcgtggatgctccattcgggagaagtgatggcctgctcgttgtgtaaccaaatcaggcgttcttcttgaggctcacccattaagtggcaaattgcatttcccggagccaggttgaagtagtaataggcttccatacgacgtgtgtgagtatgggcaggcatggtattccatacagaacccggagcaagctcggtaagtcccatctgtaattggtttgtaccgccgtttttcactctttccaaaacatcttttacaatcagctggtttacgatacggtcgttgctgtcttccatttttccgtaatggtcggaaatgcccaaagcatattttttaggattggccttttgaagtttggcatcggttgtaatcaactgagtaacgtaaggtttgtaagccggagccgagttgatatagaatttggcagggttggcagcatcgttgctcttgaaagttacttctttattgccacaacctacataaagagcttctttatacttcatggggtattctttaccgtctacggtaactactccatcgccaccggtgttgataacacccaactcgcgacgttcgaggaagtaagtgatttcaggacccaactcacggaaagtctccagtttcaatactttgtttacaggcattgcacctccgtaaatcaaacggtcatagagggtgtaagtaacattgatttcgtccggagccattactttgctcatcataaaagagctacggagacgttgtgtgtcataatgctttacgtccaatggatggcaggctgtctgcacagtgtaatttacttgggcggaagccgtaactgcggctgcacccaacatcagggcaattgctaattttttcatgtctgatataaactttaaatattaatatgcttaatgattgcttttttatttagcactctctttagcttctttttcactgcggacaatgatgcgacggttgatgaacatcatggttatcgctaccagtaccagcagtgcagcacctacatacgagagttttacacctctatatatagtccagccgaagaaagaagcggcaaagtcgatggaaccgccatcaaatccttcaggaatgtgtgccgtaggatcgtgtgtttcggcatatacctgattggctgccagcgtgaagtccggtgccatatcggttacgaaatacaaacctaaaataagagtgataagaccgataataagtgtcttcaatacattccctttagtaaagggcaatatcatcggaaacagatagaacatacctgcaagtgaggccaatggcaggaactgattacccggcaggaatacggcaagtgccaggataacgggaatcaggataaccgatgccaccaatgtagcggggtggccgataaccaatgccgggctcataccgatatgtactttcttaccgttgaatttagcttttaccagttccgaagtcttttcggagataggcttcaatccttcgataaacagagaagtgatgcgggggatgagttccattacggctcccattgtgatacccaggaagagaactttcttgatgtcgagttgggctgcccagcctatcagcatacctacgataactcccaataccagcggttcacctattacaccgaactttttcttcatgccttctgcatcgatttccagcttggagaaaccgggaattttatctaatgccttattgataagtatggcaaacggtgtgaaactctggcagaaaggctggggaatagagataccgtccaaatcatagaacttttggaatttttctgcagtaaggtctgcgcagaccaatgtaataatgtagcagatgatagcggcgaaatagccccatgccagattctggccggtaacaaaataagccacagcaccgatgaaggcgaagtgccaatagttccacaagtctatgtttacagtacgtgtggtcttggtgataagcatcaggaaattgacgcctaagcagataggaatgataagcgcaccaacagcggtattataagctacggcagcggcggcaggccatcccatatcgaatacgttcagttgcaggtgatacaaatcggatatggctttcagaggagaattaaaatttgttgtcagcagggcggtaactacgcctaagcccacaaaaccgactccgacaaagagacctgatttcagagccttgccaaatttcataccgatgcacatgcctatgattgtaaaaataataggcatcattacagacgctcccaaagcgatgatgtaaccgaaaacttgttccattctttatgtgatttaattgataaatgattatgttttacaatagtacgaattgaaaatcggggtcaaaaataagaccttttcctaattaatcaaactgtaaaggcataataaatagtaaataaggatgattttggacaaatttgtcgttatcgtgcacaaatttgttcgtttccgtacacgaaaatcaaaaaatgcaccctctgcgccaaaaagtgcacaggtgtttggaaagaaacatctacttttgtttcgtgaaaaattataaggtctaatacccaaaaagaacaactacatgaaaaagaactttatttgtaattttattctatccggtttattgttgctttctcctttaagcatgtttgcacagcgtgtggattcaaacttgccgtggtcggtacgtatggtggagtccgaaatgattcgttgtccggaatcctggcagttggactttcagcctaaattgaaatgggattactgtcacgggctggaattgcaatccatgctggatgtgtatgaccgctacggtaatcggaaaatctatgattatgctttggcttatgccgatacaatggtaaatgcagatggtactatcaaaatgtacaaacgtgaggagtatagccttgaccgtataaactccggtaaatttatattccgcatctatgaacagacgaaagatgagaaatataagaaagcgcttgcattgatgagaagtcagctcgatgagcatccccggaatgctgacggcggcttttggcataagaagatttatccgaatcaggtatggctggatggtatttatatgggagcgcctttctatgcggaatatgctttccgtaacaatcaggtagacgattatgcggatgttatcaatcaattcctgatggcggcccgtcatacttacgacccgaaaaatgatgtgtaccgtcatgcttgtgacgtaagccgtaaagaacgttgggccgatcctgttaccggacaatcaaagcatagctggggacgcgctatgggctggtatgccatggcctttgtagatgctttggatttcattccgaaacatgaagcgggccgtgattccatgttggttatctttaataaaatagcttctcagataaagcgtttgcaagattccaagaccggtttgtggtatcaagtgttggacaagagtggagcgccgggtaattatctggaatcttcctgttctactatgtttgtatattctctgttcaagggtgtgcgtaaagggtacattgacaaatcctatctggaagtggcagttaaaggatataagggcatccttgacaactttatagaagtggataagaatggtgtggtaagcatcacaaaggcttgtgccgtagcaggacttggcggaaaggtctatcgttcgggagattatgattattatatcaatgaaactatccgcaacaatgaccccaaagctgtaggtccgtttattcttgcatcattggagtgggaacgtcttcaggacgtgaaagtgattgttaaccggaaatgatagcgaaagtaactatgaaagcactgtgtagttttataataaccctgctttgcggggtcggttcgttatccgcggcgcagcagtggaaagatacgattgttgtagcccgtgacggcacgggagattaccgtacgctgaccgaagcaatggagggtatccgcgcctttatggattataaggtgacagttttggttaaaaagggtgtatataaggaaaaggttattcttccttcttggttggaaaacgtcgatttcatcggtgaaaatgtagaaaatacgattatcacctacgatgatcatgccaatataaaaaagatgggaactttccgtacctatactttgaaagtggaaggaagttccatcacttttaagaacttgacgatagagaataatgctgcacggctggggcaggcagttgcgcttcatacggaaggtgaccgcttggtctttatcaattgtcgctttttgggcaatcaggatactatttacaccggtgcaaaaggtactcgtctctgcttcctgaattgttatattgaaggtactaccgattttattttcggtccttctacggcattgttccataattgcacgattcatagtaaagccaattcgtacatcacggcagcttccactccgaaagacattgaagtgggatatgtttttaagaactgtaagctgactgccgcaccggacgttgataaggtttatttggggcgtccgtggcgtccctatgcagctacagtgttcattaactgcgagatgggtaaacatatctgtccggcaggatgggataattggcgtaatccggagaatgaaaaaacagcccgttatgctgaatatggtaatacgggagagggggctgataatacaaatcgggtaaaatgggtaaagcaactgacccggaaggatgttgcaaaatatgaggaaccggattatcttttcaagatatgcagtgaatggaaaccgtaagataaacttacggtttcagaaaatccgctctcataggactgaagcagtcgattaatataccggcttccagacaagtgcatccatgttcggcatccggttcgatataaacaccgtcgccagccgatacgatttgtttttcaccgttaaccgtgaattcaaatttaccgcttgccacataagttgtttgagtatgataatgggtatgcggtgtacctactgcaccttgttcaaatttaaccttgacgagcattacctgaccgtcgtaccccaaaatctgacgaacaacgccctctccggcgggttcccatgctttctcgttttcgagaataaacgcattgcttcttgttcttttcattgtgtgaatgataattttactgatacaaatatagcgataaataataagtttgaaaaaccatgaaaagtaaattgattctgctgttggcagcttttttcttgtgttccgctttcaaggccgataagccggtaattaccatttttatgattggtgattctacgatgtcaaataagtcgttggtgggcggtaatcccgaaagagggtgggggcatgtcctgcccggtttcttttctgaagacatacgggtggataatcatgccatgaacggacgcagttccaagagttttatcgatgaggggcgctgggacaaagtgctttcactgataaagaaaggcgattatgtttttattcagttcgggcacaacgacgaaaagcccaaagccgaccgccatacagacccgggaacaacctttgatgccaacctgcgtaagtttgttaatgagactcgtgcgaaaggcggtattcctgttctgttcaactccattgtgcgccgtaactttggtacggccgataataaagccgtagcggaagctattcttcaggatgatattcgcaagggaatcaatcctgatgccaagcaagacgcctctcaggaaaagaatgtggtggaaggagacaaactgattgatacgcacggagcatatctggattctccgcgcaatgtagcaaaggagttgaatgttccttttattgatatgaacaaactcacccacgatttggtagaaggcttgggaccgaaagaatcgaagaaactctttatgtgggtgcccgccaacacaattgctgccatgcctaaaggtcgtgaagacaatactcacctcaatatatacggtgcacgtgtcatagccggtattacagtagatgccattgccaaagaagtgccggaattggcaaaatatgtccgccattatgatttcgtggtagctcaggatggcagtggcgatttctttactgtacaggaagctattaatgccgtacccgatttccgtaaaaatgtacgcaccacgatattggtgcgtaaaggcgtatataaagaaaaactgattgtgcccgaaagtaagattaatatctctttgataggacaggaaggagctgtcatatcctatgacgactatgccaataaacagaatctctttggagagaacaaaggtacgtccggttcatcttcctgttatatctatgcgcccgatttttatgtggagaatatcacgttcgagaatacatccggtccggtagggcaggcggttgcctgttttgtcagtgccgaccgtgcttatttcaagaactgccgttttctcggatttcaagatacactctatacgtatgggaagggagtgaggcagtattatgaagattgttatatagagggtacggtcgattttatattcggttggtctacggcggtattcaaccgttgccatattcatagtaaacgtgacgggtatgtcacggctccttctaccgatgaaggacagaaatacggctatgtattttatgactgcaaattaacagcggatgccaacgtgaagaatgtttatttgtcccgtccgtggcgtccttttgctcaggctgtgttcattcattgcgatttaggaaagcatattcttccggtcggttggcataactggaataagaaagatgctgagaaaaccgttttctatgcagagtatgacagctatggcccgggtgctaatcctaaagcacgcgctgctttctcccatcagttgaaagatacggaaggatatgaaatagagtccgttcttgccggtactgacggttggaatccgattgctaacggcaatgcattggtaaacattaaacgttgattgataaaacaattctgacatggtaaagaataaaacaatattgggtgttcttactctgctattgggtttggcattgactgccagtgcggaaaattatccttacaggagcgatgtactttgggttaccgtacccaatcatgccgattggctctatcagacaggggagaaagctaccgtagaagtacaattctataagtacggcatcccgcaggatggtgtaactgtctgttatgaacttggagatgacatgatgccttcggatacgaaaggctctgttacgttgaagaatggtagagccgttgttactatcggcacaatgaagcaacccggattccgggattgccgtttacaggctactatcgctggaaaaacttataaacatcatgtaaaggtaggtttctcacccgataaacttcaaccttatacgaagatgcctgccgatttcgatgaattctgggataagagtaagtctgaaattgcaactttccctttgttgtatacgaaagagcgggttgaaaagtattctaccgacaagatagactgttacttggttaaactacagttgaacaatcggggacaaagtatttacggctatttaacctgtccccggaatatgcagaaaggtgcttgtccagtagtactttgcccgccgggtgcaggaatcaaaaccatcaaagcccctcttcgtcataaatactatgcagagcagggatgtatccgttttgagatggagatacatggactcaatccggagatgtccgaagcggagttcaaggaaatcagtaatgcgttcaacggcagagagaacgggtatttatcaaacggactggataataaggataattattacatgagacgcgtttatctggcatgtgtccgcagtattgactttctaacttctttacccgaatgggacggtaagaatgtcattgtgcaagggggtagccagggaggtgctttggcattgattaccgccggactggatacacgggtaactgcgtgtgtagccaatcatccggctttaagcgatatggcaggctataaggctggcagagcgggaggttatccgcatttcttccgtgtagcaggtatggatactgccgataagctgaatacaatggcttattatgatgtagtaaactttgcccgccggataaaaattcctacttacatgacttggggatacaatgatgatacttgtccgcccactaccagttatatcgtatataatgtgttgaattgcccaaaagaagcgctaatcactcctattaacgaacactggacatctgaagctacggagtatgggcatttactttggataaaaagacacctgaaatagcgattggccgttaacggtcagtgattgttattaataaggttatcactgaccgttaatctttatttctcatttctttgttaaagaactccaatacctcttcctgcatctctttgttaaagaaatgcttctcatcccatattttagtcacaagcctgtcaccggcatgttgactgttccataccgttcgcatcgtttgatacgcatctcttactccttctatcgggaataacttatctttgcttccattgaagaaaagggcgggtttaggacatgcgatacttgctgtatgcggataatccagataacgccttaagtttggaataagcatggagtaagcggaaccgcccttattctgattattagtcagcgtcatcagatgctctgtggtattcatccagcagatggaagcggatgcttttatacaatcagtcagcgcagccagcatccaggaacggtaggctcccatcgagaatcccaaacaaccgaccctgtttttatctaccattggcagtgaagccagaaactcggcactacgcacatcatccatgttgataaaagccccccaggatgcccccatttgcatgaaattggaagccagtgcctgctgtccgtcataacttactccttcctttcgtccgcgttctccccaaaacagggcgtcgatagacagtactacgtaaccgttttgtgcaaagtaatctccggtatattgtccgtcataacaacggaccacccaatcttcggcatcagccgatatttccggagagactccgaaaggacgtaccattttctctttgccgatggaaaagtgtgctccatgatcgtgcagcattatcacagccggaaaaggcccctttccgtcaggaaccaataaataagccggtatgcgggaccattccgaaacattaaaccatatcttgcgggcttcatatcccgcccgctgctctgttccgacgacagacatatcgtatttcgagggagcaggtggcagattctgcatgcactccatcactatatttcgtgtttcgattctccatttcccaaagtcttttgtggtagactttccccatgctgcgggataggtaagttgctgtttcagttgctcgtagaaaacgggcatgttctttgtcacttcataacttaccgtatcaacttgttgagcctttatacccagacttacggtaaggaaaacagcataaagtataacgcttggtttcatagtggtatttaaaataatgacaaatatacgatattttcggcgaaatgcgtatctttaccccacagaacgaatatgttatgagaaaacttctatatctggtcataggcttattgtttgtatttgcgttaccgtccggagcacagccggagtgtgtctttacccattattcgtccgaagagggactttcgcagaatactgtcatgaatattctgcaagacagaaagggaaatatgtggtttgccacttgggatggcatcaataaattcgatgggtatgatttcaggacttataaggcaaagtttgataaccgcattaacctgacaaacaaccgggtggactatatgtacgaagaccggtacggctttctgtggctgctcacttacgacaatcaggcttggcgttttaatccccgtaccgaagtatttgaacatgttcctgccatgaaagaagaaggaagcaggtttgtggtaacttcaatcaaggtattgccttgcggttcggtctggttgctttcggaggaagaaggggctatccgcatcaagaccgatccggagagttttcgcctttcgccagagatgtattcagttgataacggtttgttcccggccgcacgcgtatatgatgtttatgaggatgcttccggaaatgagtggatgctgactgacaacgggctggggatgcttgctgccggaagtggtgcccttacgtcctttttcgtagagaaaacattgaagaaagagaaaggcggccaaattttttatacagcccaggaatgtggaaatgaaatctttttcgggtcggatagcggacgcgtatggcgttatcagaagaaaaacggccggtttctgttattgcagttgccttgtgcctcacatatcgtggctgtaggaaagattgacgaacataatctgataatggttacagagacagacggattttttacttacaatacgcccgctaagacaactgttcattatccggcttcccgtctgccgggtgctcctgttcactccatttatatagacagaaactcggaagtatggttcgggcaggatattgcgggaaccgttgcacattttaatgcaaggacaaaagtgctgaaaacggaagtaatcccggtagagcctacatctaccgaccgttcccgtccggcttttcacgtgcacgaagatattttcggttctgtttgggtgcatccctatggcggaggtttttcgcgtttcgataaggctgctaattgcctgcgtcctttctataacggcttttcggataccgactggcgtttttccaataaaatccattctgctttttccgacaggcaaggcaatctgtggatgtgcacccattccaagggactggagaaaatcactttccgctcttcctttttcagtatgatgacgccggaacctcatcggtatgaatcattgagcaatgaggtgcgtgctctttgcgaagacacggagcataatctttgggtgggactgaaagacggcaaaataaggatttacgataagaatcgcacggaactgggatacttcacggagacaggtacgatatcacatgcggggataccgttaaagggaaatacttattgcatatttcaagacagtaagcacaacatttggattgccaccaagggtgagggattggtaaaagcccggcctcagggtggaggacattataaactgacccgctattgccatagtagggatgatatctacagcctgagtgacaacaatgtatattgtgtttatgaggacgtgaaaggccgtatctgggttgccacttttggaggaggaatcaactacctcacccataaccgtggcggacgggagatatttgttaaccaccgtaacaacctgaaaggtttccctatagataattgccataaagtacgcttcgttacaggtgaccatcgcggaaatatatggattgccactacagtcggcgcattaatggtaaacagtgattttaagaagcccgaagatgcagtgtttcatcactatgtacgtgtgcagaacgatgtaaacagcttgagtaataacgatgtgcactatattctgtctacccggaagaacgaactttatctggttactttcggcggcgggctgaataagttgcagactatagatgctgccggcaacgcaatattcaagtcgtatggcgtggccgagggattgccttcggatatattgctctccatacgtgaggataacaggggtaatctttggatgagtacggagaatggcatcagcaaatttattccagaagaagaacgttttgaaaactatgcagacggtcatgtctcgcctcatgtccgcttcagcgaagcggcatcggcctatacttcgtggggagacttgctgtttggtacgagcaacggcgtcttgctgttcaatcccgattctatcaggaagagcacatatgtaccgccgttagtgttttccaaattgcttatagccaatgaagacgttgtgccggatgaaaaaaatatattgaaagagagtttggatgatacccgtgaattgcaactctcgcacgaggaaaatattttcacgattcgttttgccgcacttgactatacggaacctgccggaatacagtatgcctatattctggagggatttgagaaatcttggaactatgtcggcaagcagcgtaccgccacctataccaacctgcccaaagggcattatgtgtttaaggtacgtgccaccaatgccgatggagtatggacggataacatgcgcttgcttgatattgaagtgcttccttccttttgggaaactccttttgcctatttcctgtatgtcctgtttgttctgttgattataataacggctgtttatatcttgtttacgatttatcgtctgaagcacgaagttgttgtggaacagcatatgacagatatgaaattacgtttctttacagatatttcccatgaactgcgtactcctttaaccctgatttcaggtccggtggaatacgtgctggagcatacgcaactgccggcggatgcccgtgaacagttacaggttgtggagcgcaacacaaatcgtatgttgcgtctcatcaatcagatactcgacttccgtaagattcagaacaaaaaaatgaagatgcaggtgcagcgtgtcaatgtagtggcctttacccgcaagataatggagaatttcgattcagtggccgaggagcatcacattgactttttgttcgaaacggaaaagcccgaactttatctgtgggtggatgtcgataaatatgaaaagattattttcaacttgctctccaatgctttcaaatatactccgaatggaaaaatgataaaggtttttatccatgaggacgaggaaaccgtttctattggcgtgcaggaccagggtatcggtattgccgagaacaagaagaaatctatttttgtccgttttgagaatctggtagaccgtaatttgttcaatccaagcaccggcatcggtttgtcattggtaaaagaactggtggagatgcacaaagctttgattacggtagatagtaagttgggagaaggcagttgcttcaagattgactttatgaaaggcaaggagcagtatgacgaatcggtggaatttatgcaggacgatataacagttggtctggaggcttatcaccggcaaacggcggatacggaagacgcgcagccctcacaaccggaaacgggttctcaggaaaaaggcggtggagatgcatccaaagatttgatgctgctggtagaagataactccgaactgcgtattttcctgcgcagcatcttcgcttccgagtatcgcattgtagaggctgccaatggtatggaggggctgaataaggcgttgaagtttctgccggatattattatcagcgacgtgatgatgccggaaaaagacggtatcgccatgacccgtgaattgcgtgctgatatgactaccagccatattcccattgtgttgcttacggcgaagtcgtccatcgaaagtaagttggaaggattggagtacggtgctgatgattatataaccaaacctttcagcgccacctatttaaaagcacgtgtaaagaacttgcttgcccagcggcagaaactgcaaactttgtaccgccagaacttgatgcaggcaggagcggttgcagctgttgccgatgaacagagtatcggtaatgtccaggataatcctcaaacggataaatctgcggcaatgtctcccaacgaccgtaagtttatggataaacttatagaactgatggagaagaacatggataacggtgacttggtagtagatgattttgtgcaggaacttgccgtgagccgttccgtattcttcaagaagttgaaaaccttgaccggactggcgcctatcgagttcattaaggaaatgcgtatcaaccgtgcagctcagttgatagccaccggtgagtattccatgacgcaaatatcctatatggtgggtatcaatgaccctcgttatttcagtaagtgtttcaagcagaaaaagggaatgacacccacggagtatcgggataaagtgctgaaataaaccattattcgtgttcagaatgaacataaactattggagtcttgttgtatttgaattatttgaaaactaaacaaagtctatgattatatatttgatatgcttgctggttattggcttgataatagtctggaatataaaaaaggctccttcggataaggatttgtggggagaggaagatgagtaagttgtaaaaagagaaagatgaattccgaaattctgatacttcggaattcatctttcttttagtgaatattattcagaaaacggaagcaataatcaatatccaggattttggtcttccatactcaactggccgttggcatcgatagctgcttgtgggataggccataataatttttctcctatggtagcagcggctgtacctatcatatgcggattgtatttgtcgttgtattcaaccaatttaccggtacgacgaaggtccatacgacgataaccgtttccaaacatttcgcaggccgactctttcaatatgatgtccaaatcaatattattttcagctgttaaaccggcgcgttcacgtacaacattcaaacgctccaaagctttgggatcattcaatttgtagtaagcttcggctgctacgaaaaacatttccggcagtgtgattacgtggaggtcgcggaaactctttccggcattatagtcagcggtttggctgtcgtcaaatttccggcaaggctgtacagaccaactgagtttttgcgtggaggcatcgtcaaaatcatatttggcaataaccccgtccggatattctgccaggtcttttacgtaagtggacattggctccattttggctgttttatcattttgtggaatgataaatgtgtttttccggttttccgggtctttggcacgccactcagcaacggaagcagcgtcactttcccaataagccggataatacactcctaccattttgccgtcagctttaccgccatttttgtagaaagagaaatagtcgccgataggcttgcctttttcatctttaaatccgttcttgatatcccattctttcttgaccagtagggtcttcatgaaagttgcatcgtagcgtttgtctcctttttcaaaatttctcaatgcatgcatgtaaggtatgaaagatgaactaccatttttcatgccttcttcgctacccccgtaatagttggaaaagaaactctgccaacgattaccgtcatttttgtcatgctggttttctgcatcgtattccacatcgaagataaactcttcattgtcatctccggaacggtcggcagcccataatttggcgaattcggttgtcagtttgcgtccggcaataacttcgtcggcataggctgccgctttggtaaagtaatcatctttctttaagtcccatgcagcagacaagtaagtttttgccagcaatgccttaacggcttctatgctggcttcccctcctccttttgttgcagaagaagcaaccaatttgttattgtcgataatgttggtcagttctgtgatgatatgcgtatatactgcttctgccgtagcacggggctgttctttgatttcaccggcctgtttggcatattcggttactaaaggaacgccgccaaaattattgaccagcaagtaataatacaaacactcgatgaaacggccttcatcaatgtttttttgttttatatcttcactcaccgttgattgtgcagcatagtactgaatggcaagacatgaacgtattccatcgtagcaatctgtgtagaagttttttacagtcccattttcaggagtaaaattagaccaacggtgaagagctgcactgatatcattgcgtccatcctgatacaagtctgttccggagttgaaataagcggttacatcactgctgttaaagatatttttcagttgggcgtatgcatcgtatgtcagagcttgtaaaccggcagaagtggtaaaatattccacatcatttaccgcgcttttattgtcaggtgtgaggaaatcgtcacagccggtcaatgtgatagagccagccatgcacattgtgtataatagttttttatatagtttcatattacttatatgttttactggttagaatttgatatttgcaccaatctggtaggttacggaagccggtccgccgtcagtcaggtttgcgcttgcccattccggatcgaaaccatcgtagccggtgaagcagaacggattaagtacgtttacgtaaaggcgtaaatgtttaacggctattttgctcatccacttcttcgggaaagtataacctaaagtgatgtttttaacctttacaaaagacgttttttggtatcttactcccgagctgcttttactgaagtaaccgccaccggttttttcataattgttaggataggggtaagcacccatatgcggtgtttccaagtaagtgatgtctcctgttgccttgtccaaaaccggagttcctgctgggatatagtaatcgaaactcatcttttgacggccacggtcgctgatatccatgtattgttcgtggaaataactgcgtgaccattgtccttgtttggtgtaaagcataaacgagaagtcgaagcctttataggtcattgtggagctcaggctaccggtccatttagggtcggtgcatccataaatctgcttgtcctcgtcattgatttttccatcatcgttccagtcgtttacagccatctggccttcgtaccatttcagtttattgggactcttgggaccatatttgtcgtacacttcctgtaatgtatagtgtttgtctccattgatagtgtgcatcgtgactccgtccgccgtaattacacctgcataggtgtagtcgcgcagtacattcaggcgttcgcctatgaaccagttgttgctgacatcgtctccgctcggcagttctttgattttactccagttgcgtgcgaatgctacattgacatcccatgtaaagttctggttgcgtataactccgaagttgacgcccaactcaataccggcgttctgaacagagccaatgttggttgtcagactgctttctccagtttccaaaggcactgttgatttcatgatttgtccgtcggcaaggcggcgataagcatctgccgttatattgatccggttctgcaatactgcaaagtccacaccgaagttgaattccttgattttctcccacatcagggcttggtcaatgattccgttaccgtaataaccttggaattcattaccgccgattacagcataagatggtcccgatgtgtaatagcttgtagcataatctcctacattattgttaccggtaataccataggacaggcgaagtttcagattatccaaccattccacatctttcaggaaatcttcttcagacattctccatgccagggcggcagaggggaaccatccccagcggttgccttttgcgaagcgtgaagaggcatcggcacgtacggtaactgtggccatgtaacgttctttgtaggcgtagttcaggcgggcagctacggaaaccatggacgattcggtatacgaggacttggtagcctggtttttggcacctttttccatggcatgataagacaatctgtcgtctgatatatcggtaacggattgggtataagtctctttgtctgttctatacatggagaataatcccatagctcccaagcggtgattgccccaggtcttggtgaaatcaatctggttatcccatgtccagtccatccggtctgtgttgacaaccgatgcatagttttgctttttattctggtaatatgccgttccgtcaggatatttgtccgaaacgccggtacccatgaagataccttgacgtccatggtagaagttgggagagaaagtcgttgtgaatttcagtcctttcataagattgaagcggagataagcattaccgaacacatggaatttgcgggtctggttttcgtaagcatcgatatccaaatcaaccaatggagacggagtagatgttaaagacatattgcccacttttgctggtctggccaacaggtttccgtcttcatcccacggagaaatgaccggagcaaaccagaaagcattgttgtaaggagaatacgcattggaagaatcggtaatccagtcatcctgcacatcgtataccatattgaccgacatacctgcttccactactttagataatttgctgtcgaaagcagctttgatgttgaagcggtcatagctgtttttcttgaaaacattttcttcgccttgataaccagcgcccaagcggtaggatgttttctcgcttgcaccgcttgcactgatgaagtggttttgttgtgaaccggtctgcaacacctggtctgcccaatcataactttcattattcatccaccgtgtatacaaaggcgactctttccactcagtgccattctggaatacagactgcaagtctgcatctttgattatatatttgatatgtcccgtttcatccggaccgcttgaagttgtatatttggcaaagcggtagttcatccattccgtagactccatgaatttgggcatgcgggctacttttcggataccgtagtaaccatcgtatgtaatttctaccggttgggctttgctttgtccggctccggctcctttagtggtaatcaaaatcactccttcggatgcacgcgaaccgtagatggctgtggaagaagcatctttcagcacatcgatacgttcgatatcttcggagttcagaaagtcgatagaagagactaccataccatccactacgtaaagaggaccgtttgaattgttaatggaagattgaccgcggatttgcatgctgaatttaccattggcgcgactgttggttgccgtgatgttgactcccggaacagatccctgcagagcatcttctacgcggagcgcaccacgggcggccaatttatcggcagaaaccgaagccaaggaacctgtcacatcggttttcttcattgttccgtaacctaccaccaccacttcatccaatgcctgcgcatcttctttcagtgttaccttaatgttcttttggctgcccactgtaacggtttgcgtgatataaccgataaatgatacctggatttttgcattgggctgtacgctgagtttgaaattaccgtcaatatcggtaattacaccgttggtcgtacctacttccaatacgtttgcaccgataataggttcacctgtaccgtcgattacggtacctgagatttggtgaccttgtgcaaaggcgattaagcatagcatactcaacgacagagtagccaatgctctttttgcaagtctttttagattcataagtttgttttttatagttattaaatgtagtaaggctgataatcgtaatgaggtattctcacccgttatcaaacacaaaaatacatgatatatcgtaaattttatagtattttttgatattctttgtggaaaaattaactgttatcctctgactgtccgtgtggcatattctcctttctcccttcacatctccctattcatcaggctttgcgggtgaacccttggttgggaggaccataacagataagcacttcatttttttatgtcagagacactaccggatagaaatttccatagcgtccgtgctttcgcagaaaaccggcaggcacgagttgctgcgaaaaactgttcgggttgcttcccctcatggcggcagggttttgttttttcagttctttgaagatgtcggcagcggagagatttcttattttttcttttgggtcctcggatgttgcaggacggaaacaactgcgtagtacttcttctgccggattgcggtgctggaagatgaggttgtgctcttggagctcttcctcttcttcggccgaaaaccaatagcgtgctccatccgaaagttcctgtttcagttgtgcatagatttgcttgtgctcaatgcaggtacaatcaattttatcctttacctctacacagagaaaacggcggctaccggtgttgtcagacaataagtcgaaacggttgctcgtgccgatgaaagaagcgatacggggcaggttacggaaattcttttggtatgccttgcaaaggtttaaatccgccatttgcatcaggtttttgagcagtggtatttttcctggagaatatttatcgaattcatcgaggttcagcagtcccatttccgacattttgcgggtggcattgctccgtgaggtaagctccacttcatccgaatagtagcgggacaagctgtcgggcatcagacttttgcagaatgtggatttcaggcagccctgtcggatgctgacgagtaggggagccacgctgttggcatgctttccggtctgtccggtccattgggcagtgagaccgagcatccatgtatggaaaccgtttatccaatatgattcggacgagatgcgttgggccagtcgggttatccggtcgatgccatcccaaacgggaagctgttcaaaataaagcaggaaaggatgatactcaggtacatgtttggagaaaagaaaacggctgatatctttgtcccaacatagaatttcccgggcatgggcttcgaggcatagggtattcagttcccgtttgccaatggtgacaaacgttttgtctgcggcattggcggggcggtattcggtttcgtctgtcagcaggttgtaacggaagaggtaactggtttgcaaaaagcggtttacctgttctgtcaggttacatttttgcacgcgggcaggtttgtcatgcttccggtttcttagtagaaagaggataaatttcataatgctttttttcatggtatgcattgtttttattaatgggttcatgccactaagttactatcggcaggaagccttttgcaagcctttcttatactatttttattggtggtacagtatgtggaaagaccttgtgttattgtattttcaatgtgagataattctttttctctcgttgcaaaatagggtgttgactatagtcaaccgttctgttcattactgtcggctgttctgtttacaacagtcggctgctttgttgactgttgtcggtaaccggtttatcttaaaggaaaaatagattatctcgtaggaaaacactatatttacacaatataaataaatactgcacaatggcaattcattttgaatggtatgagaatccggttccaccgaaccggccggatgagaaaaaactccatgcacgcattacgtacaatggaaaggtagggacagactacgtgaggcgtaaaatccaggagcgttgttcgctgacggaaacggatgtaacggctgtgctcgatgcactgtcgcatgtgttggggcaggaactgggcgacggacgccaagtgcatctggacgggataggctattttcatcctacgctgaaatgtatagaagaggtgacggcagagacgaaacgcaaaaacaccaaagttcgcttaaaaggtatcaagtttcgtgccgaccaggcattgaagaacgaagtaggagctgtaaagcttaaaaatatcaagcatgacggacactccagtaagttatcggacgtggaaatagacatgcgcctccgtgcttattttgccgaccatcagctgatgacccgtgcagacttccaacagatttgcggatttatgaggtcgaaggctatggaacatatccgcagattgaagttggaaggaaaaatacggaatataggactgcctacacagccgatatatgtacccgtggagggatattacgggataagcagggataggattgtctggaaatgattttttgacttttattatggatttgcgggtgaaggcttggaaagaggtttcacccgcaaatgctgatggatagggagatgtgaagggtaaagagataaatgacagatggatataagcatatatccttatgatgttttttagcaggtaaaacaatttttagcagttttatgtcaaaatctacacaagagatgtgacttaaaaaatgaattttgccccgtgaacaaatatcgtggagaacattatttttttaacacatctttttatgtataatcaacaaagactaaagaaagttgctttgatgctcatgatgagcatgctttgcctgatttcctttgcacaggaaagacaggtgcagggcatcgtgaaagacaagagcggtgaaccgatgattggtgtcaacgttttggtaaaaggtaccaccaacggtaccataactggagtggacggagattttacgctttcgggcgtgaaaaagtccgatatcctctcttttacctatatcggctttaagaataaagagctgaagtatgaaggagaaaaactgctgaatgtggttttggaagaggattccgagttattggatgaagttgttgtcattggttacggtacggtgaataagcgagacctgaccggttccgtagcttccgtcagttcgcaggatattgcatctattccggtatctagcgcttccgaagcattgaccggtaaaatggcgggggtgaatatcactactacggagggttctcccgatgcggatattaagatacgtatacgtggtggtggttctttgtcgcaagacaattcacctctttatatagtagacggttttcctgtatccagtatcagtgacattgctccgtctgaaattcagagtattgatgtcttgaaagatgcttcttctacagctatttacggtgcacgtggtgctaatggtgtaattatcgttactaccaagagtggtaaagaaggaaaggttcaagtggattttggcgcttcgttcggttttaagaaagtgactaaaatgaccgaagtgatgagtccttatgattttgtggcttatcaacgtgaaatcggttcgttggattacggaaattataatgatatggatatctggaaatcaatcgatggtattgactatcaggatgagatattcggacgaacaggtaatcagcagcaatataatgtgaatgtggctgggggtagcaaacaattgacctacagtgtaagttatgctcataatgaagaaaaaagcattatgcttggctcaggctttaagaaagataatatcaatgcaaagcttaagtcggaactgaacaaatggctgactttagacttcaatgcgcgtttgagttattctactatcgagggtttgagtggtggtgctgatacgaatgagtccaatgctgctaattctactgtagccaatgcggtggttttccgtccggtcaatgctttgtctcatagttcggatgatgatgaggagagcaatgctgctttacagaaaacgcctttggaacgtttgctggcaacgaataaaggacgcaattctttccgtcagaattataatttcggtttgaattggaagccgtttaagaactggactttccgctcggaatttggttatggttggagatatgaagatacagaacaatattggggtactgacgctgtaagtaactctaaatatggttataacggacgtcctcaggcatatttgctgcgtgagacgacaaagaactggcgcaatgccaatactcttacttacgaaaataagaaaatgtttgatggtcgtgaccgtttgaatgtgctcgtgggacatgaagtgagcagcagcatggaggaatccatagagaatgtatctgtaaatttccctacaacaatgggatttgaggatatgaaagccaatatgggggccggcacggcattgccgaaccagtctactatctctgccgaagagaacatgctttcattcttcgggcgtgtcaattacacgatgatggacaagtatttgcttacggtaacggtacgtgccgatggttccagtaagtttggagatggaaaccgttggggcgttttcccctctgccgcattggcatggcgtatttccgatgaggcgtttatggctaatacaaaggattggttgtctgcattgaaattgcgtttgagttttggtacggctggtaacaaccggattaattcagggcttctttatactacttactcgttgagtggcaatgattcccgtaatcctttcttcaatggaaccagtacacctatgttggaacatgggacctatctttataacccaaagttgaaatgggagactaccgttacccgtaacttgggtattgactatggtttttggaacaatcgtatttcgggttcggtagatgtatattggaatacgaccagagatttgctgatgaaggcggagatacccggtaactccggttattcttatcagtatcagaattttggacagacttcgaataaaggtattgaaatgtcgatggatgcagtattggtagatacgaaaaacttcagcttgaactttactgccaatgttgcctacaaccgaaaccgaattgacaaattgaccaccgacagcccttggcagagtagcaattgggcaggaagcactatttccaaatatgaagatttccgtgtggaagagggtggacgtctgggtgaagtatggggattccgtaccaatggatattatacagtatatgatcctgttaccaatccgaccggagaattggtatggggcgataaacaatgggtgctgaaagatggcatgaaagataacagccctacgataacaggaggttcttactatcctggcggattgaaaatacaaaccgatgagaatggaaatcctttgaaacagcgtcttggaaacactgtagctccttgggtaggcggttttgggctgaatgggcgtttcggcaatagccgcaccggtgagttggatgtgaatatcttctttaactattctaccggcaatgtgattatcaacggtacaaaattggcatcgtctttccgttccggctctaggaccggttataacttgaataatgatttccgtcttggtaaccgatatacatggatcgatccggaaacaggcttgaatcttgccagctcttcaaccgcagtcttgaatcattatggtgacatgcaagctgccggattgcgcctgaatgaaatcaattccagtgccaatatgtataatccggctgctgcttctacgatgcagttaatagattatgcggtggaggatgcttctttcttgcgcctgaacaatcttactatcggttattcgctgcctaagcaccttgttaagaaagcattcttgcagaatgtaagggtttatctgaccggatataacttgttctgttggaccagctatagcggagccgatcctgaagtggatgtgagcagcaagcgcaacgccatgacaccgggtgtggactatgccgcttatcccaagagccgtacgtttgtaggcggcattaacattacattctaaaacctaacagatattgactgatatgagaaatatatataaaactttatgtttagcggcagggttggttgccatgacttcctgttctgattttctggatcagacttctccttccgaactggataataaaactacttttaataacacatactatacggaactgaccgtgaataagatttacggaagtctgactcaggaccaagcctactccaactttatgcctattatagcaggtctgaatacggattgtgaattggtggacggacttggtaccgatgccagcaatacctccagcgaacgcggtaatatgaattacaatgctaatccgggttggacgcaactttcgcgtgtatgggatgtgatgtatggcattattgagaacgccaatctggtaatagatggcataaacaacagcgagctgattaagacgaaaggcgatgattgcgatatgatgctacgcttccgtgccgaagctaaagtgttgcgtgcaatgatttatttcgacttgattcgccttttcggagatattccgtttgctaccggtgcttcggatagcaatctggaaaatgtgtatgtagggaagactgaccgtgatgttattatggaggctttgattggcgatttggaagaatccattccttatctgccttgggcaggtggtacaacttacaccacagagcgtgtcaccaaaggatatgcacatggtttgctggcaaacatagcattgacccgtgccggatggtttattcgtgaagctgcgaaggaaggatatgtgacagctacggaaaactcagatccggcttatcctactcagcgttgcgatgatgaaaaacgtcatgagatgtataaattggcagaggaacatcttgccgctatcatcaatgataatacacactcgatgactcccactcttgcaggttattggaatggggtgaacttgtgtgaactggataatacctatcgtgaaaatttgtttgaaatcccgatggggctgaataatagcagtgaattggggtatactgtaggatttcgtgtaaacggtgcttttcccggtggtgtgtctgaggaacataactatggtccgaaaggtaattccagtggtaagctcaaactgacagctccttattatatgtcttttgatgctgcagaccagcgtcgtgacctgacttgtgccctgatgcagattcgtacgaagagtggcgtttataaagaagatatgcttggcaatgctccttttgccatttattgcggcaagtgggactatcgtaagatgaaaaatcggaaagacggttggtgggatgctgtgaaagcaagcgaccagaaagtgtgcagtggcatcaatgttgtaaagatgcgctatcctcatgttttacttatgtatgcggaggttatgaatgaactttatggcagctataatacaggtggcgagtattgttcaaaaacagctttcgaagctctttccgagatacatacacgtgccttcaacggtgacaaggctgctgcagaggctcatttgacgaaactcattaatgaacagggcttctttgaaacgattgttgatgaaaatgcctgggaattggcaggtgagggtgtacgtaaattcgaccttatccgttggaatctgctcagtgccaagattgacgagttcaaggagagctatcgtaatgcagtgaataatggttcatatccggctaaaatttattataagttcaaggaggataatttcacgattgatgtaaccacattcaattacaacgaacctgtggaagccggttactttagcgccaatttcttcggcagagagactacagatgccaagcaggagcaactgcttgttaatctgcccagtatttcggcaggattgaaccgtgtagtgaaaaaccgttatttgcttcctatcgcttctaccacgatttctacatcgaatggcaagttgcataattcttatggatatagtgattaatcttaaacactcaaggaaatgaaaaatatcagaaatatattggctaaaggggtatttatgctccttgtctctttacttgcaatggcatgtacagagaaaagcgattggggtattgatgcctcgtacagccgtccgtttggaaccaatgaggatggtataaatgtgacaaaagatgaaaaagtagctcgggttacggtaacttgggatgccatgcccggcgtagaatattatattcttgaaataagcaagaatgagctgactgatgaaattcctatgggatcggaagagaacggtaatcttgtttatgggaatacagtagaaaaccgcatattgaaagctccttttttaattgacaatctggaagcaggtgcggaatattatctgcgtattaagtctgtggcaaatggcaaggaatcctattgggcttatttagacgaaccgttcaaaacagtaacggaagaggatgtattgaatgtgcctgccgaagaggatcttccggttgcatcaggtaaggtacgtatgtcatgggaagctggtctgacagtaacgcatttcgagattgtgggcggtgctgctcctatagagcgggcaattacggctgaggaagctgctgcaggagaggcatggattgaaggactgaaaatattcacagcttatactatcagcatttataataatgaaacgttacgcggttcacaggaagtggtagtgccgggattggaaatagagtctaccgtagatgagattacagccaatacggcaagattctcttgggataatacagtggatgtggaccaatatatctgtcagccctcttcagcgcctactccggatgatgccaccggagctgtttcgctaagtgtttccgaggtaaatgaacatgccgttattataccgaatctggaaccaagtacggaatacacagtttatgctttctataatggggctatatgtgcacgtgctacatttacaacaaagaagggaaaacctgttgggtatacggaatataatggtgttgaggctttaatagccgattgggataacttgtccggtaatattttagtgacaatcagtgcagatgcggatttgagtaacaaatctgagatacctgctgcggttactaatattgtcttttggggtgagggagctacacaaccgaaattagctgttaagaatatgcaaactttaggggctattgataaaatagagttttataatctgaatatcagtgcacttagtaacgattgtgttattgctccgaatacagaaggttcttctatagcaaatattgaaataacttcatgtactatagaaaattatcggggtattgttcgtatgcgtaaggtaaatggggaaagtagtctgaaattgaatattgatgactgtattattagaaacttgggtactaaaggcacaaataattactatggtattgttcaaacggatggagctgtgaaatctgtaatcattaatatgatgaactctacttttgctaatccaggtggaatcaatgcatcgctcctaagagttgataaggctgataattctatttctgtaattaaaaactgtactttctataatttagttgatagagatgctcttgtgagaggagcgaaaggtagtcttactgtagaaaatgttttatttgcaggtagtaatactttccagatattctatgatgataaaactcttccggcttctttaaattggtcgaaagtttatagaacatcagaccttactgtttcaaaaccaggttctacatctactacagctttgtcctattcttcatcccaactgttcccgaatgcatcttcaagtaccgatgtgcttgatttgactttcggtgcagatattccgaatgaagttaagataatcggtgatccgcgttggaataaataataaatttaataacatgaactaatatgaatacaaaatctatttatacagtaggcaaatgcttgctcctcttgttacttatcttcacaggttatgcctgtgaagataacgatgaaggcaaggaaaatacaagtgctcctgttcttatttcatgcaatatcaatggtacggaggttgatcttgccaatattgattcggaaacggagaacaatttgacggcgggtactgatggttatgtggagtttgtctttagcaaagccatgcgccagactccgccgactaaggatgaagaaaccggtgaagtgctgacaaccggaatttatttcaatgataaggttgcttccaatcagattgtcatcaattatgagaaagtccgctatccttattctgtcagtgaaggttccgaatgttccttatttatcgaggcgggtacattgacggatatgcagcatcgtccttacagcaaagatattactttgaagtttacagccacttccggtatttccggtggagatagcgaaacggtgtttgatgctgttgttgatgcaaacggaagaggtgattataccactgtacaagctgctattaatgccgctcctgccaatttgacatcgccttacctgatttttattgcagcaggaacctataatgaatgtgtatatatacctaaaacaaaaccgtttattcatttgattggagaaaatcctgacagagtgaaaattcaatttgcgttgaatcgtgtagaggagcaaactaattcggatacatggccttattctattcacaatcctaattcacctgcgcgccttgcaggatataccacagatcagaattgtgtagtattgattaaagctactgatgtttatctggagaacatttccattattaacttgtacggtgcattgaaaagccgctatgacggtggtcttggaaaaggtggacaagctgaagctctgtgtagccattatgatagattggctatgaataattgtaaattggtttcattccaggatacgtggtggacgcgtttccagaaagtgaacggaacgtatggtatttgccgggcttatgtacaaaattcatggattgaaggtagtacggactatatctggggaagtggtgatgtgctgatagaaaacagtactttttataacacgggcaatggtagttttattacggcttcacgtagtaacgaaaccgatgcttatgggtatgtgatgaaagactgtacgatagacggtgaggcaggtataaccgctttttctttcggacgtcagcaatcaacttctgcgaaggcggttttcattaacactgctttgaagatggatattatagacggtcattggactgcgggtagcgcagcgcctgctctttttggcgaatataatacggttgataaaaataatcaggtaatttcaacaggagatatgacagttggtagcggcagcagtcagtttactgcaaaagttctttctgcagatgaagctgccggatatacttatgagaacatcattgccagagagggatggaatccgaaacagtatatgcagaccccaggcactactatggctaccttggatggtactactttaagttggaatgcaatagacggagctgcaggttatcttatttttgtgaatggcgtctatttggcacagactaccgaaacttcggtatctgttacgactgctgctgacggggtatacacagtcaggggagtaggacattacggaagcatcagtgctgaataattgttttataaaagccggtaaatctgctgccggcttttatgtattaaaaaacttacttatgagaatattgaaactcgtttattttggtttgctgtgtttcatcctttctgcttcagtagtggcatgttcggatgataatccggtttctggcggaacttccgttccgccagaaactgataataatggggatggagataataatccggatacggataatatattggaagagtatcctgctccggaccgttcttcgattgctgcatttccgggtgcatatggcgccggtcggtttactacaggcggagcaggtggaaaggtgtatgtggtgacttcattggcagacaccaacgaaaaagggactttgcgttacggtatcagccaaagcggagcgcgtacgattgtgtttgcagtgagtggactgatagatttgaacagcccgctgaaaatagtaaatggtgacctgacaattgccggtcagacagctcccggagacggtatttgtttgaaaggttatccggtttctgtacaggctgataatgtcattattcgttttatgcgttttcgaatgggatctgataatttcacaactgaaggtgaggcggatagtggcgatgcactttggggaaagcaacataagaacatcatcatagatcattgttccatgagctggtgtacggatgagtgtgcttccttttatgataatagcaattttactatgcagtggtgtattatcagcgagagtttgaaccgttctgtacataccaaaggtaatcatgggtatggaggtatttggggtggctcacctgctacgttccaccataatcttctggcacatcatagtagtcgtactcctcgtctatgtggcagtaggtataccggtaaacccggcaatgaaaaagtagatttacgcaacaatgtcttttataattggggacctaccaatggcggctatgccggtgaaggaggaagttataattttgtgaataattattataaaccggggccttctaccaataaaaaatccgatattgtcaatcgcatttttcagccgaatggagatgatggaaaaaataaaaatgcaaaaggaacatggggaatgttttatctgaatggtaactattttgatggtacatgccctcaattaaatcctgcttatcagtctttgctggaggaggtgaacaatgataattgggtcggtttgcagccgaatgagacatccggtgtactcttaccttccggtggaaagtctgctattcaggctaactcggaatttacaataaccgatgatgcggcattatttacgcagtctgcttcagaagcttataaagccgtactgctgtatgccggtgcttcgttgaagtctgatgcggtggacaggcgtatagtagacaatgtacgtaatggagattatacggcctcaggaagtaacggcagtgtgctgggacttattgataaggcaacggatgtgggaggatggcctgtatatgtgaaagagaatgcccctgtggatacagacggcgacggaatgccggatgcttgggaggcagccaatgggctgaatccgaaaagttctgcagatggagtcaaatataatctgagtaaggaatatacaaatttggaagtatatatcaatagcttggtagagaaactttatccggctaaatgatatttgtgtaattacatatttggattaaaaaacggataagatatgaaaggtatatattggttgttctatttgctatttgttttgggattcggggttatttcctgttccggagataatccgattgtagattcggaaggaaatataggtagcaacggcgacgatgaaagcaatggtgaggaaaacggctctcctgataccggagtgaaaacattggactatggcgagttatttgcttttccttatgctgaaggtcatggtcgcaatgcgaccggtggccgcggaggtgctgtatatgttgtgacacgtttggatgaccctgccggcaagccggaaggaaccttacgatatgcagtagagaaaagcggtgcaagaactgttgtttttgcaatttccggtactatcatgctggaacgtgaacttaaaacaaaaaatgacaatcttacgattgcagggcagacctcgccgggaggaatctgtatagcaaattatccttttaccataaactctgataatgtgataatcagatttattcgcttccgtccgggtaatatcaatacggataatgatggtctgggaggttcggataataagaatattattatcgatcattgttctgtgagttggggaacggatgaaggattgtctgtatatggttcggaatatactacggtacagtggtgcttggttgcgcagtcattgcgagcaactcctgccaaaataacaggagagaaatttaatactcatggatacggaggcaattggggaggacactatgcttcttatcaccataatataattgctcattgcgaaagccgggtaccacgtcttggacctcgctacacgacattggctcttgataagggtgaacttgttgatatacgcaataatgtgtactataattatgcgggagaaggctgttatggcggtgaagctcaaaaggtgaatcttgtaaacaattattataaacccggacctgcaactaaactttttaccggcagtaaggaaaaacgtcagtatcgcattgccaaacccgatgtgtatccgaaagattattcgggagcagattataaaaaatggcttcagacctggggcaggttttatgttagtggaaactgtgtggaaggatatagtgacgtgactgccgataactggcaagatggtgtattcggacaaatggatgctaaaaattgcgaaggcggggagagttcagccctttggaaagaacatacaagcataaaggtaaattctcctgtttccggagccggacatgtgacgacccattctgccgttgatgcttatgatatggttttacaatatgccggtgcttgcaattatagagataagcttgatgaacttattataagtgatgtcagaaaaggtgtggcaacttgtacaggcagtgccaaagaatgggaatcattgaagggatggtcggataataagccgggatatatcaataagccgtctgacattggtactaatgccggacagttggatgaaaagggattcccggttctggcaacagatactgaaatatgcactgaagatactgacagtgacggaattccggattattgggaaaaggaatatgggcttgattttaagaaaaatgatgcgaatgaacggactgttgatgttaatggtaaatatactaatatcgagatgtatatgaacagtcttgtacacggtattatggaggctggtagtaaaggcggtgctgtggctgattgagatgtgttttgtttaaaaagaatttgttatgaaaaagaacttgttattggctgtctgcatggcaggggttatggtatcttttgtttctgaggcatttggacagagtttgccggtatatgatactcccgaccgttctaagattccggcttttccgggtgcagacggagcaggaaaatacacaaccggaggagccggtggtgaggtattggtcgtaaactctttgaaagatgacggaacagagggtactttacgttgggccttgagaaagaagggacctcgtactatagtttttgctgttagtggcttgattgaattgcagtcacctctgaaaattaataacggtgatgttaccattgctggacaaacagcgccgggagatggtatctgtttgaaaaattatacgttgagcgtacaggcagataatgtaataatccgttttatccgttcgcgtatgggggcagagataaaacaaaaaggcgatgatgcgatgaatggttttaaacatcatcgtaatatcattattgaccattgctccatgagttggagtaccgatgaatgtgctactttttatgataacagtaattttacgttgcaatggtgtattatcagcgaaagccttgcaaattccattcacgaaaaaggtgctcatgggtatggtggtatatggggcggtcaaacggcgtcttttcatcataacctgctggcgcatcatatgaaccgtactccgcgtttatgcggaagtcgttatactggcaagcctgaagatgaaaaagtggatttgttcaataatgtaatctataattttggtagtgatggagcgtatgccggtgaaggaggaagctataactttataaataattattataaaccgggacctcatacggctactaaatcatcttacaaacgtttgtttactgcttattccgatgatgggaaacatcaaaatgtaaaaggaacgcatggtgtattcttcttttccggaaattatatggatcctacttgtgaaaaactgaacgagaaacaacgtcaggagatgatgttggttaataaggataatacagttggattgatagtgaagaataattttgctccgaaaagcgatttgctggcaaagcagccgttcgattttgcagaacgtacttctttgcagtctacatgggatgcttttgaagctgtccttcaatttgccggcgcatcatacagccgtgacataaatgataagcgtattgtagaggaaacccgtaaagggatatataccaatgagggtagtcatgggagtacaaatggcatgatagacagaccggaggatgttggtgggtggcctgaatataattctaaaacagctttggctgatgccgatttggatggtatgcccgatgaatgggagatagctaacgggttgaatccgaatgatgcctcggatagtaaaaattataacttaaatgcaaattatacgaatttggagatttatctgaatagtttagtggaacatctctttccctaatgaatctcttctttcttaaataggagcatttggtaactatcctaaagaataagatggtatatggaaatgattgattataattactccatataccatctttatatttaatattctgtattgtctactaattcttatctattcagacatactattttgaaaagaatctgagcctatttatgagatagcatcaataaagacttggaattttaaatgtatatgtaaccttacactatggtaaactaatcggtagggagaaacgtatatctttctccggctttggtcttgatgtcataaatatacgattgctgcttttgaggtactgatagcggtgcactggctgcaaccaacggcttccgtatcggttgggatagcagcagcggattattgcatgactcttctgccgccggtgtcagcttttctccattcagatataaaggggaggtggtacgtatgcgtaaggttccgccgatggtggaagttatggtaaccgtttgcactttccctttttcccatttcatctcttccagcagaaaaccgccgcgacagcgaattccttttatagtgccatgttcccacacatcgggcaatgcaggcaggagatgaatggcaccgtcatggctttgtacaagcatttcggctatgccggccgtgcagccgaaattgccgtctatctgaaaaggcggatgggcatcgaacagattaggataggttcccccgttttgtccgcgttcatcggtggtggggtggagttgttcggtaatcagtttataggcgtgattaccgtcgagcagccgtgcccataggcagactttccatcccatagaccaaccggtggagtggtctccacgggcaatcagcgatttcttggccgcttcaaaaagaacgggagaattataggcgctgatttgacggccgggatatagtccccataggtgggaaacatgacggtggtgatcctgaggattgtcccagtcttccatccattcttgcaactgtccccagcgtcctacctgcatgggtgccaaatgcttggctacggtttgcaagctgtctgtgaaggattcatgctcatttattaaagtggcggcttgaatggtattgtggaagaggtcgtaaaccatttgattatccatcgtagcaccggcaacaattacaaaatcgcgtttaccgttaacagaaggactgttttccggtgaataggagggagctactaccagccagttgttttggggttcgcgtactaagaagtccagataaaattcgcaggcgccgcgcataatcggataaacctctgccaaatagttcttatcgccggagaacagataccgatcccataagtgctggcagaaccaggcgttacaagtgggccaaacgccatatttaggaccgtctacggcgcctgtactgcgccatatatcggtgttgtgatgcaacgtccagccacggcagccgtacatggcggcactctcgcgaccttgtatggctacttcttttaccaattgcagaaacggctcgtgcatttcgggcaaggcagtggtttctgccggccaataattcatttctacgttaatgtcggtggtgtacttcccgtcccagggagcgcgtaactgatagttccagatgccttgcaggttggcggcttgtccacccggctgtgaagaacatattaagagataacgtccgaattggaagtatagggcagccatttgcggatcggcagtagaactgaattcttttacacgccggtctgtcggtttcttgatttgggaattgctgcccaagtcgagggaaacgcggttaaagtatttttgataggcggcaatgtgggattcttttctttttgcgtagttcttgccggcctgcttcatgtattgccgtgcggttttaagtgcatctcccgatacgtctttgtagtttatgaagtttgtgccgatggatacgtacagaacaacgctattggcattcttgacttgcaaagtactgtcggaggttgcttttagcgtaccgccgttattctcaatccgggtaagtgcggtgaatcgaaccttcccctcaatgccttcgtggtcgttggcctttccgttgagttgcaattcgttgcgggaagagatgcggtgctctgtgttttcggtataaggagtggtgtaatgcgcagtgaaagaaatgcttccttttttcgaggctgttagtctgataactaataaccggtcgggaaatgaggtgaatgtttcccgtacgtaggtaacgccattggctgtgaaacgggtggtggctattgccttttcaatatccagatcccggtaatagtcatcgtatttactgattccttcaaaatcgagatgcagtgtgccgaccgtttgatacggcattccattggcggattgtgaacagatggcagggccgcataactcttgcgcttctttatttttcccttcgaatatcagttggcgtatgcggggcaacgcttcttttgccttgggattggtgttgttgtgaggtgaaccgccccaaacagtctcttcattgagctggaaccgttcgtgtatggggtcgccgaagaccattgctcccaagcttccgttgcccaatggcagagcttctacccattgtctggcagggctgtcgtaccatagtttcaggacggtatcattttgtgccgtgaccttaccgccgatacagcaaaaggtaaggattagcatgaaccattttttgatcatagcttgtcagtttatccgttttaagatttcttccgctttgtctgcgatataatcggggtgaaactcctctaactctgtccgtgggcgaaaaccccaggttactccgcaagacgttaccccggcattgattgccgtctgcatatccacgccggaatctcctacataaagcacatctttcctatctgttttggcaatggatagaatatcgtctacaatggtcgggtcgggtttcacgtttactccttcccgttggccgaatacggcgacaaagtttattttcgggaaatagtgagctatcagtttttgagttgctgattggtatttattggatgcaaccgctatttgcagtccctgcgactgtaattgttccagcagttcgggtatgccgggatagggacggctcttgtcggcattgtgtgcatcgtagtaaggaatgaattccttacggacacggagcacattttcctcgctcttttctccttcgggaagggctcgctcaaatagtttgttgattccgttgcccaccatgaagttataggctgattcctcgtgggtggggtaaccaagtacgctcaatgcatggttggtgctttgcgccaaatcggcaatggtatttaataatgtaccgtctaagtcgaatataacaagtttcttcattgttttctctttttattttgggaacaaagatataacaatttgcaggggttatataaaaactcaccatagataacgcggattaataccgattttaagatagatacctgataaaccggaaatcaatgttatctatggtgaggcagtatttccatgaagcctgttatctggtaattctgaaccagtctacatctgtccagccgccgtcgttggtaacgatagccgggcgggtacagaacatgccaactttggcaccgatccacttgccttcttttacttggaacggtttgcccaatggctggaatttctttccgttgaggctgtaactgaagtggcacattaccaacaggtcgtgtccgccttcgctcttggaaatctttttcccgtcagaggtgaacttggcacgcaggtaaatcgtattatcctttaaatcgactgtaccgtttacggtttcggaagtacctttgtctgctttggggcaagacacttgagacaataccaggcctttgtccgtattttccaggataagtccggcgtagtcaagtcccataactaccagtccggtacgttctcctttgtatttctccgtcggtttgaaggtaagcttcattgtggcggtaaagttgtcggagggagttttttgcaacaataggttggctgcatcccaaaggttcttatattctttgacaaccgggtaggagtaaagacgtacaatgccccggtcgcctgcataataggcccatttttcattgatgttggcatgccattgccactgcggagagagggtataaccgtcaaactcatcgctttcttgcggagtgcggataggatatgtcttgcctacgttcggcttcgtatgaaccagaaccgggtcgccgcagccgtcgccgtctttgtcgatgccgataaccggccagtcgtttacccatttcataggttgcaggtgcaccagacggccgtatgcgccgacatcctgaaaatgcaggaaccagtcttcaccggtaggagtgtctacccatgctccctgatgagggccgttgatagggctgttaccctgtgccagtaccttcttccattcgtaagggccgtatatgttcttggagcggaggacaacctgccagccggtgggcacgccgcctgctggatggaagatgtagtaatattctcctcttttatagagtttgggaccttcgcaggtctgatgcgcttcatgaccgtcgaagatgatgcgcgattgtgttatggcttgggtggcatccgcattcaactcgcagatggatatgatgcttttcaatccggcacggcttcctgcataggcgtgtaccatgtagacctttccgtcttcatcccagaaagggcaggtgtctatgatgcccttgcccggttttacgagcacgggttctgtccacgggcctttggggtctttggcttttaccatgaacgcgccttggtcggggtcgccccagaaaatgtagaattcaccgttatgatggcggatggcaggcgcccatacacggttgccatgctccggacgttccggtgtttcgataggggggagggcgtagggaacggcagcgccgatgatactccagttaacgaggtctttggagtgtaaaatctgcagacccggcaggcagttgaaactggaagaggtcatatagaaatcatctcctacgcggcaggcatccggatcggaatagtctgcgtagagtatcgggttcttatatttaccgttgccttggtcggctacccatacctcggaaacataattcttttcttgtgccgccagcggcattgccagcagcaggctgagtcctaaaagtgcgtttctgcttttcatgttacgatttgattctttgagtgtttaattcttgattttaatctgaaccgggtgttgcaactcttctttccactcgcgcatataggcaaaccatgcttcgggagtaggatatccgaaagtttccttgcatgaagtaaacatggtgtaatggtggaaacggtcgctgcccggtgcagaaagggtataaaggaaattatctttatcttttacttcctgacggatatatttctgaggaatataggtggcaatgcccactgtctctttggcgtattttacggtgtcgttgaccggccagtgccttccccaactgcctatcaatcctttgtgatctgattccgagcatgtttcgttgcccatgatattctgcacaccggtacagaacacttcgttctccagcggttcgtcaaagaaagtctctaccagcaggtcacggtgtccggcataaaggatatagcggttggtcatgttcaattcttttccctgatagttccagccttttacg

SEQ ID NO: 4070 - DNA, 67894 bp, Unknown
  gut microbiota DNA sequence
aatgcgcgaacatttcgatttgcggattatagtttcatttctgcaaagaattcccaaccgcgttcgttggatacggctgttaagaatgcggcaggttcggttgttgtggtcagttctatttgcctgttttgataaccggcgcgtttctgtacctcctggatagcattcagggcatcttggttcacagagtttgtagcacgggtagaagcttcggcgtacattaaaagaacttctgcatagcggtaaatacaagttataccgtttgattgtgcacttttaccgggggctccttcgtcataatcatagtacttggagatggcgggaagtttgtctgcactttcggtatatgggataatctctccgctttttattttccattctgtcatatagttccattctttgcggtcatcattgggatacgccttgaagaaatcttcattgccgtaatagtctgcccatcctgcattaggagaataatcgctcggatagtaagatttaccgtagttacttgctatcttatgtttggcactatgttgcagggcaaacattacttcgttggtttctgttttcttgtcttctttccataaatcggaatattcggctgtcagtacaagaccggcttgggccttattgtccatgatttctttggcttgggctgctgccagaccgtaatattcggttcctttgtttaacggccatcctgccattgtcatataagcatctgccaagcatgcttttgcggcccattttgagggagtgctgttgccgctacgtcctttgttgggcaaccattcggtagctgtagtcagactgggaataatcgctttatcgtatatttcggcaactgatgttctcggcatggtgatggttgcctcatcgttttccagtaataaaggcacatcgccatacagacgggtcagatagaaataggaaagaccgcgcatgaaataggcttcgcccaatacttctttaaatgctttggcttctttttcgttggtggggatagtagttcccttgataattttgttggaactgctgatgaccttatagaacagggtccaagtagttgagaagtcagcatcattagctgtaagattcggagtcagtctgctataataagccagttcgttattggccttggctgcacggtaggtaatatcatccgcacatacattgatgcgttgcagacggctgttgaatccgtaatttccttgccataaatcgctgtaaagggcgtctgccgctttttcaaggcttgcttggtctaccgtattccagtattcttcttctgtgataaaggattcgggttcttgtgtgaggtctacgcaagaggtcgtcagtaataaacttccggcaactgctgttaaatatattaatttcttcatgttgttcttatttaagtaggttattcattagaatgagaaattcagaccgattaaataattgcggctgttaggataggctccccaatcaacaccttgtaccaaaggactacccatagtagcttccgggtccagaccggagtatttggtgatgtggaatggattctgtacggaggcatatacacgcaggttgttgatacccaatgaacggcaggttgcttcaggaagagtataacctaatgtgatgcttttcatcttgatgaaacttccgttttcaacgaaacgcgtgctgaagaagtctttattttcagttccgcctttcacgaatcccggtatatctgtattggtgttggtcggtgtccaacggttcagcaactcgcgcataggggttacgcctgccatttgttggctcttaatcaggttatatcccatttggtgagtggcattgtagatgtcaaatccatggaaacctactacgaagaacgagaagtcaaagtttttgtaattgaatgtattgttccagccccagttgaatgtcggttgtccgcatccgataatgccttggtctgcatcattgtatacgccgtctttattgacatctacatatttggagttacccggttttactttgtacacttctccgttggttttgccgtttgtttgaccattggcatctacgaatggagcatttacatcatcctcctgccatactcctgcgaatgtgtatccccagaatgaacctaacttctctccttcaatcatttggaatatctggttttggaagtttccggcctgttgttggcggtggttggctgtcggaatcttgttgaacgtacctttgttgtgagataacgtcaggtctgtgtgccagctgaattctttatcactgaaaggatctgcactgattgtaaactcaacacctgtgttcttgatttcacctgcgttatcaaggatggcagtatatcccatgtgtgagggacgtgccacttccagcaaaatatcttttgacaatttgctataccagtctgctgttaagcgtacgcgaccgttcagaataccgaaatcaactccgacattgaactggtcgttgcgttcccattttaggaaaggagcagccggtcggtctatcttataggcggtagaagaactcccgtttggagtagtaacggtaacaggcgtcattttggaatagatacggtaagcctctacagcttggtttcctacggagccgtatcccaaacggagtttcagttggtcgatgaaactattctccttcaagaaattttcttgcttcaaatcccatgccaatgcagcagaagggaagtaactccatttatctttcagacgtgaggaaccatcggcacggatagaggcggtaagcatgtaacggttcatgaatacatagttgacacgtaacattcctgacataagggtattgatgctgcggtcggatgcaatggctgcgaggtttgaatcggaccatgccagattattgacaccgatcatgtcgatatagtctaagttatatcctgtaccggtatggttgtagttgttgtcataagactgctcgaatacggcagttgcattgatacggtgattttcattgaattcctttacataactcaaagtattggtattcagccatgaagtattccaatagctacgtgcctgtccttgagtcagactgtttttgtaggaataataactgtcttcgttttctaccgaagtattcagtctgttatcaaaaagcacgcctagttgagagcggaaactcaaaccgtccagaatatcgaactggacatagccctgtatgcggttattgattgttttgttagagttgctggattcccagatgtatcccataggattgtatgccttgccaccatcgaagaagctattgttatattctccttcttcgtttttgggttcgatggtacttggaaagtacatgctttgctgtatcaagccatcgtattcggtaatacggggtttgcttgtttcacgatagtgaccgtatatattcaaacctgctttcagccatttcttgattttggtatctacctttaaacgccagctgtagatttggcttcctgattctttaatgataccttggtcgtcctgataacggagagaggctaagaacgttgttttttcaccaccaccggcaatggaaagttcatagttctgagtaactgccgggctacggaaaatttctcttgaatagtcatatcctgccttgccggatttgaatgcttcgagttgttccgggctgtaaaaatgattatcgccatagccaaagtattctttaccgtaatcgtttaccaagttggcatattcgtacggagagaggttatcggggtatttggcaacggttttaatattggcaaatgcgttgaaagagacagttagcttatccttttcaggatttttggtcgttaccaggataacaccattggcaccgcgtgaaccgtatacggctgttgctgaagcgtcttttaatacctcaatggaggcgatatccgcagggttcaatgactggagagaaccaccgatgaatccgtcaattacaacaagcggtcctgtttctgccgtaatagagttgataccacggacgcggatggtgttgtcgccgctggggtcaccggaacctgagagtacggatacaccggccatacgcccttgcaaggcatcggatacattacctgtcggggtactttttaatgcatcggctgtctttacggaagccaccgcaccggtcaagtcacttttacgttgaacgccatagcccactaccaccacttcttgcaataattgactgtcttcacttagcgttacgttaatatgcgttttgccggctactgctattttttgggtctgataaccgatatacgagaatacaagagtcgcattggacggtacgttgggaagtgtgtaatttccgtcaatgtctgtaatacatccgttgctggttccttccacttgtatggaggcaccaatcacaggacctaaattgtcacttactgtacctgttactgtaatgttttgtgcattagcttgtgtggcgaatagcacaaagagcaacataatacctaatgttttgaatagattagatttctgtttcataaatattaatttaattggttatttaaaaaaaggcttttatcagtcttgttcaaaatcggaaaatctcttcgcaaaagtataggctaataaaggtagagatattcactaattgtccgcaaataatctgatattgtacattatctgcggacaatcggtgctctgcttagtccttatttacttggtttttgcagcttttactttttccaacagaatagccagctcttttactttatctgggtgagttccagccaaattttctttttcggaagggtctacagataagtcataaagttgtggttggggattgtttcccgtttccattttagtccaatgttccaaagccggtttgtcactcggttcgatgtatttccagttattctgaatgatggatagagtattattcagattctgttgtaccacatagtcgcacccgatggtatccgtgccaaggaagttgttgagttggtcgcggctgtcaggggcaacacctgtaggaagttcatgattcagcagggctgcaaatgaagcatatacatcaatcatggaaaatggagcctgttgtttgcccggtttgataccattcggccagcgtacgataaatggaatacgggttccggcatcgaatgcgctatacttgccgccccggtaatgtttcatgggggtgtgaccgttcagcaattcaaaggcctggtcttgataaccatcatcaatgacgggaccgttgtcgctgcataatacgaagattgtattatcagcaatatccagactatcgagggtgtgcatgatctcgccgactgtccagtccagttgtaaaataacgtcaccacgcggtcctaaaccgcttttccctgcaaaacgcggatgggggactcggggaacgtgtacatcttgtgtacccatatacaggaagaaaggttcgtttttatgtgcaacgataaaatctttggcttttccggtaatgatatctgcaatatcttcatccacccaaagagcagatttgccaccggtcatccaaccgatacgggggataccgttgataatggtattattatgtccctggctgggtttcatctttaccaattcaggattttcaagtcctgtaggccagtcgcccactttgtgctggtagctgacagtaatgggatcttggggatcaagccctacaacatgggcattttctacgaacacacaaggaaccctgtctactgtggcaggaatgataaattcatagttgaagcctatgtcttgagtattcggcctgatttcgcgattgaagtccgtgccacctttaggacctaatcccaaatgccatttgccgacggctccggtgtaatagccttcctccttgaacatatcggccattgtgacacaagctgtatcaataatcagttcggaattacccggtgcaatgcctgtgttctcttgccgccagggatacatacctgtaagcagtccgaagcgggaaggggtacttgtggaagaggtggcatatgcattggtgaattgcataccctgaccggcaaggcggtctatattcggggtacttattttagtggcaccgtagcagctgaggtcgccgatgcccaagtcgtcagcgatcaggtagataacattaggcttttgcggttggtcactcttggcttcttgtttagacggattgccacatcctatcaaaaggaccgtacttggaagatacggtagaagattagataaatatttcatagcctttggactttaaagttttattccaagtccaaagatatgcgctatctttcggtctgtgtgtataaaagagtacacacggaatcataaaaagtacaaaagtgcagaattcttatttttcatttactgcttcttcctcgtctttatcagcttcctctcctttgcgataagccagcgggctgacatgatagatgtccttaaagcacttgctgaagtagcgtgaggaactgaatcctatcttatcggaaatttccgtaatgttcagttccggattattgcgcaacatcaaagcacctttcttcaaacggatagtcagtataaattcgtttggggtttgtcctgtaatggccttcagtttggtgaacaggttggtgcgcgccattgccatttctctggcaaagacattgacattgaattctgtgtcgtccagatgttgttcgatgatagacatggcacggtccagaatgtctttgtcaatcggattggtagcaagcatatgtgcagccgtttgcggttgcttgctgaatttttcctgtaagaggatgcgtgaattcaccaggttgttgcagcgggatatcagtaagtttgtattgaacggtttggttatgtaatcgtccgcgccgatccgcaatccttcgatattcgattcaatggcagtgcgtgcagtcaataacactacggggatatggcaggtgttgaaatccgtttttatgagtttgcatagttctgtacccgacattttgggcatgaccacatcgcttaccacaatgcagggcatttcactgcgtaccagttcccagccttcttctccgttggctgccatcaatatctgatagaatggcttgaagatgttggcaagcatttcgcggatggactcattatcctctacaatcaatagtttggcatccggaatacgtttgatgggagcattttcttccagttcggttttcaggaaagcatctgcttcggatttggaaatttcaatctgatgtacgcaatccggattccggttgatttgttcttctgtaaagaattcgttacccaagcgtagtgtaacgataaagcttgtacctttgccaagttcgctttctacacggatggaaccatgatgtaattctataatacctttggtcaaagccagtcctataccagtgccgctcttgccggcatcagtagaaccggtcggttctatctgataaaagcggtcgaatatcttatctatctcctttgcatcgataccgcttcccgtatcttttacacaaattataacgttattccgttcttcctttacactgagcgtaatggtatcttctttttccgtatgcttgatagcattggataagaggttattgataactttctgcatttgcttctggtcgtaccatacttcgagttcgtcagtctctttttcaaaattgaagttgatttgtttggcactggcatattcaaggaacagcagatagttttcatacagaaaattcacgatgttgtgcggactgactttaatcttcatatggccctgttcctgcttgcggaagtcgagtaattcggttattagctcgcgtagctggatactgtttttataaatgcccaatatcttgttgtagatggcaggtgtgaagttctgtaattgcagcaaggtttctacctgagccacaataagagtcagaggagtgcggaactcatgcgagatgttggtgaagaagcgcaatttggattggttcagcgcttctacatcctgaatatgtttctgttcgtatttcaaagattcgcgtagtttgatttttgatttgtaggcgcgtatcagataccacagaaccgctcccgttatgataatatatatgaagtaggcaagtgttgttttgtagtacggcggcaatacatgaatggtgagctgtgcttgcggacaaaggttttcgtcttttccttccggcttgatgagcaatgtgtaagtgcctgcattcaaattggtgtaagtaatggtatgcagccctcgcgtgcttgtccattcattggaaaagccttccagtctgtaaataatatcgtctttgttggcaggtatgtaattggatgtggcaaactctatactgaacatgctttggtctgcattgagggttatctctccggtgtggcataaagagtgctgcaagatgccggttttatctcctacagagatttccctaccgttgacgatgagccgtgagaggataatcttataaggttttggggtaaagttcagttccatttcatggaaagaaatcatgccttgtatgcctcccagaaatatttcaccgtcgcaggtgacacagagtgcattttcgttgacggctgtcaacgggaaaccgttttcagcactgtaattattaaaagtcttatttttgtagttaaagatggagaatccttcgttggtgatgagcagtaatttgccgctgctgggagattcttgtgtttcataaatgcagtcactggccagaccgttcctttccttgtcgaaattttcaaaatcattggttgcggggcgatataagtccagaccgctacccgaggtggagaaccacaggttgcctttgctatcttgcgttatattgttcacattgttattgctgagactgttcgggttggtggcatcatggcggtagtttgtcagtctgcaggtgtcaaaacgataactgaatactccttctccagtggcagcaatccatagtgtaccctccgaatcgaatgtgacatctgctaccattttaatggattttccttctttgctatctttgaacagttgttggcattgtccgttagcggggtcaaagaggcatactccgttttgtgtggctataatcagcaggcttttgtagggaatgatatcgcggataatgtctgatggaagagtgttaggattaccttcttccatgcggtaatgggtaaaatgccctgagcgtatatccagtttgttaagaccgcccaaatgagtgcctatccatataatttctttatcggcatcataataaagcgcttttacattattatgcgaaatgctgttacgtccttcctgtgggcgataccatttgaattcgcgtgtgcggcggttgtaataattcagtccgccgccttcggttcctatccacagattgccgtctctatcctcaatggtgcgtcctacaaccggattgctcagccctttcttctcgttggaagagtaggaataacgggtgtagatttcatattccggattgaagtagttgacaccgccgaaataggttcccaaccaaagtgtaccttggttatcttttacgatacaccagatggaagagtgggtgagcccgtcggcttgtgtgtcattggctgtatggttctggaataatccggttattttattgtatcggtttaatccgttgaaagtacctatccatatattgcccaaattgtcctcacagcaggccctgacgaaattggaggagagactgtgtgggtctttggcattgtatttgaagttttctattgttccgtctgcttttacacggaacagtccttcttcccaactgccaatccacaattcactttcgctgtcctgataaaaactggtaatatttcctttctgaatgggatgcgtcagttcttttttgtcaatattcaggcagtatacgccgttggttgttgttcccagccatagtacatccttattgatgtgtatacagactatttccagatttcggtccgggagttgatagtaaaggtcgaaatttccagtttcctcgttataacggtatatttcattctttttgccgataaaaagtccgtcattgtaatagatgctgttgatattgccttgtattaacgtagtgaatttttgggtggcaaggttgaattccgccactccttcggtgcagagcagatatattttcccgttatgattgcccgtaatgcgggatacggtattgcagaaaaggctgttgggattgttcttctgtagcttgtaggtctgtatatcgtctccattgtaacggttcaacccttcgcgtgtgccaatccataggatgccgttttcatcaacatataagctgtttacggaaaactgagataatccgtcgtcggtggtaaggtggttaaaggttatgttctgcccatacacatttgcgaaagccgcactcgctaaaataaagaataatctgatgataagcttctgcacgttgagtcatttttaaggtttcagtcacaaatataaggatattttgtacaaagattctcatttattatttggattttgcggttatgtttgtttaaatgtatatttttggatgttcatcggacaataataaacttattatatgtaataaagagcgtatatttgtatcataaattaatttatttattatcatgaaagaccttttatctatcgtatctcattttcaattgcagggtacagttcaagaaatcaatcctttaggggccggtcttattaatgacacctataaagtaagcactctcgaggctgatgcccccgattatgtattgcagcgtatcaatcatgccattttccaaaacgtagaaatgttgcaggccaatatcaatgccgtaaccactcatatccgtaagaaactggaagagaaaggcgagaaagacattgaacgtaaggtgctgcatttctttcctgccgatacaggaaagacttattggcatgatggtgagagttattggcgtgtcatggcgtttattcccaatgcaaggacctacgaaacggttaaccccgaatattcgtattatgcaggcgtagctttcggtaatttccaggcaatgcttgccgatattcccgataaactgggcgagacgattcccgacttccataatatggaattccgtttgaaacagcttcgcgatgccgtggcggccgatgctgccggacgtgtaaaggaagtacggtattttctggatgagatagagcgccgtgcagaagaaatgtgcaaagcggagcgcctgcatcgtgaaggcaagttacctaagcgggtttgccattgtgatacgaaagtcaataatatgatgtttgacgaaagtggcaatgtactttgtgtcatcgacctcgataccgtaatgcccagtttcgtcttttccgactttggcgatttcctgcgttcgggagccaataccggtttggaagatgataaagaccttgcgaatgtgaatttcaatatggaaatattcaaggcattcacaaaaggctatctggaatcggccaaatctttcctgctgccggtagagatagagaacctgccctatgcggctgctctgttcccttatatgcagtgcgtgcgtttcctggccgactatatcaatggcgatacttattataaaattcaatatccggaacataacctggtgcgcacaaaggctcaattcaaactgcttcaaagcgtagaagaacatactccggaaatgcagaaattcatagcttcatgcatttgaaaaggtgtataatggcggcgatgatgggttgctgtgtcttacccttattcgcattaactcctaaaaataagatgatgaaagaactggatgtcaagaaagtgagtatggcaaatataccggtagaagcggtgcctgctcttttggatgaagaaaaagtggcttttcagccggttaatacagtgaattgggcggcatatccatactgtccggacgtaaagttccgtattgcttatacggacaacgctatcctgattcattataaagtgaaagaagccagcgtacgcgcagtagcgggcaaagacaacgggccggtttgggaagatgcctgtgtggagttcttttctattcctgccggagacggagtatattataatatggaatgtaactgtgttggaagattgcttatcggtgcgggagcaggacgctccaaccgtcaacatgcaccgcaggaagtacttgataaagtgcagcgttggtcttctttggggcaggaagattttgaggaacggataggagattgcagttgggaagtggctttggtgataccttattccgctttctttatgcataatatcacctcattggacggtaaggccattcgtgccaatttctataaatgcggtgataagttgcagactcctcatttcctgtcatggaatcccattgatttggaaaagccgaacttccattgtccggaattttttgggatgttgcgtttcaagtaggtacgaggggtataatactctgaatagcaataaaaccggcatataagaaaaaaggcttgcagatgtcttattcacaggacttctgcaagccttttttcttatatgccgaggtttactttacaataccttttgagttacggataaagttgatgatattatgtatctcatcactcattggaacctgatcttcaatcttctgtaaagcgtcctgtatgctgaaattcccttgatataccaggcggtaagcattgactatatggcgcagaatacgctcggtaacctgatgcttatgctggagtaccaccgcattgataccgtgatattctgccggattgccgttcattataacataaggcggtacatcttttgagatgcggcaacctgcctgaatcaatacccaactgcctatgtgacaattctgatgtaggataacattactgctcaggattgtacagtcgtctatgtggcagtctccagccactgtgctcttaattcccagtacacagtgattgcctacttgtacgtcgtggcagaggtgaacaccgtccattagatagttactatcgccaatgcgcgtacatccgctttcgtgcgtagcacggctgataaccacattttcacgaatgtcgttgttgtcaccgataatcaaccgacttgcttcgcctgtgtaatgaaaatcttgcggttcactacccagtacggcaccatggtgtactttatttcctttacctaaacgcgtacccttgaggatacttgcatttgacataatcacgcagtcgtcaccgatttccacatctccttcgatgtaagcgaaaggctgaatggttacattcttaccgatttttgcggtagaatctacagatgctaatggactaatcatagtaattagttatgagttataaattataagttatgagttatgggagatgagccgtcaaaaataacttataacccataacccgtaactgatattattctcttcctccgcctaatgcttgatacaggctgattacagactgcatgcggtcgaaggtgtcggccacttccgaaagctgtgcgctgaggtaagactgttcggcggacaagacttccaaataggttgacgtgcctaagttaaacaattcttttgtatcttccgcagctttacgggcagaattcacttgaatttcacgtgaaatggctttgtccgaggtcatttgatattgatacaaagcattgcttacttcatttccggccttgagcagtgtggtctggaactggattttggcttgctcttcctgtgcctttgcttgtttcaaccgggcaatgttggcaccgcggtagaacagaggttgtgtgagcgaaccgatagcggatgccagcagctttcctggattgataatagcggaacctgcactgttggtccagccggcagaaccgcttaaggtgatttgcggatagaaagctgcacgtgcgctgttggtgtcgtagtagcttgctgccagtgacatttcagcagcttttacatcgggacggttggacaacagttgcaaaggaataccggtagagaattcggcaggtaactgctgctgttccaatgtaccacgtgcaatgctctgtgcaggttggttcagcatcaggcatagtgcgttttccgtttcacggatgctttggcagatatcgggcagggaagccagtacttgtgcataggcggtgcggctttgctctacggctgcactgttagccatagcagcctctttcattgcttctacggtttcaaggttgcgtttcaggatgtcacaggtgctttcgcttatttgcaactggcggtcgagcattagcagcgtatagtacatattggctacgtttgcaatcacttgtgtctgtacagcctgttcatagaactgtgtctgtttcagtgagacttgagccttacgcttggggttcagcaactgaccgaacagatctatctgccagcttgctgtcacaggaagcgaatacgtctgtgtggctttacctttgtcgaagctgcttaccgttccttgcggagagagagccagcatgggagcataagccagacgtgcggacatcagtgctgcctgagcctgctttacggtgagtgcagcactgcgaaggtcggcattgttggtcaatgcctgttcgataagtgtctgtaactgtgcatccgtaaacacttctttccagggcagattaccgaaattggcagtatctgcggcaagtgtatcgccaccggcaatggtgtcccgatataggccttctactgtaatatcttcgggtctgtcgtatgatttgtagatatggcaactgctcaataaagcagttgcgcacatcagaattattattttcttcatgataaactatattttagtgtttagcggttagtgtttaataattagtaatttgcttgtggatgtccactatccattaatcgttaaacgctaatcactattttgtatattgttcaatctcaggttctgcatccgagttatccacatcttcccattccatcggtttaaccttctcctggagatattggaaagcaacgaacagggcaggtacgatgaatatctgcagaatcataccgattaacataccgccgatagccgaagttcccagtgtacggttaccgttggctcctgcaccggaagcaaacatcaacgggagcagaccgacaatcattgccagagaagtcatcaggataggacgcagacgggcggcggcacccagcacggcagcccatgtaatgctcatacccattttgcggcggtcgagggcgaactctacgatcaggatggcgttcttggccaacagacccatcagcatgataagtgcaatctgcatgtagatgtcgttagacatggttcccaaaatcattttcaatgcaggaatgttacccaatgaaccgatgccgctgacaaacaggaagctacccaacaatccgaatggtacggagagcaatacggagagcggaagaatataactttcatattgtgcactcaacaacaggtaaacgaatacgaaacagagcacaaaaatcaaaccggttgtgctaccgctggtttcggcttcctcacgtgccataccgccgagttcgtaggcaaaaccggcaggcaggttctctttggccacttctgcaatggcagcaagtgcctgaccggatgtataaccgctggcaggagccaccatcactttcatagatgtgtaaaggttgaaacggctgatgatatccggaccgtataccttcttgacggatacgaactgggtgatgggagccatctcattgccgttacgcaccttgatactggagagtgattccagatttttggttgcattcggttctgcctgaatcatgacacggtacattttaccgaagctattgaagttagaagcgtaaagtccaccgaaatatccctgcatggtgctgaggatgtcgcttgggctgaggcctgctttcttacaggcagcagcatcgatatccaacatatattgcgggaagttagggttgaaactggtctttgcggagttgatttccggacgtgcttccagtgcggcagtatagtcgttcactacatcgaagaagtggttcaggtcgccaccggttttatcctgcatgttcagttcgatatcgctggatgccgaataacccggaatcataggcggagcaaagaacagtacctgtgcttccttgatgattttttgcgcacgcatgaaaagtgtggcgtaaactaccgttgaattctgcatagtggaacgttcttcccaatttttcagcttgataatgagcgaaccgtaggaaggtccctgaccaccgatgaagctgaaaccggaaattaccgtacgcgattctaccgcagggtcggctgcaacgagactgtctacacggttcagcacttccatggcacgttcttgtgaagtaccgggaggaagcgttactacacccatgatggtaccggtgtcttcgttgggcaccatacctgtcggtgtgatgttcataaacaccatcaacagtacaatggaacctaccacaataccgccggagagccatttcttctggataaagcggagcacttgtttcttgtatttacccaggatggagtcgtaggatgcgttgaaagagtgtttgaacttatccgtagtcatacctgctaatgccaatacgctgataacgatcattaccagacagagtacaggatggttctcaaagttgaacaaaccgaaaatcatacccaaaatggcgattgtagtaaagagcagtgtaaggccgggacgcatcattctgccgatagaatccacataacgggctatcatgattttacgtgcctctttagttgcgacaccgattcgttctttcatggtggcatcactgttgtgcggtttcaggaagatggcacacaaggccggactcagtgtcaaggcgttcaatgcggagaaaccgatggcgatggccattgtaagaccgaactggcggtagaatgtaccggctgtaccacccatgaaacttaccggcacaaacacggacatcatcactaatgtaatggaaatgatagcgccgcccagctcgctcatggcgtcgatagatgcagtccgtgccgatttatatccctggtcgagcttggcatggacaccttcgacgacaactatggcgtcatccactacaattgcgatggcaagcaccatagccgagagtgtcagcaggttaatactgaagccgatcagttgcagtacgaagaaagtagcaatcaaagctaccggaatggcaatggcaggaatcagcgtagagcgcatgtcttgcaggaagatatacactacgatgaacacgaggatgaacgcctcaatcaatgttttgattacttcatggatagaagcgaacagaaagtcattggcactttgggcgatattgattttcaaaccggaaggcagcgtttcggatgcttttccaagtacttcttccaggtcactgatagtctgcgtagcattggttcctgccatctggtatacgatacaggatactgccttatggccgtttaccgtattattgaagttgtaggacagacgtccgagttcaatatcggcaatgtctttcaaacggagaacttcaccgttctcaagggctttgattacgatattctcaaattcttccggctgttgaagacggcctttgtagcggatggtgtattggaagctttggttgccgcgttcaccaaactgtccgggagccgcttcgatattttgttcggccagtgcaccggctacatcgttaggaatcaacttgtattgtgccattacatccggtttcagccagatacgcatggagtagtcctgaccgagcacggtggcatcacccacaccgtttacacgctttacttccggaataaggttgatgttggcatagttctcaaggaattcgatgtcgtactggtctttctcatcgtaaatggagaataccatcaacatggatgtctgtcgcttctgcgtagtcacaccgactttggttacttcggccggtagcaaaccctgagccatggaaacgcggttctgtacgttaacggctgccatatcagggtctgtaccctgtttgaagtaaatggaaatttcggcggaaccgttattggatgcactggaagtcatgtacatcatgttctccacaccgttgatttggtcttccagcggcgcaatgacagagttcaacaccgtttgggcgttggcaccctggtaagtggcgcgtaccgataccgtcggtggtgcaatgtccggatattgggtgataggcagcgttgccagaccaataagtcccaggattactatcaggatggagattaccgtagatagtaccggacgattaataaatctatctaatttcatgttacttaatgattaggggcgttaaatgttaattgaacgcagtttggatattaccttctttttggtctttgagggctttctgatattcagcctctttctcttcaggagtgataggagtgatgctttgtccatctttcaggttctgtacgccttctatcacgattttatcgccggccttcaagccgcctgtaacgtaaaaatatttgccatcattcaggctgaatacctgtatttcggtatttttcagcgtgttgtcaggttgtgcaacgaatacgaatttcttgtcctgtatttctgtggtggccgattgaggaatcatgattacattctccatcggattggggaatactacgtttcctgtaccgccgctacgcagaatgttgtgtttgttggggaagagggcacgcatatttactgcacctgtagtctggtcgataacgccgctgatggtttctacacgaccactgtcggcatacatggttccgtcaatcagttgcagttgtacctgaggcatctttgccagaatatccttggtgcttccgccttcgcgtatcagtgacaggagctgtctttcggtcatggagaaataagcgaacatttcggagatgtcggcaactgtggtcaacggggtggccatggaggggcttaccaaactacctacacggtaggggatagtacctactataccgtcgctggggcttgttacactggtgtatgacaggttgttttgagcattgatcagttgcgcttccgcttgtgccaattgtgctttggtttgtgccaactggttttcagccatttgcaggtcgtaatcgctgatgatgttcttttggttcaacgtgcgtttgttgctcacagtaagttcttgtgtgtttacagcggcttttgccgtttcaaccgcagccttggccgaatttactgcagcctggtattgtacagggtcgatgctgaacaatacttgtcctttgtgtacgacggaaccctcgtccacatgtaatttggtgatgaaaccgcttaccatcggacggatttccacatcttgtttacctttaatagtagccggataactgtttgtcaggttggcagtggttgtttctactgtaatcactgcaaattcgggtgcttttcccgtgcttttgtcaccttgtccacaactgctgagcagtgccaggcaacatgccaataatactaatctactcttcatactcttttattctctgtataattttattctagttaatccgaagcttttgtgtgtaaatcatagaagaaggataacggtgaaaactaaattataatgtttagttttcggtcgcaaaattattcttttctccgtatataaggtatgaatttccctcatttttaactatgttttatatatacttgaaggaaatatttgttttttgattaaaatactgtaaagcatactgctaattgcaggataacctttatttttgcatcatgttagattgcaagcatcatattaagatgaaaccgtttgtacgtcggttgttaggggcagctgtaagtgtggctgttttatattcctgtgccagtgtgggccgtctggagggtggtccgattgatgaggaaccgcctcgttttgtcaccggttctcccctgccgggtgcactccataacaaaaagagtaaaatctctattgagttcgatgagtttatcaaactggagaaagccaatgaaaaagtggttatttcacctcctcaagtgcagcaaccggaaataaaggcaaacggtaaaagggtagtggtcaacctgcaagatacgttaaaggctaatactacgtatactatcgattttgccgacgcgattcaggataataatgaaggaaacccgatgcaggggtttacctatacattttctaccggagcagagcttgattcaatggccattgccggtacgttgcttgatgcatcgaatttggaaccggtaaagggggtactggtaggattacatgccaatttagccgattcggcatttaccacgttgcctttcgaccgtgtaggccgtacggatagccgtggacagttttccattcgtggagtctctcctggcaaatatcgtatttatgctttaatggatgccgaccagaattttaaattttcccagcctacggaggtcatagcttttaatgactccgttattatcccttccatggaaaggcgtatgcgccaggataccttgtggagagactctttgaccgtagatacgattgtagagagacaatatacccatttcctgccggatgatgtgctgttgcgcagtttcaaggaaaaaactttctcgcagcgtcttatgaaaacggaacgtcttactccggaaaaattctctttttattttacggctcctgccgacagtctgccgctgatgaaagggttgaatttcgatgaaaaggatgcttttgtcattgagcagacaaccgggaggaacgacacgattcactattggataaaagattctttgctttatcagcaagatacattgaggatgagcttgagttatttgtatacagatactttgaatcagttggttccccggacagatactttgagaattgtatcgaaggtaagctggcagaaactgcaggaaaagaaactggaagagaaggaaaaagccgagaaggagaagaagaaaagaaggaaaaagggtgaagaagagccggaaccgactcctttccttgcaatggatgtgtatgcgccttcggcaatggatgtatacgactatatcacattgagctttacggaaccgatagccggctttaatgatactgccttgcatgtaaggcagaaggtcgatacactatggcaggatgtgccgtttgactttatgcgggattcgttggatttgaaacgttacaatctgtatgcagactggaaaccgggtgaaagttacgtttttgaagtggactcgaccgcttttcacgggttgtacggtttgtttaccgataaagtgaagaaggagtttacagtaaagaaactggaagagtacggacagatatttttcaacattaccggagctgattctacagcatttgtagaattgctggatgctcaggacaaggtggtacgtactgttccggttgtagaaggaaaagcggatttttattatttgaatccgggtaaatatggagcccggctcattaatgatacaaatgggaatggggtatgggataccggtgattatgctgccaggcgccaacccgaaatggtttattactatccgcaggtattggaatttaaggccaattttgatttgattcaggactggaacgtaaaagaaaaaccgttggataagcaaaaaccggatgaactgaaaaaacaaaagccagatgaagacaagaaaaagaagaaaagccagaataaccgcaacaacagcaaccgtaacagcggtaggggatatagttattaaacggaagcgggctgcaggattgtttttgctggccggacttctgtgtctgtgcagcataatgcctgtgcaggctcaatgtgtggctaagaacgaagcgtttcagtcgggcgaacatgttatgtacgatttgtattttaactggaaatttatctggaagaaagtagggctggcaagcttgactactaatgctactacttaccgcttccagccggcctaccgtttcaatcttctttctgtgggtagcaagaaaacggattttttctttaaaatgcgcgatacgctgacgtgctatgtcagcgataaactggaaccgctttattttcgtaaagcagccgaggagggaaaacgctatacggtcgatgaggcatggttctcgtatgatgacggtatagctaccgtaaagcagagacgtacctggcataatcccgtgcgtgaaccgcaggagatggagtacagcgacagccgctgtatctttgatatgctgagtattttggcgcaagcccgttcttataaccctaaagactacaagataggcgagaagatacttttccctatggcaacagggcgcagagtggaggagcaaaccttgatttatcgcggaaaggaagatatagaagcgaataatgatacaatttaccgctgccttgtattctctttcgtggagtacaagaaaggaaaagagaaagaggtgattactttcttcgtttccgatgataagaaccaccttcccatacgtttggatatgtatttgaatttcggctctgcaaaagctttcctcaaaagtgtaagggggaatcgttacccgatgacttccgttgttacaaagtaaacggcagtgcgtctccttttctgaagatacttgactcgaatgtggctaccagctcaccgttctggttggtgatgtcaatctgataatgtccggtagtacgtccgatgtaccgttcgcgggcttcggcatataatatgtcgcccggaccgctgctacgcaggaaagtgatattggaagacagtgagaaagccagtgtgccgtgagaattggctgccgctgccaaggcgaggtcggccagtgtaaaaagcgctccgccttgggtgcgatttccggcattgagatgtgtttccgtaatcaccagacgggctttgctgtatccttcttttatttctatcagttctacacctgctttatcggcaaaacagtctttcttgaaaaattcttgcggcgtcatgtcgtttggtaataaatgattaatattaaggagaaatctgatgttttggacacaaatgtaatattttagcttttaattggataatttaggtgggttattttcgaaagcatgcactacttttgtcttcgaaaaaatagacataattaataaataaatcccttattatgaaaacgactcttactacattgggtattttccttcttgttttagcaggttgtgcaggacaaaaaaagactgcaaatgatttcattcaggagaatattgataatgcggtggcacaggaaacacttcagacagacattatcgaaaaatctggcaaaattcttaatccgcgtaccattaataaggatggtagcattcactacgttcctatcgacgactggtgctctggtttctttcccggtaatatttggtatacgtacgaactgaccggtgataaaaagtggttaccgctggcagagaagtatactgaagcattggattccgtacaatatcttacttggcatcatgatgtaggctttatgattggttccagctatctgaacgggtatcgttttgccaataaggaagagtacaagcccgtaattatccagaccgctaaatcattgtctacccgttttcgtccgggtgcaggcgttatccagtcttgggatgccgacaaaggctggcaggccgaacgcggatggaaatgtccggttatcattgacaatatgatgaatttggagctgctgttcgaagccactaaactttcgggcgactctactttctataatgtggctaagaaacatgccgacacgactatggccaaccacttccgtgcggacaacagttgttaccacgtggtggattatgatccagagattggtgaggtgcgcaaaaaacaaacagcgcagggctacgccgatgaatcgtcttgggctcgcggacaggcatgggctttgtacggttatacaatgtgttatcggtatactcatgatgccaaatatctggcacaggcagaaaaggtgtataactttattttcggaaacaagaaccttcccgaagatttggttccttactgggacttcgatgctccgaagattccgaacgagcctcgtgacgcttctgccgcagcatgtacagcttctgccctctatgaactgagtacctatgttaccgataaggggtataaggaaacggctgacagaattatggaaagtcttgcttctccggcttatcgtgcagaggtagggacaaacgggaactttatcctgatgcactcggtcggcagtattcctcacggtgctgaaatcgatgttccgctgaactatgccgattattatttcctggaagctttgaagcgtaaaagagatttggaaaaatgaaaagtcaattgaatatattgttaggtggtttaggcttgttcgccttgcagggttgtaaaactccgcaggcagagcaggcccaacagccgaatgttatttatgtttttcccgaccagttccgcaatcaggcaatggagttctggggtcaggaaggttttcgggagaaagtgaatttccggaatgatccggtgcatactcctcgtctgaatgattttgcgagagagtctttggtactgacctctgccatgagcaattgcccgttgagcagtcctcaccgggggtcgttactgacaggcatgtatcccaacaagagtggcattcctttgaactgcaattcgaaccgtcctatcagttcgttgcgtgaagatgtagactgtgtgagcgatgtattcagcaatgcgggatacgactgtgcttatttcggtaaactgcatgcagacttcccgacccccaatgacccccagcgtccgggaaaatatgtggaagaccgcataccagcatgggatgcttatacaccgaaagaccgtcgtcacggatttaactattggtatgcttacggaacttttgatgaacataagaatccgcattattgggatacggacggtaaacggcatgatccgcgcgaatggtctccgctgcatgaatcaggtaaagttatttcttatctgaagaatgagggaaatgtacgcgacccgaagaaaccgttctttatcatggtcggcatgaatccgccgcatagtccctatcgttcgttggacgactgtatggaacaggacttcaacttatacaaggatcagccgttggacagcctgctggttcgccccaatgccgattctaaaatggcaaaggcggagagtgtacgttactatttcgcttccgttacaggtgttgaccgtgctttcgggcagatactcgatgcgttgaaagaactgggattggataaaaacacaatcgtagtcttctcttccgaccatggtgagactatgtgcagccagcacacggacgatccgaagaattctcctttctccgagtcgatgaatgtgccttttctggttcgcttccccgacaagattcaaccccgtctggatgatttgatgctttcttctccggatattatgcctactttgttggggttggcgggtctttccgattctattccggcaaatgtgcagggacacaattatgctccgctgttctttaatgaaaaagctgatatagtgcgtcctgcaggagctctttatattcagaacgtagacggtaagaaagatgaagacggtaaggtccgttcctattttccatcgtcacgcggttttaaatcggcccgttacacattggctctttatgtagaccgtgataatcacaagcttgtaaagagtttcttatttgacgacgaaagagatccgtatcagatgaataatcttccgttagaggagaataaggaaatagtagatgagctgtgtgcagagatgggaaaagtcttgaaggagattgacgatccctggtacagagagcgcatcttgtccgacatgataccgtacgataaataaaaattgttgtttctaaactgaattacccctgccacaatcatatgtagcaggggtaattttttggaggatatgatgcacctctttctttcgtttataggaaacggttataaccgttttgggtttacttgtttaatttccactcacatccgtctttggtgtccttgatggcaaagcctaatgcagtcagttcatcacggattttatcggaagtagcccagtccttgttggctttggcttttatacgctctgccagcaacatgtctacaactttaccgaaagcggcttcgcgttcttcattggaggtgttctcctctttcagtcctaatatatcgaagcagaagagatggaaggtctctttcagctctttcaggtcttcggctgtaatggtgtcattgcctgcaatgatattgtttatcattctggcaccatcgaagagatgggctattacaatcggagaattcaaatcatcgttcatggcttcatagcattcggcacgtaatgttttcacgtttaccgtagaagctttgcctggaacaatcttttccagtccgtgtacagcatccataagccttgccagacctttttctgcagcttgcagggcttcattgctgaaatctaccgtactgcgatagtgagcctggagaatgaagaaacggatggtcatcgggctgtaagcctgtgtcagcgttttgttggagccggtgaagaactcatccaatgtgatgaagttgccgaggcttttacccattttctgtccgttgatggttatcatgttgttatgcatccagtaatgcaccatgtcatcgccttgtgatgctacggattgtgcaatttcacattcgtggtgcgggaagataaggtccataccgccaccgtgaatatcgaaatgtttacccagatatttctttcccattgccgtacattcggcgtgccagccggggaagccgtcactccatgggcttggccagcgcatgatatgttccggttgggcacgtttccacagtgcaaagtcggcgggattgtgtttttcctcctggccgtccagttcacgcgtagtgtttagtacatcgtccagattacgtcctgacagtttgccgtagtggtggtctttgttgtatttggctacatcaaagtaaatggagccttcactttcgtaagcgtagccgttctccagtatctcttttacgagctctatctgttctatgatatgtcccgatgcatgtggttcgatactgggagaaagcacgtttaatgcttccattgccttgtgataacggtttatataatactgtgccacttccatgggctccagttgttccaaacgggctttctttgcaattttgtcttcaccgtcgtccgcgtcatgctccaaatgacctacatcggtaatattgcggacatagcgcactttatagccaatgtgtgtaagatagcggaaaagtaaatcgaaagtaatggcaggacgtgcgtggcccaggtgggcatcaccgtaaacggtcggtccgcagacatacatacctacatgaggagcatgcaaaggtacgaataactccttttttctatttaaggtgttgtaaatggtcagttgttgttccataacgtttgataattagttctttttggaaaggcaaaggtataacaaatatttgtaaattaggactatctgtttttaaaaagcgtgcaggaagtatcgttctacggcgatggctactccatcttcgtcgttacttggggcaatgtagttcgcagcagctttcacgggttcctgtgcattgttcattgctatgccaagtccggcgtattttatcatgctgagatcattgtaaccgtcgcccatggctgccacttcttcgcgggtgatacccagcttttccgataatacggcgatcgaacgtgctttgtctatgcccaaaggaacgagttccagaaaataaggttccgaacggtatacgctgatttgtctttgcagacgaaggctcagttcggcttctgttttcataagttgttcaggttcaccaacaatgaggcatttgggtaggggaaggggaatttcctgcaggaagttctctacacggcgtacctgcattttgttgaggaatgcttctttctgtacgtacgggtcgttgggattttcggtgagtatgcactcgttgtcgtatgtgaggattgtttgccggttatcggttgcagtctggtacaggataggcagtacatcgtcgggaagcaggtttttatacagtagctcaccggtgctccagtctatgatttctccgccgttataagaaagaatatagccgttgttttctttcatttgcagttgttccgccaaaggaacaatgccgtaggtaggacggcctgacgccagtaccaggcgtacgccgctttgctgtagccgtaacagggtacggagattgcgcggagagatttctttcttcgaattggtcagggttccgtccaggtcaaggacgagcagtcgatagtcttgtttcatggtttgaatttgattgtttttttgaaagtggcaaagatagggttttctcaggatgaaatactatttttgcagtatgaagtcaaaagaacgtgtattattgggaatgagcggcggtacggacagttccgtggctgccatgaagttacaggaagccggctatgaagtaacgggagtcactttccgtttttacgaagtgggtggaaaaacggaatacctggaagatgcgcgggcactggcaggacggttgggtattgagcatattacatacgatgcaagggaactcttccgtgaacgcattatccgttactttatagatgaatatctggcggggcatacccccgttccctgtaccctctgcaataatgagctgaagtggaaacttttggcggaaatagccgatgaaaaggggatttattggatctctaccggacattacgtacgtaaactctttttagaggacaactattacattgctccggcagttgacagagacaaggaccagactttctttttatggggcttgaaacaggatatcttgcaacggatgttactcccgatgggagatatgacaaaagaggatgcgcgtgcttatgccgctgaacgtgggtttatgcgtgttgccgctaaaaaagacagtataggagtgtgtttctgtccgttggattaccgttctttcctgaagcgtgaggttcctatggagcaactgccgggcagagggcattttctcgatgaaaaggggaatgtattaggatggcatgaaggataccctttctatacgataggtcaacggcgtggactgggcattcatctgaatagggctgtatttgtgaaggaagtcagaatggaaaccaacgaggtggtacttgcaccacttgcctccttatataaaaaggaaatgtatcttaaagattggaaccttatcagtgcacatcgggtattgggagcggaaacggttatcgtaaagatacgctatcgcaagcaggcaaaccgctgtatggttgctcaggaggagaacggacatctgcgggtttcgctgttggagccgttggagtctatcgctccggggcaagccgccgccttttatgatgcggacggcttgttgttgggcggtggtattattctttgaagttgagcttcagcatctcttcaatgtattctcttgtattgctgaggcgcggtatcttatgctgtccgccaagcttgcctttactgtccagccaatcgtggaacagatttctgcgggcaacgattatctccagaggctgcaaagccaggtcattctgccgtttggcttcatagtcggaattcacttctttaagggtgtcatccaatattttggcaaatttatccaggtcatctggcattttggcaaattcaatcagccattgatggcggcatttggcatgttcgtccatgaagacgggagcggcggaatagtctacaatctgtgctcccgtggcagcacaggctttgcttaaacctttttccgcattgtccacgataagttcttcgccaaaggcattgatgaaatgctttgtgcggccggtaatgacgaatttgtacgggcggttattggtgaacttcacggtatctccaatcatataccgccacagtccggcagaagtggagatgaccattgcgtagttcttgttgagttctacttcttccagacagcagatacgcggattttccttgccgacatcttccaaaggtatgaattcatagaaaacaccgtaatcaatcatcatcagcatggccggatcgttcgggtcgttctgtgtgccgaaatagccttcggaggcattatatgtctcgacatagtgcatcttggaacttttgatgacttgtctgtattgttcccgataaggagtaaaagccactccgccatggaagaatacttccagattgggccatacttcttccaatgactgtttcccggttttttcaagtatatgtttaacaagtaccagcatccaggatggcacacccgaaagattggtgacattggcatggattgtactgttggctatggcctccatcttaggttcgaactcgctcatcaaggctatttccttgcttggcacacggatatagttgaccagcgggtgtacattctgtatcagaatggcagataaatcacctaccaaactatggttggagttcaggttggggctgtggctaccgccgagaatcaatccttttccggaaaaaaaacggctttcgggattgattcccagatagatggcaacagcatctttcccgccttgataatgagtgtcttgcagagactctttgctgaccggaaggaatttgcttttatcgttggttgttcccgaagacttggcaaaccaacatatttccgacggccagagcaaattttgttcaccggcacgcaagcgggctacataaggtttgatttcttcgtaagtctgtatgggaaggcgttttttgaaatcttcataagtacgaatagaggcatagtcatatttctttccccattccgtattggcggccatgcgtaccaaacgtttcaggacacctgcctgcaactcacctgcatgttcagtgtacagttcgatttctttcaagcggggggcgaagtatactttattcagaagttttgtaatattcatcgttcttatcgaaatctgtttaagtgtgcaaaattaatcttatttatcggcatctctatcttttttctcttttttttctatctttacgtccgtataggtgaaaagaaccgtaatttaaactaaaacatcatgagaatcggtattttgacttcaggcggggattgccccggtatcaatgcgactatccgcggcgtttgcaaaacggctatcaatcattatggaatggaagtaataggtattcatagcggttttcaaggattattgacaaaagatgtggaatcgtttacggacaagtctctgtccgggttattgaatttgggcggtacgatgctgggtacttcccgtgaaaagccgttcaagaaaaacggggtggtatccgatgtaaacaagcctgctttgatagaacggaatgtaaaggaactggggctggactgtattgtctgtatcggcggtaacggtacgcagaaaacggctgctaagttggctgccatgggcttgaatatagtttccgtacctaaaaccattgataatgatatttgggggaccgatttttctttcggttttgattctgccgtcagtattgctacggatgccatagaccggttacactctaccgccagttcgcacaagcgggtgatggtgatagaagtgatggggcataaagccggatggattgcgttgtactccggtatggctggtggcggtgatgtgattttaattcccgaactttcttataatattcataatataggtgatacgattctgaatcgtctgaagaaaggaaagccgtattccatcgttgtggttgccgagggaatccagacggacggcaagaaacgtgcagccgaatatatcgcacaggagattgaatacgaaacgggtatcgaaacccgtgaaacggttttggggtatatccagcggggtggttcgcctacgccttttgaccgtaatttgtcgacccgcatgggagggcatgctacggagttgattgcaggcggacagtttggacgtatggtaacgctgaaagggaatgaaatatcttccgctcctttgggggagatagccggaaagctcaaattagtgaccgaagaccatgatttagtcgtccagggtaagcgtatggggatttgtttcggatgatttgaccgtatcttgtgcagcatccgcaggttccgtataatctgtagcttcaagaacttctgatgtctctacagcagaagcctcttctgcgacaatttgggtttcctctgttgccatattttcctttgccgcgtggttctgtatcttggctgtttcaatagcttctttgaaggcttcgtcactcttgattttcttcaatgccatttgtgcggcattttgctgtgactcctttttggaatagcctgtgccagtaccggcagaaaggccctctatgcggacttcggtgtggaacatcgggttgtaatcctggtcgaggaattgctctatcaactcaaaggaaacctccattttggttttctggctccattcgataagtttggacttgaagttgacttccttgcgcgacatcttgtcgaggtcgatgtagttcttgaggatttttttctccatgaactgcttgcagcgttcatagccttggtctaaatagatagctccgataaatgcctcgaaagcattgccgtacatatagctgttgtgcgacgaagaacgggtggaatacttaaccagtttgtccagccctatttctacagccagtttgtttagagtttcccgttgcacgattttagaacgggtattggtaagaaagccttccctgcgtccttcaaagtgcttatatactatatcaccgacaatggcatccaaaatggcgtcgcctaaaaattccagccgctcgttatttaacggacgtcctttttcggaacggatggaagtggatttgtgaagcagtgcctgctcatagaaccggatgttacggggaaagaatccgagtatcttataaaaacaaaaataagactctctgtccttatggaataagagccttattttatctatttgattacgtaacacgaccgtattattctgcgtatttcttgaaaataacacatgcgttatgaccgccgaatccaaacgtgttggacaaagctacattcacttcacgcttctgagccttgttgaacgtaaagttcaggtcatagtcgatgttttcgtcgttatcaccctcttcgtggttgatagtcggaggaataatgccattcttgatggcaagaatacttgcgatggcttccaccgcaccggcagcacccaataagtggcctgtcatggatttggttgaactgatgttcaactcataagcatgcttgccgaatacttcctggatagctttcacttccgaaatatcaccaacaggagtagatgtaccatgaacgttgatgtaatctacttcttcgggtttcatttctgcatcttccaacgcatttgtcattaccagtttggctcccagaccttccgggtgggaagctgtcaggtgatgcgcatcggcagacatacctacgccggcaacctctgcataaatcttggcaccacgtgctttagcgtgttccagttcttcaagaaccagacagccgccgccttcacccatgatgaaaccgtcgcggcttgcgctgaacgggcgggatgcagtctccggagagtcattgcgggtagataaagcgtgcatagcgttgaagccacctacaccgcaggctgcgatagctgcttccgaaccaccgctgatgatggcatttgccttacccaagcggatgaggttgaatgcatcggcaatggcattggtagaagtggcgcatgcagaacaagtcgcatagttaggaccatgaaaaccgtacaggatagaaatttgtccggcagcaatatccgaaatcatcttggggatgaagaacggattgaacttaggaccgttttctttatggagggcatagttacctgcttcttcttcaaatgtacggattccaccaataccggcgccgaagatgacaccgatcttgttcaaatcctcattttcgacatcaagaccggaatcttctaccgcttgcttggctacaccaatggcatattgggtatacaagtccatcttgcgtgcctctttgcggtcgatatattgattggcatcaaagtttttcacctcgcatgcgaattgggtcttgaaaagtgatgcgtcgaaatgagtaataggtcctgctccactaaccccattcacgagattttcccagaattcgggtactgtgttgccaatgggagtaatggcgccaagacctgttactacaactctttttaattccatactaagatatgaatggattaagattacttagcgtgttcttcgatgtaagatacagcatcacctacagtaccaatcttctcagcttggtcatcaggaatagagataccgaattctttttcgaattccatgataagttctacagtgtcaagagaatctgctcccaaatcgttagtgaagctagcttcgttagtaacttctgattcttcaacgcctaatttgtcgacgataatcgctttcactcttgatgcaatttcagacataactttaagtttttaattaataattagttttatttctttaaatttgcggtgcaaaggaatgaatatttatcgttcctcgcaaatatttgatgaattaaatgcacctttttgcacatttttcacggttttgtgcaggatttggagggtttatgagtaaaaacattgctattttcgcttccggtaacggaacaaatgcagagaatatcatccgttatttccaaaatagcgaatcggtgaacgtaaagctggttttggctgatagggagactgcctttgttttggaacgtgcacgtagactgaatgttccgtttgcctgtttggacaaggccgcatgggtggatggtacggctgtattgtctttgttggaagataaaggaatagattttattgtccttgccggtttccttgcacgtgtgccggactgtatcttgcatgcttatcctaataaaattataaatattcacccttccttattgcctaaatttggcggtaagggaatgtatggcgggcatgtgcatgaagctgtggtggctgccggtgaaacggaaaccggtattaccatacattatttgaatgagcatttcgatgagggcgaaattatagtgcagtacaaatgccctgtcctgccgcaggatacggcagaagacgtggcaaagaaggtgcatgcgctggaatatgaatattacccgaaagttatcggcggtttgttgtcggaagtttgctgataacctttcgggatattatcttttgcggaaagaagcggcatgctattccggatgattcacaattgtgtatgcttctttctctcttcttaaaggatagtctccccgtaacttctcaaatagttccggatgcgttttgagcgcattgctgtcttgtcggggatcgtacatttgtaaataggcggccgatagggtatctgctgtaatgcgcggttggcttggggcaggaggaataatctgatagtctgcctgtacattgaaataccggcacagggcatccagcgacatgcgggttgcattggctttgccgtctgccgaatagccggcgatgtgcggtgtgccgaggaataccttatccaataaggtgaggtttatggccggttcattttcccagacgtcaatgatagcatccgaaacaagtcctgtttccaaagcgttcagcagtgcaccggtctcgattatttctccgcgtgaagtgttgatgataacaggcttccgctttagcgattggaaaaaggcgtcgtcggcgagatggcaggtcttgtatctgccttccttatataaaggtacgtggaaagtgagtatgtcgcattctttggcgagtgtttgcagggacgaaaagccttgtttcccttctttgtcctcacggggaaggtcgttcagtaaaacgcgcatccccaattcctgtgccacttttgcaactttgctgcctacattgcctactccgataatgccgatagtaacttccggtaaattgatacctttcagcgcttgcagcaaaattaaagatgattgcaggtattgggctacggaggcggaattgcagccgggagcatttgtccatgtaataccggcttcgcggcagtattccgcatcgatatggtcgaagccgatggttgccgtagcgataaacttaaccttgctaccttccagcaattcccggttgcaacgagtgcgtgtacggataataagtgcatccgcatctttcaccaaagagggggtgaagtcttttcccggtgcgtagactacttcatcggctattttttcaatagcttcctttataaaaggtattttatcatcgacaattactttcatgatgcttttgttttattgcaggcaaagttagaaataattcatgagaacagacatttctgatataataatgcatacctttgacagattgtttaaaacataaattgatatactgatgaaaacactgattggctttgaggaaatagaggataagataattactcttcgcgggcagaaggttcttttggacagggatgttgccactttgtatggggtggagacgaaacgtgtgaatgaagcccttagaaataaccttgataaatttcccaaggattattgttttacgttgcaagtatctgaaaaacagtatctggtcgaaaatttcgaccggttctctgtgttgaaacattctacagttgaacctaaagcctttacagagaaaggtctttatatgcttgctaccattctgaaaagttctcgtgctacaaatgcaacgtttgcgattatcgagacttttgccaaactgcgcgaactctcccgtaccttgaacaacctgccggatgcttccgaagagcagcagaaatccttgttggagaaaagcggtgatttattcaccgatttattggacaataatcttcaggcaacagactcggaaacgacgattgaactgaatctcgccgtattgaaagtaaagcatacggtaaaacggaaagcggataaggaataaatgaggaaaactgtttggctgtgtgcaaaatattgtatagttttgtcaacttgtgggaattttgcagcttgttgaacaaagactaattaattatatccaatgaagtgtattcatatcattactcctgtaaaggactccattgaattgacgttgcaaacggtggaagccattgttgcatccgattttcagacgccgtttacctataccgtatataatgacttcagtacagaagagaacacggctaagttacaggatgcatccgaaaagctgggctttgaattggtaaatcttgcggaaataacggatcatccctcaccgaactatctgctggtattgcaaatggcacagcaacgtgccatcgaggcggaggcaggtttgataatcgtggagtcggatgttgtggtaaagaagaatacattgcaggctttgttcaacggagcggcagaacgggcggactgcggtattgccgctgccgtcacagtcgatgagaaaggagtaatcaactatccctatctttttgcgaaaggtaaggaaaaccaggtgtttccggagaaaaagcattgcagtttctgctgttccttgctgacattgaatttcctgaaagcattcgacttccatcagttgaatcctgaaaagaactggcatgatgtaactgtttcgcatcaatctttgaaagaagggtttaagaattacctgtttactacgttgccggtattgcatcagccccatggcagccgtccgtggaaacaattgaaatataagaatccgttgaaatattattggttgaagtatacaaaggggttggataaaatctgatatatttatgaaatctgaaatgagccggaaatccgatatgtttcatccttatacattagttattcacccggactttaaggagttgggagattttatcttgtctttgccggaacgttttgaaaaaaacgaaggtatcgttattcataaaggacgtaatgaattgagaaagatggaatatggcggtcgggagtatgttgttaaatcttttcaccgcccgaatatcattaatcgctttgtgtacggtattttccgtccatccaaagcgaagcgttcttacgatcatgccgaactgtatcttaagataggggtagggactccgcaaccggtaggatatttcaatgtgcgcagcggccttttgttcgataaaagttactatgtgagctgtctgtcaacatgtccgtatgtctataacgacctgttcaggcggaagtttgactatgaagaggaagttttgcgtgagatagggcgggtaactgccgttctccacgaacatggatatgcccataaagattacggacgtgaaaatatcctgtttcagaaaacaccggaaggcattaagctggagattgtcgacttgaaccgtatgtttgtcggaactatcggcatgaaagccggttgcaagaatttcgaacggttgccggctactccgcagatgcatcgctggatggcggaggagtatgcaaaggcccgcggtttcgatgtggagaagtgttttgaactgatggttgcttacagaagtactcagccgggaaagattgataatctttattaaaatcgtcatgaatattatagccgtagttgtcacttataatcggatagaactgttgaagagaacggttcgttgcctgcagcagaataagcctgtttcctcaattgtagttgtcaataacggcagtacggatgctactgccgaatggctgaagacccaatcgggacttaccgttatcaatcaggctaatgtggggggctccggtggtttttacaccggtatgcagtatgcatatcaggcaggtgcggattggatttggtgcatggatgatgatgtttttccgcgtgccgattgtctggaacggttattgcagcatgccggtcgggaagatataggtatacttgctccgcgccgtttgcaggaggggaagcttttcacgcatgagtttcaagggtataacttgacgaatccttttgcttccatgtacaccgggaagctggcgaaacagactgtaacagggcctgtggagatacaaggagcggcttttgagggaccgtttatccggcgtgaggttgttgggaagattggctatcccaataaggatctgtttatcttttgtgatgatacggactattgtctccgtacggtacaggcaggattcagaatactgtatgttcctgatgcgctgatggataaggagaagtttttctcgaatgacagttggagcgaacggagtaagaagaaaaagtggaaacgtttctatcaggtacgtaattccacttatttgagtcatcattatggacgtaattgggcagtaaggtatcttcgcggttttaatggagtggcgggctatattttgacggcgcttgtcacttgtccgtttaccgatgcttaccgatggagtgatatccctaaactgtggaaagcttattgcgacgggatacacgaaaggctggggaagatagactgattgaccggttgtcagaatgccttatcggtcaggagatgggcatagattgtctttttcccgttgcgggtttgcatggcaaatgctttcttgtaagtcagcttgtggaaatggtatttggtataaaacgtttccattgcttttttatcatattcctggtttaagcatttagaaagattactcatgggctgtatcggaatattattcaccattttcgatacggcaggaatatgtttgtatgctaaggcaaagaggtaatcgataaaaagataagttacaatccggttgttgtttttccaataattgtagaaagcatccaggatgaaagaggggagaatattgcctttaccgcaagcaagaaagaaaccggtccatttaccttttaccacgttgcagttattggggatgtggtgatggctgtagtatggcaggctcgtgttgattatcgagtctatatcttttgtgagcaatattgtgctatccagccatatgcctccatgccgttttaataaattcattcttagcaagtcggaaaaatgcgtgattgtcatttctcgtttgtacaatctctgcatgataaagtcgggcattgttgcatattcctgaaaatttttctctgttatcaggattacggggtggttgtctgcatgccggcatatggaggaatagcatacttttactatgtcgggcatcttcttttctccttgccaccagcacacccatattggagatgttgcaccgataggttcttccttttggggtgtttgttccttataatggtcaagaacctcatttgtcttatatctgtaaagtataatgagggtaagcagataatgtttgcctttagatataactttttgatctatttttctcaagaataaccttaattctttcatcgtttcagtagcttgtttagaatattccgaatggctttgctaataagtttcaggcggttccttttttttaaggaacagatataggatgctcccaagatggcgttcttatcccggaatattattttgggagttgggggaaccgtccattcttgtgggcggccatattctgtacttagaattttaatttgcttatccagcagatatttgttcaggtaagattcatcatgccagcgtgctgtgatgtttctttttaagtcggtttccgtcataaggctgcattgctctaacagttcgatataggccttgctctcaccgccgattagcccgccttgataatagtgctcgccgctgttgtatggtatgtatgcttgtgaattttttcttcgctcataatgatattttcgcaatggtttgtttctataggtgtgccattccaaaccggtcaatgcctctttctcggtcggtaaaaattcttcgggggttattatttgcagaaactctgtattgccattgaaaaagaacagataatcaaaatgtttgagttcttctttgtgccttaggaacatttggtagcggaacaggacatttttgggccagcccaaatcttcctggaacgaaacttgtacattagtgctgctttttaacggataatcggtgaatatgaagtatttcttttcatattgaggaagaaacaacgattcgcaactggaatagaacttatcccaaagtcggatatattttccgatacccacataaagaataccaattttcataatttattgtatgctgtcaggttgattaatcggtacttttatccatttgtcgggacagatgtccggtgtttcgcaatgccggaaccaacgttcgggcatgatgacggttttattttcccgcgggttcagccatgctccccaccagctgaacgtactgttacagataatgtggtgacggcagcggctcatcagcatcatatcctgccagctttctgtacctttgttccagtcgataaagaaggcttttggcaacggcaggttttctttcacccaggcaatgtcgtccgagaaaacatagtaggagggctggcttatccgtttgttcatttcggctatggcgttgaggtaataaggcagttggcatacacagccggttgttttccaatatttgggttccaggtaatctccccggcgtacatgtatggaaaccgcattctcatcatggtctatctgttcggacatttcctttgttttcctgttggacaggcgcggattgaatgtaaaagccttgcgtatatcgtctgccatgtcggcaaaaaaacgttccgactgatagaaacccttgaaatataatagaggccagaaatactttttgtcatatggaacaagacttgacgggatttgcttgcgttcatagattttcttgaaaaagagaaattcaataaccttttttaagggttggttgatacggaattctattgggggaagattgaaaacccgatgcatctcatagccgttatgggctttgtagtgcaccatatcggataaatcaatccgggtattgctgtaatgttttttcatccgcatatagaaggcgtagataaacatttgattacccagtccgccggtcatcttaataaatctcatatctctgtttttgaggaaaatgtttttttaacgttcgtttaaaaaacatcttttcaaacgattttaaattgtttctatttgtatatatttataactgtattatatgtgcgtatcctcagattgatacatttttatccgtaaatgcgaaaaaaacgagtcacaatattttttagataggaaataacttttatctttgtgttttttaaacgaacgtttaaaaaacatttcttttgaccataaaacggtattagatgagtgatagtctgttgtataagcttcgtagcggcaagcccccgaaggtattcttttttttaaagggatatttgaagcggtgcatacccgattgctttttcagaatccggagaaagagctgtttggcacaagtggaggcgcggcctgataaggattacatttatgaaagggtgaattattataataagatgcagtatccggtagacctgcccgatacaatattgcatgagcataagcatagctattatgtctatctggacaagataaagaattttcgtccgtctacgtttcacaaggcatattattttgatttgcaggatgtggcccgttggtttgaccgccaactgcgcatcagctatattcccggtgacgtatattttactcccgaatacccttcgattgtaaagagccggttgctgaaggaggacaatgcgtattcggttgtgcttaaactggacaaactgcgtcattttatatttctgaacgatcctgtgcctttttcacaaaaacgcaatcaggctatatttcgcggcaagattcgccttagccgcattcgtgagaagttccttcaaaaatattttggctcatccatttgcgattgcggcgtggtgggcaggaacgaaggttatcctgaggagtggatgactcctaagaaaacaatccgtgagcatcttgattataaatttatcatggcgctcgagggtaacgatgtcgcctccaatctgaaatgggtaatgtcgtccaactccattgccgtaatgacgcgtcctacctgtgaaacctggtttatggaaggaaagctgattcccgattatcactatattgagattaaggatgacctttccgatttggaggagaaactgaactattacatcgctcatccggcagaggcggaacagattgtcgagcatgcccatgaatatgtttcccaatttttcgataccggacgcgaacggctgatttcattgcttgtaatggataaatattttcaggtaaccaaacaaacgtcaaattgttaacaccattgtatgatacatattgcttgtaatattgatgctaattttatacagcactgtgctgttacgctggtttctctgtttgagaataataagcgtgccgatatttgtgtgcatattgtagctccgtacctttcggaagcggatcaggctattctacgcaacctggctgctccttatggcaatgaagtctgcttttactatcctccgaaagatctgttgcaatgcttttccataaaaaagttcggcaagcggatttccatggcaacttattaccgttgcatgttttcatctattctgcccgagagtttggagaaagtactttacctggactgcgatattgtaatattgggagatatttccgaattctggaacacggatttgtccgggtgcggtgcggcttgtgtcgaagatatcggcaaggatgaggatgagcgttacgaacgcttgcactatgataagtcctgctcgtatttcaatgcgggggtgctgctgattaatcttgattactggcggaaacataaggtcgatgtgcagtgtgtgcggtatttcgagacttatccggagcgcatccagtttaatgaccaggatttgctgaatgtcgtcctatgcaaggacaaggtctttgttcctttgaagtggaacatgcaggatggcttttatcgctacggcattgacaaacgggtggccgactggcaggctttccgtgaagaactgctgcatcctgtcattctgcattataccaacaagaaaccctggaattatgacagtatgcatccgttgaggaatgaatactataaatacctggatatgacgccctggaaagggaaacggccgctttcttctgtaaaagagcgtttaaaaaggtacattaagtgcgtgccttatttgttggggcttagaaaacctaaatatgtgaacctcggcaagtagcagcctgcggtccgggacgcattttgtgaagctgtttgataactgattacgtgagatggtaaaagtttctattgtaatacctgtttataatcggaaaaatttcctgactgtatgcataaaaagtttgcttgcacagtcttttgaagatttcgagatatgtctggtcgatgacggaagtacggatggcaccgggcttctgtgcgacgaactggcggaaaaggatactcgcatcagagtattgcatgtgcaaaatggaggagcagcctatgcgcgtcaaaaaggggtggagctggcaacaggagaatgggtagtctttgtcgactctgatgataccatgcctgccgacgctttgcagcgtttgtttcaagcaacgtcggaagatacggatattgtagtcggtttttgcaggaaaaagcgcttgtggggggtaaacaggctttcgccggcttgttaccgtaagcttttaatcaagggcagatacaacatttcggctacatgcggaaagctgttcaggcgcacgttgtttgatgagtacacgctacgtacaccccgggagattgtgatgggagaagacatgcttatgaacctgcggttggcgtttgcatcatccaagccggtacgtctggttggcggaaacagtgtctataactatatacaacatggcgggaatataacgcatgtattcaaacttacggctgattacgagcacatcttccataaggagaggctgttgtccattcccgaagaagaacatgcccgctatatgcctgtaatgatttaccgcaggctgaggatgctgcgccgcattctgcggtgtgcgcaaaaagacaatacggttgaagagctgcggacttctgcttttgtgaaagagctgcttgcagatatccatgctatccgttatacattctggcgttatccgcactggaggctttggcaatttctcgcaagtgcgggtaagtaaggcggaatcataagctctctttttcccacagccttaatgccgctgccaccgtatcgtccatgtctgcatacgtatattgcgccagtctgccgccgaacagcactcgctcctgttgctgtgcaagttcttgatatttcctgaaaatcaggctgttcttttcgtcgtttaccggataataaggctctttcccctgttcaaaatcatcgggatattcataggtgatgacagtagaacgctgtttgccgaactcaaagtgcttgtgttcgatgacacgggtataaggagtttcgcggtcggtatagttcacgactgcattgccttgaaagtcttctatatccgtgaggtgtctgtgttcgaatcgcaggctgcgatattccagatgtccgcatgcataatcgaagtattcgtctatgcagccggtgtagagcaccttctccgccaaagcgtccagctctttgcggtgcgccatgtaatcggttccggtgcgcacctcgatgttctccagcaaggcaccgattaaacggttatatcctcccatgggaatgccctgatacgggtcgttgaagtagttgttgtcgaagataaaccggaacggaatgcgccggatgataaatgccggaagctctgttgccgggcgtccccactgtttctccgtgtatccttttatcagttgccggtagatgtcctctccgcaaagtttcagtgcctgttcttccaggttttgcgggtgggttatatgctcgtattccctgcactgttcctgtatctttgcctgggcctctgccggagtacgtactccccacaattggtagaaagtgttcatgttgaaaggcaggttatacagttttcctttataattggcaatcggagagttggtgtatctgttgaactctacaagccggttcacataattccatacttccctgttgtctgtatgaaagatatgcgcaccgtatttatgcacgttgataccgtctacttcttcgcagtagatattgccgccggtgtgtggacgtttctctatcaccagacatctctttccggctttatgagcctcatgggcaaacacggctccgaacaggccgctgcctacaatcaggtaatcgtatggtttcattcttctttagcgttgtttttatccagctacaaagctacacaattattatcgggattgcagaaaaagtaccggttattgtgccgcgttttgataaaaacagttgtttcacatgcaatcggctggtttttatccgcccggcgcgcaaaaaagaacctgttcgttttattctccccctgctttgtgctatctttgcgcccgatacgaacgtaatgaattaactgtttgaccgaatgaaagaattcttccgactcctgcggcgttttgttccgccttacaagaaatatctgatatgggcattgttcctgaacctgctatcggcaattctgaacatattctctttcgccctgattatccctatccttcagatacttttcaagatggataccaagacctacgagttcattccctgggatgcggcaggaatcaacatgaaagacatagcggtcaacaacttctattattacgtcaccgagatgatagcctcgcagggcggctcattgacattgctgattttaggcgtcttcctggcggtgatgaccctgctgaaagcattctcctatttcgcctcttccgccgtgatgattcctctccgcacgggcgtggtgcgcgacatccgtgcgcaagtatataataaggtgctgcacctgccgctgagtttcttttccgaagaacggaaaggcgatatcatagcccgcatgagcggcgacgttaccgaggtggagacatccgttaccagttcgctggatatgctgataaagaacccgatactgattatagcctatttcggcacattgatagccatcagttggcagctgacgctgttcacgctgctggtgcttccgggcatgggctgggtaatgggcacggtaggcaagaaactgaaacggcagtcgctggatgcgcaggcaaagtggagcgataccatgtcgcagttggaagaaaccctgggcgggttgcgtatcattaaagccttcattgccgaaaacaagatgatggagcgtttcaataagtgcagcaacgaataccgcgatgctatcaaccgggtagccacccgccaggcattggcgcatcccatgagcgagtttctgggtacatgcgtcatcgttatcgtgctgtggttcggcggcacgttgattctgagcaacagcgctactatagacgccccctcgttcatttactacttggtgatactgtacagcgttatcaacccgttgaaggaattctccaaagccggatacaacattcccaaaggacttgcctccatggagcgtatcgacaagatactctttgcggagaatcccattaaagaacctgccttgccgaaaccgctttcttcgctcaatgacaaggtggaattcaaggacatcagcttcagctacgacggttcccgccaggtattgaagcatatcaacctgaccgtgcccaaaggcaagactatcgcactggtagggcaatccggttccggaaaatccacattggtggatttgctgccccgctaccacgatgtacaatcgggcaagatactgatagacggtcttgatatcaaggatgcgcgtatcgccgatttgcgcggcctgataggaaacgtcaatcaggaagccattctctttaatgacactttcttcaataacattgctttcggtgtagagaatgccaccatggagcaggttgtggaagctgccaagatagccaatgcccacgatttcattatggacaccgagaaaggttacgataccaatatcggcgaccgtggcggcaagctttccggcggacaacgccagcgtatcagcattgcccgcgccattctcaagaatcctcccatactgattctggatgaggccacctccgcactcgatacggagtcggaacgtctggtgcaggaagctttggagcggttgatgaaaacccgcaccacgattgccattgcgcaccgtctttccacaatcaggaatgcggatgaaatctgcgtgctctacgagggcgaaatcgtagaacgcggcaggcacgaggagcttcttgccaaagacggctactataaaaagctgaatgatatgcaatctttgggataataccccctctgtgttgtttttcgttttttctcgtcactcatcacctgtagcgctctatccctttctcggaaagggatagaggaactgttgacaacggtgacgagcgtgatgacaaattgttggtcgtcactttctgtcgtcatttttacccttcttttctgttgtaaaatgcttatatacagctataaaatgcgtgtggtgcagaatgtgttaacagcggttaaaatcctctgttttcaggggcggagcatcccaatctctgcgttttaatgcgactgttgcccgttggttttgtcgttttggcgcatgtataatataggaaagcctgatgcaaaacctcgttttccaactgcgggctccccggttgccggctgcgggccgtacggttgccgtatgcgggctgtcgggcccgcaattgcgggacgaagtttcagtagaaggataaggctgtttctgtagtggcataacgacattatcccccgtgtatgcgagggtcttgtcatggggatatgggtgttccgccctgctattttcttccgaagtccgcgggtatttctccccattgcctggtttcccatttcaggataggggtggagtaggtgttttcacgcagccatttctcggcgcgctctatcagcaggaaaagttgttcggttctggagtcgcggggtagcttggtcttgcatttcttctgtttcacccaaccgatggcattgacgctgtcgctgtagataggcatgtcgaagcccttttgcttcagcagggcaaggccgtgcacgatggcaagaaactctccgatgttgttggtgccgtacacgggaccgtagtggaaaacctgctggcggctggcaacgtgtaccccacggtactccattgctccgggatttccgctgcatgcggcatctacggcaaggctgttttcgagtacagcggcggggtagggagcgtctgcattttgagacggcttggatggcgtgctgcctgcggatgtattgcgcttgatgtaatcgtagggtgaagcggcaaaggcctgctctgcttcctcgcgggtgtcgaacgatttgaactttgccccctcatagcctttggtctgtagctggcattcggtccaggatgtataaatgcccggagtgacgcctgcccatacaacgtagaatttctcttttttcataactgcggcaaaggtacgaatatatttcacaaatgcgaacaatcggctccgttcgcttgttcttttaaattgagaagaagtgggaagtaaaaaaagagtatcggtccaattccttgagtttgtaattttatataactcatttattcttaataagaacagacaataaaataaaaagatatgaagagaacatttgcagaagcgttggaacaccggcgcagttattattccataggtagcgactctcctgttttggatgaggaagtggtgcatattatccgtacggcggtgaagaacgtgccgtcggcctttaattcgcagtcaacaagaatcgtcctgctgctgggcgacgagcataagaaactatgggatattgtaaaaaatacgttgaagcagcgcatttcgcctgaggcttttgcaaagacggaagccaagattgacggctgctttgctgccgggcatggcactgtgctttattttgaggacacaacggttgtaaagaaattgcaggatgcgttcccctcttacagcgaaaacttcccgacttggtcgcagcatacatcggccatgcatcaactggctgtctggaccatgctggaagacgcaggtttgggagcttccttgcagcattacaacccgctgattgacgacgaggtgcgacgtacctggaacttgccggagagctggatgctgatagccgaaatgccttttggcacgcccactgccgaacccggcgaaaaggagttcggggagttgagcgagcggattaaaattttccgctgattgtgaggtagtctcactgtagaattgcttatctttgtacacaaacggtaagcaactatgatacgtatctttctgaccggttacatgggagccggtaaaacaactttgggaaaggcttttgcccgcgaactgaatgtacctttcattgatttggactggtacatcgaggaacgttttcacaaatccatccgtgaactgttcgtcgagcggggagaggcctcttttcgtgaattggagcggaatatgctgcacgaggtgtccgagtttgaggatgtcattatctcgaccggcggcggcacgccctgtttcttcgacaatatggactacatgaacggacacgggcaaaccgtgttcctggatgtacatcttgatatactgttcaaccgtttgcgggtggcaacccatcagcgccccatcctgcagggaaaaacggacgaggagctgcgcgcctttattgcggacgcattggagaaacgcgcccctttctacgtgcaagcccgctaccgtttcgatgcaggacatctggaaagcagacggcagattgccgggtccgtgcagcagttgcgtagcctgctgggcatttaatctcttgtaaatgtgtgtttttcgccctaaaaggcaagatgttccagatttatatgtatttttgtaccccttttttataaataaactactaaaacagcagagtaacaagaaatgagaaaatggcgtattgaagattcggaagagctgtacaacattacaggttggggcacttcgtactttggtatcaatgacaaaggtcatgttgtagtaacaccgcgtaaagacggcgtcggcgtcgatttgaaagacctggtcgacgaattgcaactgcgtgacgtgacggcgcccatgctggtgcgctttcccgacattcttgacaaccggattgagaagatttcctgttgtttcagacaagcggcggaagagtacggctacaaggcggagaattttattatctatcccattaaggtgaatcagatgcgtccggtggtcgaggagattatcagccacggcaagaaattcaatctcggactggaagcaggctccaaacccgaactgcatgcggtgattgccatcaatatggactccgactcgctgattatctgcaacggatacaaggatgagagttacatagagcttgctttgctggcgcagaagatgggaaaacgcatctttctcgtagtagagaaaatgaatgagctgaagctgatagccaaaatggcgaaacagttgaatgtaaagcccaatatcggcatacgtatcaagctggcttcgtcgggaagcggcaagtgggaagattcgggcggcgatgcaagcaagttcggactgtcgtccagcgaattgctcgaagcgctcgacttcatggcaggcaaaggtatgcaggattgcctgaaactgatacatttccacatcggaagccaggtaacgaaaatacgtcgcatcaaaaccgctctgcgtgaagcgtcgcagttctatgtgcagttgcacaacatgggattcaacgtggaattcgtggacatcggcggcggcctgggagtggattatgacggaacgcgctcgtccaacagcgagggcagcgtaaactattccatccaggagtatgtgaacgactccatttctactctggtggatgccagcgacaagaacggcattccccatcccaatatcattacggagagcggacgcgctttgacggcgcatcattccgtacttatattcgaggtgctggaaaccaccaatctgcccgaatgggacgacgatgaagaggtgaccgaaaacgaccacgaactcttgcgggagctttacggcatttgggatacactgaaccagaacaggatgctggaagcctggcacgatgcgcagcagatacgcgaagaggcgctcgatttgttcagccacggcatcgtggacctgcagacccgcgccaagattgagcggctgtattggtctatcatgcgcgaagtgaaccagatagccggcggactgaagcatgcgcccgatgaattccgcggtctccccaaactgctggcggataagtatttctgtaacttctcgctcttccagtccctgccggactcctgggcgatagaccagatattccccatcatgcctatccagcgtctggacgaacggccggaccggacggctaccctgcaggacattacctgcgattcggacggtaagattgccaactttatctctaccaagaacgtgtcccattacttgccggtacattccttgaagagtaaggaaccctattatgtgggtgtgttcctggtgggcgcctatcaggaaattctcggcgatatgcacaatctgttcggcgatacgaatgcggtgcacgtatccgtgagcgataaggggtatacgatagagcaggttatcgacggtgagacggtggcggaagtgctggattacgtgcagtacagtccgaagaagctggtgcgtactttggagacctgggtgagccagtcggtaaaggaaggacgcatctccctggaagaaggcaaggaatttttgtctaattaccgttccggtttgtacggatacacatatttggaataatgagagagaaactgactgtaatcaaggtgggtggcaaaatcgtggaagaggaagccaccctctgcaagttgttggatgactttgccgccatcgaaggatataaagtcctggtgcacggcggcggacgttcggcaacgaaaatcgcagccctgttgggtattgaaagcaaaatggtgaatggacgccgcatcaccgatgccgagactttgaaggtggtgacaatggtgtatggcggattggtgaacaagaacatagtggccggtttgcaggcacgaggcgtgaatgcgctcggcctgacgggtgcggacatggacgtgatccgttccgcaaagcgtccggtaaaggaggtggactatggtttcgtgggcgatgtgaagcaggtgaacggagcgtttctgagcgaactcatccataaaggtgttgttccggtaatggccccgctgacacacgacggcgagggacacatgctgaatacgaatgccgatacgattgccggagaaacggccaaagccttgtccggacagtttgacgtgacgctggtatattgcttcgagaaaaaaggcgtgttgcgcgacgagaatgacgacgacagcgtgatttcccggattaccccggaagaatttaagcagtatgttgccgaaggggttatccagggcggcatgattcccaagctggagaattctttcgaggctttgaatgccggggtcacggaagttgtaatcaccttagcctcagctataaacagtgacggcggaacccgtatcaaaaaataaatcaaaaaaaagtggtggcagactgtaactttccgtttgctgaaccgtcaattaattagagatgcaggaaatcagttttcgtaatgacattctccctctgaaagacaagctctttcggttggccctgaggattacatccgaccgggcggaagcggaagatgttgtgcaggaaacactgattagggtatggaacaagcgcgacgagtggacgcagttcggttctgtcgaagcctattgcctgacagtggcaaggaatctggcgatagaccgcagcgaaaggaaagacgcccgagcggtggaacttacccccgatatggaagaggcttccgaagcatcgggcccttacgaaaggctggtgaataaagaacgaatggctctgatacaccgcctgataaacgaacttcccgaaaagcagcggttgattatgcagctgagggatatggaaggtaagagctacaaggagattgcggttgtcctgagtctgacagaggaacaggtgaaagtgaacctcttcagggcaaggcaaaaggttaaacaacggtttattgatatagaaggttatggactttaaatatatagaacaacttttagaacgttattggcagtgtgagacttctcttgaggaagaagcgcagttgcgtactttctttacagaagaggacgttcccgaacacttgtcgcgttataaggatttgtttgtatatcagcaacttcagcaggaagagcatctgggtgcggatttcgatgcacgggtgcttgccgagattgaagctccggttgtgaaggccaggcgcatgacattgacggcgcgcttcatgccgttgtttaaagccgcagccgcagtggcagtggtgctttcattgggcaatgtgatgcaacattcgttctttgccgatgtaagagaggtggctgccgccgatactatcggcaaacaaatttccgctccgtcggtcgccctttcgggggatagggccgcaacgcacgagaagcagatattggatagcctgcatcgtgtaagcaaggagaaggaaaacagacagtagatattttcatttgcttttaaaataacattttcatttgctttaaatataatatagttagtgtgcttttattaaaacaaaaacagaggctgtgaagtttcaattctctcaaaattttatagaaactaactaagataaatgggacgccgcgtgatgcagcgtcccttttattgttgttggggggcggaaagttgccccctccctctgcagtgtatgtagaatcaaagcttgtataatcccttcttggggaagtccagttccgggttgcccttataaccgatgtttccgctgccgctggtacgtgctttcaggaagtcggtggcatggcatttgatgtctcccgaaccggatacgcttgccgaaacgcgttttgcctgcagaccggatgcaaacaggtcgcccgaacccgctacacggtaatcggcttcctgggaagttcccgtcaatattgccgtgcccgatcctgagacggaggcttcggtgccggcggccgatacgttgtcaagcttcaaatctccggaaccggctatggatgccgtgagattggcgcaagtgatgttgctgccttctatgtcgcccgaccctgccacggatacgttaagattgccggtgcaggttatgttgtccgcgtcgatgtctcccgaacctgctacggatactttcaggtggtctgttttcagtccgttggctaactctacattaccggagccggcaacggagatgttgttgagtgtctcggaggagacgcgtatctccagcttgttgtaagatacgctgacacctttcttgaacttgatattcaaggtgttgttaactacattgatgtccagaaggtctacgatattgtcggaagtatacacttccacttcgggttttcccgccttttgggtgtaagtaacattcgggctgcctgccaggttcagaccggtgaagttgtctactttgatattcttggttacatagttcctgctggctttgactgtttttccgccaaacagaccggagttgcacgtgcaggctgttgcacttaatgcgaagatgcctgatacgatgattgctgttaatgttttcatgttcaatgtattttaagtgttcttgtttgttagacgtagtcttctctcaaaaagttgcagggaattatgactttttaccgggaacttcttgctgccggttcttattcaaatcccatgccataagcataaatctttgtttattaggatgtaacggaggaaatgcggtgtccgcttttgaacacattgttcgtttttggtagacaagcgtttgctttttcggacgattcttcgttcttttgtccttatttcaagagaaaagaacagatggcaacggagcatgttttagaggataaggagttgggacgtttgctggtacgggtgaatgtccgtgcccggcgtctgacctttcgtacgcgtgaggatgccatttatgtaactgttccgccgggcacaaccatcggagaagtaaagaatgctgtggagcaactgcgtccccggttgaaggccgcccgacagcagcaaagccgtccgctgattgatttggactatcggattgatacggaattcttcaagttgagtttggttggcggagaacgcgaccgcttcttttcgcgctcggaactgggggaaatgcagattatctgtccgccggatgcagacttctcaaataaagaattgcaggcttggctgcgtaaagtgattgaggaagccttgcggcgtaatgccaagattattcttccgcctcggctttatgcactctcgttgcagcataatctttcttataagagtgtgaaaataaattccagcagcgggcgttggggaagttgttccgctcgtggaaacatcaatctgtcctatttccttgttctattgcccaaacacttgatagactatgtgctgctgcacgagttggcacatacccgtgaaatgaatcatggcgagcgcttttgggcgttgcttgatggcatgacggatggcaaggcgcaactgctgcgcagcgagctgagaaagtataggacagacttctgaagcaggccgattatagtgggagaggcacggaaacggactactgtgccaacagcttcacttcatcgccgtctttttcaaaacgatagttaccgcctttttcgctcaactcaaacagagaaagtctgtcggttgccttgtccactatcatcagtgcgctttgctcggcaaaccgttttacctcgatattgaaaggctcttcaccgatgcgccggtctgccagcacgctgtcattgagaagaatggagatggaatcgccggcaaagcctttcaccaaagtgatgttgtaggtttcggcaaagtggcgttcgccctctttctgccgttgcaggcgcatgctcatgtagacgaagataacgacaacgaatattacggcaaaagcaaggatgccgttgcctatcataaactgtttgttggtattcaggtgatgtgccatgacgattgagtttaaagaaccctgcaaatgtagtgattaattttgaatggaagataaattcgggcaggagtgctaaatattctttttttctcctattattttgtagtcgaacagattatttatatctttgcaaccgaaacggatgaaaggtggaggggcgattgagctcctcttttttgttcctaatggttaatctatgatagaaaagaaaacagtttgtcagattgtagacgagtggctggaagataaggagtacttcctggtggaagtcataatcagcccggatgacaagattgtggtggagatagaccacaaagaaggtgtttggattgaggattgtgtagaactgagccgctacatagagtcccggttgaatcgtgaggatgaggattacgaactggaagtcggttctgccggtatcggacaaccgtttaaagtgctgcaacagtacgtcaaccacatcggcaaggaagtggaagtattggcaaaagacggccgcaagcattgcggagtgttgaaagatgccgacgagcggcagtttaccgtcactgttcagaagaaagtgaaagaggagggagccaagcgtcctaaaatggtggatgaggacctgacctttacatacgaagagataaaatatactaaatacttaattagttttaaataagactatggccaagaaagaagaaactatcagcttgatagataccttttcggaatttaaagaactgaagaatattgatagaaccaccatggtgagcgtgctcgaagagtcgttccgcagtgtgattgcaaagatgttcggaaccgatgagaattacgacgtgattgtgaacccggataagggtgacttcgaaatatggcgtaatcgtgaagttgtggcggatgaggaccttgaaaacccgaacctgcagatttctttgagcgaagcccggaagattgacgtttcgtacgaggtgggagaggaagtgacggatgaggtgaactttgcgaagttcggccgccgtgctattctgaacttgcgccagacattggcttccaagattttggaactggaaaaagacagtatttacaataaatacattgataaggtgggtactattatcaatgcagaggtttaccagatttggaaaaaggaaatgttgctgctcgatgacgaaggcaatgaactgctgttgcccaagaccgaacagattccgagcgacttctaccgtaagggtgagactgcccgcgccgtggtagcccgcgtcgacaacaagaacaataatccgaagattatcctgagtcgtacgtcgcccgttttcctgcaacgtctgttcgagatggaagtacccgaaatcaatgacggactgattactatcaagaagattgcccgtattcccggtgagcgtgccaagattgccgttgagtcatacgatgaccgtatcgacccggtaggcgcctgcgtcggtgtgaagggtagccgtattcatggtattgtccgcgagcttcgcaacgagaatatcgatgttatcaactatacgtcgaatatccagttgtttatacagcgcgccctcagccccgccaagatatcttccatccgtctgaacgaggaagagcacaaggcggaagtcttcctgaaaccggaagaggtgtcgctggctatcggtaaaggcggtttgaatatcaagctggccagtatgttgactgagtacaccattgacgtattccgcgaattggatgaagcggtagaggatgaagatatctacttggatgaattccgcgatgagattgacggttgggtaatcgatgccatcaaggctatcggtattgataccgccaaggctgtgttgaatgcaccgcgcgagatgttgattgagaagactgacctggaagaggaaacggtggacgaagtattacgcattttgaaatcggagtttgaagaaggggaaaattagtgattagtgattaggggttagtgataagtgatttttggtatgtataataaaatcatcactaaacactaatcgctaacccctaatcgctaatcactaaccaccacttctttctccattattcattaaattaaagtatgacgataaggttaaataaagtaacaagagatttaaatgtaggaatcacgacggtagttgagttcttgcaaaagaagggatatgccattgaagcaaatcccaatacgaagattaccgacgagcagtacgacttgcttgtgaaagagtttagtacagataaggatcttaaattgaaaacggagcgtttcattcaggaacgtcagagtaaggaacgcaacaaggcatcggtggctattgacggttatgacaaggaagcacaggaaaagccgaaaaccgaagaggtggtaaaggctgtggttcccgaagatgtacgtccgaagtttaagcctgtcgggaagattgatttggataaactgaatcgcaaacatactgtggaaaaagaggaagaagcggtggaaccggagatgccggtggttgaagaagtaaaggcggaagaacctgcacctgttgttgaggctccgaaaccggaacccgttcccgaacctcagcccgagccgacacctgctccggtggttgaacctgctccggcggcagaagaagaaaaaactgcgccggtggctgcagaacccgtaccggtttctaacgcggagcctgctcccgctgcaaccgaagaagctgtttcggaaaataaagaagaaaaagaagaaatattcaaaatacatcagcctgagtttgtatcgaagattaacgtcatcggacaaatagacctcgctgcgctgaatcagtctacacgtccgaagaagaaatcgaaagaggaaaagcggaaggagcgtgaagaaaaagaaaagcagcgccaggatcagaagaagctgatgaaagaagccattatcaaggagattcgtcgtgacgataataagacgaaagatggcaacgatgccaacggcaagaaaaaacgcgtccgcattaacaaggaaaaggtggatatcaacaatgcatccaacttccagcgtggcggaaacgatcgtctgaaaggcggccagcaagggggtaataaccaacaagccggtaagaacaagaataaagaccgcttcaagaaacctgtaatcaagcaggaagtaagtgaagaagatgtggcaaagcaggtaaaggaaactttggcacgcctcacttccaaaggcaagaataagggtgcgaaataccgtaaggagaaacgtgacatggcatccagccgtatgcaggagctggaagaccaggaaatggcggaaagcaagatattgaagctgaccgagttcgtgactgccaatgagctggcgagcatgatggatatttccgttacgcaggttatcgctacctgtatgagcatcggcatgatggtttccattaaccagcgtctggatgcggaaacaatcaatctggtagcggaagaattcggtttcaagacagaatatgtaagtgcggaagtggcccaggcaatcgttgaggaagaggatgccgaggaagatttagagcctcgcgctccgattgtaacggtgatgggtcacgtagaccacggtaagacctcgttgctcgactatatccgtaaggcaaatgttattgccggtgaggcgggtggtatcacgcagcatatcggtgcttaccacgtgacattggaagacggacgcaagattacgttcctcgatactccgggtcacgaagcgtttaccgccatgcgtgcccgcggtgccaaggcaacggatatcgccatcatcattgtggctgccgatgacaacgtgatgccgcagaccaaagaagccatcaaccatgccatggctgccggtgtgcctatcgtatttgctatcaataagattgacaagccgaccgctaatcccgataagattaaggaagaactggctgccatgaacttcctcgttgaggaatggggcggtaagtaccagtctcaggatatttcagccaagaaaggtattggcgtaagcgatttgatggagaaagtattgctggaagccgaaatgctggatttgaaggcaaacccgaatcgccgtgctaccggttccatcatcgagtcctcattggataagggtcgtggctatgtggctacggtgctggtatccaacggtactttgaagatgggtgacattgtgctcgcaggtacaagttacggtaaggtgaaagccatgttcaacgaacgtaaccagcgcatgaaagaggcaggtccttcggaaccggctttgattctcggcctgaacggtgcgccggctgcaggcgatacattccatgtaatcgagactgaacaggaagcacgtgaaattgccaacaagcgcgaacagttacagcgtgagcaaggtctgcgtacacagaagatgctgacgttggatgaagtgggccgccgtttggcattgggcgacttccacgaactgaatatcatcgtgaaaggtgacgtggatggctccgttgaagcgttgagcgactcgttgattaagctgtctaccgagcaggtacaggtaaacgttattcacaaaggcgtcggcgctatctccgaatcggatgtatctctggctgccgcttcggatgcgattatcgtaggattccaggttcgtccttcgggtgctgccgccaaactggcagagcaggaaggtgtggacatccgcaagtactctgtcatctacgatgccattgaagaggtgaaggctgccatggaaggtatgctggcgccgactttgaaagaacaggtgacggccactatcgaggtgcgcgaggtattcaacattaccaaagtgggtcttgtggcaggtgccatggtgaagaccggaaaggtgaaacgcagcgacaaggcccgtctgattcgcgacggcattgttatcttcacaggaaatatcaatgcattgaagcgcttcaaggacgatgtgaaggaagttggaacaaacttcgaatgcggtatcagcctgacaaactgcaacgacatcaaggtaggagacatcatcgaatcttacgaagaagtggaggtaaagcagactctgtaagcaatatataaaatcttcaggcgcggattacacggatttcacggattggttaagaaaaaccgtgtttgtccgcgtaatccgcgcctttttaatatagttatggctgttgtagatagtataatcttggtaataatcggtgccggagcgcttgtaggttttataaaaggttttgtaaagcagttggctaccttgttgggactggttgccggtctggtggcggcaaaggctttgtatgcttccgttgccgagaaagtgttttccaggattaccgattcaatgacagtggcgcaggtgctggcattcattgctatctgggtagcggtgcctctggcttttgcgttgatagcttcgctgctgacgaaggcgatggaagccgtgtcgctcggttggctgaaccgttggctgggttccgggctgggagcgctgaaagcacttctgctggtgagtttgctggtgggcgttatcgaatttatagattcggacaatacgctgctcagtcaaacaaaaaagaaagaatcggtgttatattatcccatgaagtcatttgccggaatattctttcctgcagcaaaggctgttacggaacagattgtgaatggagatgtggtttgattcgtaacttgtaattttataattatagaaacaatgcaacaagaagaacccaataaatatgtaaaggaactcactcaggagaagtacaagtacggttttacgaccgacgtgcacacagacatcatcgagcgtggtttgaatgaagatgtggtgcggctgatttccgagaaaaaaggagaacccgagtggttgctggagttccgcctgaaagcgtaccgccattggctgacgctggagatgcctgcatgggcgcatctccgtattcctgaaatagactatcaggctatctcatactatgccgaccctaccaagaagaaggaaggacccaagagcatggacgaggtagacccggagctggtcaagacattcaataaactgggcattcctctggaagagcagatggcacttagcggtatggcggtggatgccgtgatggactctgtatccgtaaagactacctttaaggagacgcttatggagaaaggcatcatcttctgttcgttcagcgaagcagtgcgcgaacatcctgatttggtacagaagtacttgggctcggtggtgggctatcgcgacaacttctttgctgcactgaactctgcggtgttctccgacggttctttcgtctatatcccgaaaggggtacgttgtccgatggagttgtccacttacttccgtatcaatgcccgcaataccggacagtttgaaagaacgttgattgtggcggatgatgattcgtacgtttcctacctggagggatgtacggcgccgatgcgtgacgaaaaccaactgcatgccgccattgtggagattgtggtgcacgaccgtgcggaagtgaagtacagcactgtccagaactggtatccgggtgatgccgaaggcaaaggcggcgtgtataatttcgtaacgaaacgcggacactgcaaaggggtaaatagcaaactgtcctggacgcaggtggaaaccggttcggccattacctggaaatatccgtcctgcatcctttcgggcgataactctacggcagagttttacagcgtggcggtaaccaataattaccagcaggcagataccggtacgaagatgattcatctcggaaagaatacccgcagcactatcgtcagcaagggtatctccgccggacggagcgaaaactcttatcgcggtctggtgcgcgttgcccaaaaagcggacaatgcccgcaactatagccagtgcgactccttgctgctgggcgataagtgcggtgcgcatacgttcccttacatggatatccataacgagacggccattgtagagcacgaggcaaccaccagcaagattagcgaagaccagatattctattgcaaccagcgcggtatctctacggaagatgctgtaggactgattgtgaacggttatgcaaaggaggtactcaacaagctgcctatggagtttgccgtagaggctcagaaattgttagctatttcactcgagggaagcgtaggatagctattggaattcaaaattcaaaattaaatatcatgttagagataaaagacctgcacgccagcatcaatggcaaagagatattgaaaggcatcaacctcacgatccgcgacggtgaggtgcatgccctgatgggacagaacggagccggaaagagtacactgagcaatgtgctggtgggacatcctgcatacgaggtgacacgcggtacggtaactttcaacggtaaggaccttttggctatgagtcctgaagaccgcgctcatgaaggtgttttcctttcgttccagacaccggtggagataccgggagtttcgatggtgaactttatgcgtgccgctgtcaacgaacagcgtaaataccgtcatctgcccgccctgtctgccagcgaattcttgaaactgatgcgcgagaaacgcgccattgtcgaactggacaacaaacttgccaaccgtagcgtgaacgaaggcttcagcggcggtgagaagaaacgtaacgaaatcttccagatggctatgctggaacctactttcgccattctcgacgaaacggattccgggcttgatgtagatgctttgcgcattgtagccgatggcttcaacaaactgaagactccccagaccagcgcaatggtcatcacccactaccaacgcctgctggactatctgaaaccggataccgtccatgtactgcttggcggacgcatcgtgaagacgggcggtcccgaactggctaaggagattgaagcacgcggcttcgattggattaagaaagaagcgagtgaattataaattatggattatgaattatgaattatcctgcagcatgatgatgcgcagcccgttcataattataattcaaaactcataatcagataacatgagtgtagagcaacaatatatagaccttttctcccagacggaggcgatgatatgccgccatagcgccgaagcgctgaatgctccgcgtgccgctgcatttgccgacttcgagcggcttggctttcctacccgtaagacggagaaatataaatataccgatgtcagcaagttctttgaacccgattacggactgaacctgaaccggttggagattccggttaatccctacgaagtattcaagtgcgatgtgccgaatatgagcacctccctttactttgttgtgaatgatgctttctataacaaagctttgccgaagtcgcatttgcctgagggcgttatcttcggtagcctcaaggaaatggcggaacagcgtccggagctggtgaagaagtactacggtaagctggcagatacttccaaagatggagtgacggctttcaatacagcctttgcgcaggacggcgtattgctgtatgttcccaagaacgtggtggtggagaaacctatccagttggtgaacattctgcgcggcgatgtcaactttatggtgaaccgccgtgtgcttatcattttggaagagggtgcgcaagcccgtcttctggtatgcgaccacgccatggacagtgtgaatttccttgctacgcaagtggtagaggtattcgttggggagaacgccactttcgacttctatgaactggaggagacgcataccagtacggtacgcatcagcagtttgtatgtcagacaagaagctaacagcaacgttttgctgaacggaatgactttgcataacggtactacccgcaacacaaccgaagttacgcttgccggcgaaggtgctgaactgaacctttgcgggatggctgttgcggataagaaccagcatgtggacaacaataccaccatagaccatgcagtgcccaactgtaccagcaacgaactctttaagtatgtgctcgacgaccagtctgtcggtgcttttgcaggcctggtactggtacgtccgggtgcgcagcatacgagttcccagcaaacgaaccgtaatctttgcgccactcgcgaagcgcatatgtatacccagccgcaactggagatttatgccgatgatgtgaagtgcagtcatggtgctacggtaggccagctcgatgaaagcgccctgttctatatgcagcagcgcggcatctccgtgcatgaggcacgtttgctgctgatgttcgcttttgtaaacgaggtgattgacacaatccgtctggatgccttgaaagaccgtctgcacctgctggtggaaaaacgtttccgcggtgaactgaacaaatgccgcgggtgtgcaatatgtaaataatggagaattatgaatgaagaattgccatgcgggtactgatgctgcgcagcttattcttcattcataattcataatttaaaagatatggaccttcaaaagataagagctgattttccgatactttcccgtgaggtatatggtaagccgttggtttactttgataacggtgcgactacgcagaaaccccgtcaggtggtggatgccattacggatgagtactattcggtcaatgccaatgtgcatcgcggtgtgcatttcctttcgcagcaggctacggagttgcacgaggcatctcgcgagacggtacggaagttcatccatgccggcagtacgaatgaaatcatctttacccgcggcacgacggaaagtatcaatctgtttgtgtccagcttcggtgaagagtttatgcaggagggggatgaggtgattctctccgtcatggaacatcacagtaacatcgttccctggcaattgctggctgccaaaagagggattgccattaaagttatcccgatgaatgacagaggcgaacttttgttggacgagtacaaacagttgttttccgaacgtacgaagattgtcagcgtagcccatgtatccaatgtgctgggtacggtgaatcccgtaaaggagatgatacgctatgcccacgggcaaggcgttcccgtgcttgtggacggagcccagtccattccgcatatgccggtggatgtgcaggatttggatgcggatttctacgttttttccggtcacaaggtgtacggccctaccggtgtgggtgtgttttacggtaaagaggaatggctcgataagatgcccccctaccagggtggcggcgaaatgatacagcacgtatcgttcgaacggactactttcaatgaacttcctttcaagttcgaggcgggaacacccgattatatcggtacgacagggcttgccaaagcgttggattacgtttctgccatcggcatggagaagattgccgcccatgaacatgaactgactacatatgccatgacacgtttgaaagagattcccggtatgcgcatcttcggtgaggccgaagagaaagggagtgttatctctttcctcgtagacgatattcaccatttcgatatgggcactttgctcgaccgtttgggcattgccgtacgtacggggcatcactgcgcacaaccgttgatgcagcgtctcggcattgaaggaacggtgcgtgcttcatttggcctgtataacacgaaagaagagataaatgtattggtagcgggtatagagcgtgtgagccgtatgttttgatgcttgccggatgaaattgcgtatttaattttttttttt

SEQ ID NO: 4071 - DNA, 1460 bp, Unknown
  gut microbiota DNA sequence
cttgcaactggcattccgctggaagtaacctggattccggaagactgggactccattgccgcactgacaagacaaagcggcatgatgttcagggaggccgccctagacctgatagggagtgtagacatggataaagggcgggaacgaatgctgatgaaacttgccgacggaaagccctacagatacctggcggaaaagatatttcccgaagttatgcgggtcgactacaggatagagtacacccgccagcagccggatgcggcggagagcctgaggatgtcccgtactggagaacgtcagacactgcgcctgaacgagctctttgcggtagcgggcagttacccgaaaggatctacggaatacaacgatgtactcgacctcacagcccgcctgtttcccgacagccccgaagccaatatcaatgcagcggccgtggcactcaccaaaggggaaacggccaaagcgcggcgctatctggagagattcgcaaccatgccaatcgcatacaacaacatgggcatactctgcctacaggaaggaaaacgggacaaggcggaagtatatcttaccatggcagcggcagccggcatagagcaggctgacagggtgctgaaagagttgaaaaacaaataggaaagcaaaatgaccgggaacaccaaaagtatattaacctataaaacaggcatacatgaaaacaaacagctatttatggagcatgctggcagcagcaacctttacactagccggatgcggcagtgaagaaaacggaataacggaacccatgccgcagggaaagacggcacaactcgaactgcgcctgacgggaagcggagtgagcaccaaggcaaccggaagcgcattacctacacaaaacgaagagaatacggtgaagcgtttcaccgtcgccatcttcaacagtgacgaatcggtgaatgccatacagaccgtaaccaataacaccactccggcaacaaccatcaactgtactccggcaacgagctgtacgggcatcgtggtagccaacgcccctacagacggttatttttcaggcgtcctgaacaagaccgacttcctgaagagaacaattgaactgggtgatgcccagaccaaggattgtctgcccatgagcggagacgtaaaaaacggtgatggcaacgccaccttcacactgggcgcaggcatcaacaccggtatgacagcccggctgagcaggctcgttgcaagagtgtccgtaagcggcatcagaaccgaatttgaccccaacggacagtactcggcggcatcctacgaactgaaaaacatctttgtgcggaatgccgtgaaagaagctgtaccgggcacgggaggatacagcaccaccaaaatgagcacaccggattatctgaccggaaactacaccggctccagcggaactgtagcttatctggcaaattcggtcactcccccggtaagcgtaggta

SEQ ID NO: 4072 - DNA, 44318 bp, Unknown
  gut microbiota DNA sequence
tgaatattttaaacttatagtaattttgtaaccagttatggatggagctcttttcaattagaatacggcgcacttttcaattagtatctacaataatcccttcatagaacgcctctctatttattcttatatttttatttccataacccggtaaacaggaagaaacaatcaatgttgtttcagccattccatatgaagggcggaatgcatttcgattaaacccaagttgaaaaaggggggataatcggacgtataaattagatggaaccatttctgctccaattgaaagagtcttcacttgagataaatccaattcttttatgtcattagattgttctaacttttgaattaacaaatccaatcctgaaggtgtcgtaccgccacaaatacttacttgatattcggaaattttctttagaaaaatcaaaggatctcttaaaaaggaaaaaggctctatttttatttctgtaatttggttatacaaacaaaccaaatgatttccaaatagaccataatcatgaaaatatggcatccagtgaatcaaagtatcttcagttgtaatttcatccgcaagagtttttattttcaaattagttaaaatattgttaaaactaagcatgactcctttgggtgcccctgtacttcctgatgaaaactgaataacacataaatctttactatctcttttaggtatgtgtaaagaataatcttgcaacaaatccaattgtttcataatatcttcaacacacacagctttatgaaatgaagatttataatattcaaatagattaatatcatttgttataagtgtaactacacctaatatatcaattgcattctttaggcgttcaaaagcaatagagttcttattactgaattgtacagaaggcattaaaacgggtatacaacctgccataacacatccccaaaataataatataaaattttcggatttttcaacagagattattatcttactgacaggctttacttgatagtaagattttaaaataaaagctatttttctagatttttctcgtaactctgaataagttagaaaaagatcacattgactattatttacaataacaattccttttgtcggcactttatgtgctgcttcttccaacaattcatataggttttccatcttgctttattttttgcccgcaaagttcgtttgtttagctaaatccatcaataccaattattaggtatttttaataaattgttgtatgcatataatattacttaaattatatatttctatttattgtgtgtagctatcgtattagtagtcagttgatattaatttatattagattgttatacataatcatttatgataaggaaatattacctacaaaggggtattatatgtatttttaccttcctattttttgtaaaatgataagttctttatatctcataaataactattgcttctttattaagacctagaaatcatcacatttaatatattactgatacgcaatgctctaaaaatatttagttatttactataacagtcaatgtatatttcaggtatacctgataatcttccattatcatctggtctattactgccaacggaacgtccttgttatcccggaatcatttgaagctgccgagtgcggtatggtagttcttggccgtaccgatgtgatttaattggcagagtcgctcgatgagattctccatgaatataaaaagggtattttctttttcggtgcaccggaactccataattatatcttcagatgaataacctcgtcgtagcagatcgaatctttcaataatcctgttcagcttttccaaattctcctccagttttcggattattgtctgaataacggttatccgttcgccagccggtgccgaaacaggtcttgactgtttatcatcccattcatgagagaacaccttataaccggttgtgatttgcctgacgacacggcggtgagttacaaaataaacgatagtgcccggacggccttcgactgttgacgggcggaatttcacctttactgttgtcatacttatatttatttaattggtaatgtttcattctcgtcttaacttgcggcatataaaaatggtcaacgtgacacagacaacgagaaaagcagcggtacagccgagtacttcccacagcaatatgctatgtataagacgagcgttcgcggcgcaggtacaaacgaaagccgccgcgagggagatgattgcctctaccatacaccagaaagcggttgcggagataagcacacggtcattcgccgagaggcgtccggctagccttgcgcattcccgttccatcctgtcggccatcttccggcagattttctctccctcctgttcaagcgtctttctcgcttcctcgccgagtgtgaccgtgcttgccccacgcagggaagaaacagccccgtccattttgggcagggcttccgaaagtctgttttcgagcttttccacgttggcactaagaatgcggacagcttcataattgtttttcagcgcatcgattatgcggtcttgctcctgcattttttcggcagtcggaagtgccccgtctatttccgagaaatcgaattttttattcataggctgttatctttttcgtcctgtcttcggtttctttccgattacccttgccgcttcacgggcgcaccggcgtgcccattcccgttcgtcctcgtcctcgcgtcttccccaaggcaggtcgttggaactgccgccaccacctcccgaaggaaccgccggagtatcgagcatcccgacgaaaagtgccgcagccatgtccgtgaggtcacggctgttggctgtctcccggtagtcgaactcgtcattgaatacgtccaacgcttcatcgggaatgaagaaccggcggctttccccgtcgatgtcgatatggtacgggctggtaccgggacgatagccggtgtattgcggaaccggtgtcgttccttgtgcgtgaaccggaatcgtccggggtgtagtcggtatagatttccctgcggcgggctgtgtcgaaacagtccttgtcttgggagccgcgtgcagctttttccacgtgctttcaagtttggtcgccatgaggttgcgccccctgccgagttcggaagccttgtatctggcgttgcctttcttcagcacgtaaccgcgcaatatcttcttgttgtcgcgcagctcccaaaactcatatcccttgctccggagtctggccacgtactcgtcccatgaccagctttccatggattgcagggtttccatgcagtcccggttcacctgcccgatgttcgtctcacgtacttcggcggcagtcgtccagccccgtttcagggccacacgctcggctgcccgctgtgcccgcaggtgtatgtcatggtcgttgttgatattcccccgttcgtcgatacggcagaacgcaccgtgaaggtggggaatgccgctcttggattccagatgcagccacaccgtgcccttgctgcctttgagggcggttttcggggaataggtcttgccgttcttgtcaagcagttcgatgttgtcgaactcatccgtgaagtcgtcccacaacctttgccagtcgtcgatggtaaagtctttggtgtgttccggcgcagggctgacctcgatgcggatgacggaatttttgacccgtttggacttctccagcgtcagccgcatagaatcccatatacccgtggcatccagaccgggcggcagcagattgtcccccacgtggaagatgcgttcgggatgtttcttgttcctcgattctcccgtgatgtacctgatgtcatttatcccgtgggagatggatttcgctttccctatcatggctcgtcctccctgtcttcaccgttccttgtcccgtcgggcaggcggttggaaaaccgtaccttgtcgagcacgtccgtgacacgctcggccagcctgccgagttccttgagccattcgagcatgaaagggtaactgttaaacatctgtctgcgcttttcggggttcatgccacggagcgcggacgtgtagttcacgaggtcgctgcggcatcctataagggtctccatgaccgcctcctgccttgccgtcagcctcgctttcggcctgtagttgaaagctcttgccagcacgtagctgctgacggtcatgccgcactcggcggcaaggcggcggatgtactgtttctgttccacggtgactttggctccgatgtattcggtgcggctgccgccggacggaaatgatgtgtcttgcttattgtcttctgtcataactgttgttttataagggttaagcggtgcgagcctgcgagcgccgccaccggcgaactgccagtgagccgcgagagcgccaagggatgactgaccgaagggaggtgataccttggcatatctcgaaactgaaagacgttttcacctctcctgcggcgtgcctccgctgccggataaaatgccattcaaaggccgttcagatgccgttcgaataccattcagggcgggattgcaaaggtttacgacgtggaagttctgaaagtccgtccattcctcgacacaggtcatggaagcgacggaagcggttttggaagcgtccaccgctatcatgcccagcttttccatcgttgcaaggagattgcggattctttttctccctatgttccattcctccgcgagtctggtttccgagaactggaactgtccgggctgcaattcctgcggcctgcggaatgaatcgcccctgccgggggacagtcgcatccgtgagagcaggtcataaaaaagagtatggttgccgattgtattgccgtcgtcatctttcgttgtccctccgagccattcgattgcctctgcggtaaagtggatgcggactgtacggaagccctgcggctttttgaaaagggatgtttccttgttcctcttgttttcttgcataattcaataaaaaataagggaatggagtatcggaaaacctacaacagtttcaatgagatagtgcgtgcgggagtttccttgtccgtccgataccccgttccggttttgacatcagttccggttcacgttggcggcgggttgggattgcaggtgtccccgtgcgtcctccaccgccttgaagtcggaagagattttcatcagcacgatgctgacgcggcagagctggccgatgtcaacgaaatccttgacggcttccaacagtttttgcgcacgttcctgacgatgtttcatcacggcctcgttacttgttccgttttctttggcaagcccgtgattgagaaagcggttgacagccaacatgtccgtcgcctcaatcgttgcggtatcgccgttgcccgtcccgtaaccgaccattacccgtatggaatcggcctcgtagggggaacagccgcgaagaaagtccagaatggtctgtgccttcgcgctgattacgggtctgctctctttctttctctgttccttgttcggggattcctgaaccgtggcattcctgatacccggttccatgttctttgaattgtccataactgcattgttctaaaaaaggttgatgaatcatttgtttttctcatgtgttaccagatagtgggatgcctcgctgtcgatctcgacctgcgatttcacccgtacccgtttcagccatgcgtcgaggtcttccttggcgaagaagcacagcttgccgcccggcttgtagtaagggattgcgcggcgcatcatcatcttgtagagatagcttggcttcagtccgaggtaacgggctgcttccgtggtggtcatcaaattacgttcactttccatatacgttcatttttattgttacttgtactttcgtagaatcggaatctgctgttttttcagacttttcctttcttctgtttccgatgcaaagttaagtttgctccaaggtgggccaatgggggacgaatggggaaagtgcatgaaaagaaaatgcgccataccgttgtgtatgaacggtatagcgtatagctataatgggaagataccgggctgaatggggaaacgacgggcggttatggggtacctttcagccgtcttgcgttttcaacggccttgtcgatggatttgcggaaatcttgattctctttggtggcagcattgttgcaaacatcgctgcggtgcttgtcgtagtaggatttggatatgccgcagcgtttcaggaactcttccgaccagagtttcccgcgctctcgcggcctgatggtacgggcgatggaaaacaccatgtaacagatgcgaaggttctctttcgggcgcacgatgacctcccgttcggtgggtttcaggttcaggaagttcacgaagtcgctgcccgacagatactcgaactggtagtcgttgcacacctcgtaaatgaacaggcacagggcgaggtcaacggtatccatccatgcggtggtctcttgcagcaggcctgcacggttcatgggttgccctccttcacgcgtctgatgtcggagatgatgcttccggcgattccttgcagacgctccaccagcacgtcgaggaataccggtttgaagcaccagacacagaaattccggtcacgctcctgctgccattccttatatgataggtttgcgtgtgcatgagcttggtcatattttgcctttgctactccgcactccgtgtcgagcgacctgtattcttccgaatccagaggcaggaaatccaaccggttactcattgccgaatactcgcgccaaagttctgtggcggctgttttcgcttcctcgtaccggtgttcaaaggggcttagatattcctcgaaaagggcttcaaagttcactgtctgcaacggtgtcctgtcgagtgaaaggtatttgttcgtttccgaaagaagggaagaagaaaagtccagaagttgtccggggttctcctttaccagacaggctgcctccttgacaagaaggttcgtgtcgttgaaatcctgatagaacagggacggcggcaaggcctgttcaaaagacaagacgccttgtccgtaagttgcaagaagcgtgttcacttcgtgcaaccgttgtgttatttgccgtatcatcataatcgtcaggaattgaaaaggtcgtccatcgtcacctcgctgtggacgatgcttctgttcttgccattggccacaccatacgtcgtgataaaggtatgaaccagtgtcttgttggtcttggtaagttccctgaacaaaccggaacggtcacgcaaccggcgttcgtattcgggcttgatacggtatgtgtccatgcagaatttcatctcgcacaggtgtatgatccggtcagcccgctctattatcatgtctatttgtccgccgggcattccttcctccttattgggcttgacctgccatgtggacaaggatgtagccatgccccttattcccaaagccgacttgatctgtttatgatgtctcatgcagacaagctcgaaactgctacccatccagtcgaatacatttccggaatcaagatgattgctccaccattcatcatcgtgtgagaggttgtcggcaaggaacttgaaatagaacagcgaaaagaaatccgtaagcctgtaaacggctccgcgacgtttgttgccgtactgaagccatttctctatcatatcggacctttcaaggttttttatcgccttggttatgttgctgctcttcgatgatagtgactggaatatgtccttgcttgtcattcccgattcgtgttcgctgagtagttgtacgattgacgtgtacaggtcggcattgtcgaaaagggcgttgtatagctcctcgaactccagtttcaaaagtgcgccttcattgaaaaacagccggtctatattctgggaaaggctcaacgcggggtcaagaaggctgtaataaaacggaacaccgccaagcaccatgtatgtctgggtaagctggtaacgatcccattcgatgcctctggtagcgagataccgctccgtctcattcagggtgaacggggacagatgcaggttacacgtcactctggcatggaggcctcccttgttggcgacaatcttgtctttcatccatgaggtcgcggaccccgtggcgataagcatgatgttccgctgtgacatggcccagccgttccagaagttttcaagggccgacacgaatatggattttcccgaatccatccaaggcatttcatctatgaacacaatccgtttacggtcagcgggcagggacgacaggtattcttcaagggcataaaaggcttcatcccagttgcttaaatgggagaacttttttcccgaataactgttgagcacattcaggaagttgttcaactgtctgcgggtggtcattccatgcgcaccgacatatttgaaatcaaactcccggtcgaaaaattcttcaatcaggaatgtctttccgatacgccgcctgccgtagactatgaccagctccgatctgtccgagttcaggcatctttccagttccgcgtgttctttgtcgcggccaataagtttatccatactttcatgttttgatgcaaaattacgcatttggaattgcccaagcaaattttagaaccacttatttgatattatctatgaaatattacgctgtaaattcagatataaggttttgtgaggtttatgaactgcgtccataaatctgaaattatctatctaaatcaagaagataagttcaggtttatgtatctgataaacagatatgccgagttttgacctcttcggattgaaatctggccggaaaggtcaaaattcggcaattattcaaataaggctgaaaacggtggtaatggagtacaacgcaggatgtcagccaaatacgttatcaaccagattcaccgcttcaactttcttgctgtcaacgattttcgcgtaaatctgcgtagtctttacgttggcatggccgagcagtttgctcgtggtataaagatccgcaccgagggtaagcatcattgtggcgaacgtgtggcggctcgtgtgataggtgatttttttattgattcctgccgttgccatccatttggccagtaccttgttgatattgggttctgccgggagtccggcaaagacatgcagcccgtcttccgcaccgttcctttcaggcagccaacggacggcatggcgggaaagaggcaagtaaatcggtgtggtagttttttgcatcacggttgacatccggtattgttccccgtcctgaacaatatctttccatcgtaaggcataaacatcgctcaacctcaaaccgcagtaacaggcgaaaaggtaggcacgtttcacgtcttcgcgggggcattccgtgtcaatcagaacttttatttcgtcaatggtcaggtattcccgtttggattccggcaccttgatacgttctgtggctgcaagtgtcattatcgggttctccgggataacctcggcacggacggcggcgttgagtgcggtggagaaataacccacgtagtccgctgcactcttgggtgaaagcggcttgtcccaccgggtcttgtaggtgtgctgaatccagtcgatgaaacccagacaccagtccttgtcaatctctctcatcttcacctttttcttgtaaaggggaagtaaccggcagactgttcgtaacagtttcagtcctctcgcgccttttcgttcctgttcggcaagataggcttccatccagtcgtccagtagcattttggaacggacggatgtctttttcagtccggccttcgagtgagtcagttcgatgatgcgttttgatttgatggcctctaccgccgcttttgtggcccggttctgctccttgaccataggattgatttcgggcaacaggtacagtttcaagaactcgtaactgcgttttccgtcaacatagatgtcgagataataggattccgaaccgtcggcgagcttcttcgtgcgcacctttaccggttccttgagtctggtcgatttctttgttgttgccatatataataatgtatttagaatgcgtcgtcaaccaaggtgattgcatcgtcctttttcttgtctactatttttgcataaacctgtgtggcacgcacggaacggtggccgaggattttggaaacggtatagatgtccgctccgagcgtcagcagcagcaccgcacatgaatgacgtgccgtgtggaatgtcacgttcttctttacgcctgccttatcagcccagttcttgagactgacacaaaggttgcttgtattgggcagccctccaaagacaaggccatccggtgtacagccattacgttccggcaaccattttaccgcttgggacgaaagggggatataaacgggattggtggtctttgtcattactaccgacacgagccattgcccgcctgatatggaaatgtcacgccaacgcaatttccgtatgtcactgatacgaagtccgcaaaaacaggaaaacaggtatgcctgccgtacctgctcgttaaaaaatggcgtggctatcattttctttatctcctcgatggtcagaaaatcccgtttgctttcgggaactttgattttctcggtcatctccagtttgtaccaaggatttgattcaatcagtctctcacgtacagcctcgttcaaagcggtacgcaaagtggtataataggaatgagccgtcttgggagtaatctgttttccccatgcggtcttgcaggaagaacgaagccagtcgatataatcaatgtaaaactgtctgtccacatcacagagcctgacatctgcacggaatttcagcaagtttttacgggcgttgtcgattccgttcaggtcgcgtgcttcccggtgttcgtggttcttgcggacaatggtcatccagtcggacagcagcatatcggaagatttgctttccggtactgttcccaccttcgcattgagcagggcttatgtccgttctcgctgaatatcttccgccttgcggagtgtctgcgcattttgccgccttgctttggcagatgtttccggcatgaggtagagttgcagaaactcgtactcatgcccgccgtctacactacggtcaagaaacagggataaacgtccgtccgccagtttacggtgacgtaacttgaacggagatttctctattaatgatttcttttttcttcccattgtatatcaatgatttatatccatatacaaaggtaacaaataatccggatataagtatcgttttaggtaacaaaaatgtcgaataatagagatttttaaggaatacaacagaaatcatcattagttaataatacattgataatcagtatttatatagattttatctgtttttattttcccttcgtttcaatacattggctaatgggcaactatatcctgtatcatcagaacttgcaaggctggggaagcaaaatcatcaagcaactggcaaaggctatccgtttcaattatcctgaaaagaaaggctattcggaacgcaaccttacctatatgtgccaattcgcacggtcatatccgctgaacgtgctacgaagtttcattgatacggatgcaagattgtctgttccaagcatacagaatgttacagatgaagtattgaaactaaacaacggacaatttacgcaggaacttactgcgcaaatacaatccgctgattgtcagtctttaaaaattacgcaggaagttcctgcgcaaattcaggatgtagcgaaaactgtttctgccatttacaggatggagattagtgagatagaaaagtttttcttgacatcccctattgccagaataaactgggcaagccaaatggttatacttgacagttcgttgccgttaggtgtgagatattggtacatgaaacagtctgtagaaatgggctggagcagcaatgtgcttaaaatacaaattgaaaccaacctatataacagacaaatcagcaacaacaaggtaaacaatttcacagccacacttccggcaccacaaagcgaccttgccaattatctgttgaaagacccgtatatatttgatttggcaggagcgaaagaaaaggcagatgaaagggacatagaagaacagttggtaaaacacgttacccgttatttgttggaaatgggtaatggttttgctttcgttgcccgacagaagcattttcaaattggcaacagcgatttctatgccgacttgattttatattcaatcccgctacacgcatacattgtagtggaactaaaggctaccccattcaaaccggagtatgcaggacaactgaatttctacattaatgtggtggatgacaaactgaggggaaaggatgataacaaaaccatagggctgttgctgtgcaaagggaaagatgaggtagtagcgcaatacgccttgacaggctacgaccagccgataggcatcagtgattaccagttgagcaaggctatacctgagaatttaaaatcaattctgccaagtatagaagaagtagaggaagaactgacttcctttcttgataaagataataatcctcaaaattgaagtctatggcaggagaaataaacaaactgattcccctatacggagaactcaacagaatatataatgattggataaccaattatgcattttcttttgataagcaaaaattcatcaccgatttttacagacagcacaatgatacaaaggcttttgaatccgctatccttgaactggtacttgacaagcagaaagaacaatacacattgattctcaatagtttaaaaatcgaaatagaaaagaatatacgagcttatgaaacaaaaccgctgaatgatgacatcataaagcgtgtgtgttttcactacgcagacaggcgtaattctataataaaagaccagttggagattacaaccaaactgcataagcctttgaatgatgcataccatagatatgatttcattggttttcgagaacatacgaatgaagaagaaatactggctgaaaaggaatatgaacgctgcaaggctgaatacgacaaggaaaagaaagaattggataaactctatgaactgcaaaagcaagacaggaaagaggcttttcaatatacagaaaacctttccggtgatgtttaccgcctaagccttctttttatggaagtcctgaaaaagtaccttcttgatgataatgtggaagagaaacagcaggaagaaccagccaaacaagataaggtgcaggaaacttcgaaagaagaacatgaatattttgacatgaagtcgctttcgtccattcatgaaacctgtgtcggggaacagttcgaagccattaccatatcggacttctatgccagtataaatctgcacccctgcaagaacagattaaagatcaaggcaagggaaaagatacgggtgtgttacctgatattcctgatgagcgagaaactatccaagcaatacagggatgaatggcgagacaagatattgaaactactggatattgacgagaactattacaggtcgaagtacaaagaacccgtttccgattttccaagtgacagcaaccagaaattcgccaaagaaatgaaatgtatatttaatttaaataagtagtattatttatatcgttaagcttatgttggaattaatacaagaaaataatgtaataataggcataattataggcattattacactttttatcacaatgagacaaataataatttcaaatcaaaagcataggatggacaaagaagattttatatccaaaaagccaaatttctctgtttatatagagaattgctatagaatatcatataattcttcaaaacacacacatgctgtattttgtattacgataaaaaacaaatcttcttatagaaatacagttctacccaaattagaaatagattacatagagaacggtattataagaactataaaattatcacatgataaaaacttatttcataaaaaataccactctcaaattgaaaaatatgataacaatattcgactagaacctaaggatataaaatatggttgggttatttttcaaattccagaaattttaaaaaatagacgcattgagagatatagaataattgttcaagatgtagagaataacgtatctaaagcggaaagtttattaatcaaagagattcattatgatgattaaaaaaatatcaacaccaatatataatatcaatgaagaagggttatttgcaagtcgagattacgcagatgggcgattaataccttctatagtaatcagttctaaagaagatgattatataaaagaaatcattaaattacattccaatatatccatgggagatgttgaagttcagtggggtggaacattatcatcattatttaatgccgatagatggatcttaaatataagattctataaacctatagattataattttagcattgtattttctttgaagaatcattattctattattgatgccatttttcaatcaaaaggcctaagaatcgcttatggacataaaggcgaaaaggtttctcaagtgagtgaccatattataatagaaattcctgatactggcattagtcccaaatgggaaaaaacattaagtagaatcattaagaacaagatgcgcagattgaaaattccaagaaaagaactaggtaaagcaacgcaagaacaaataaacaaaatgagagaaattttaaatattagattcaaacataatcctgattgaccacatattaaaaagattcataaacaaacacgattctttctgctaatctgtgatattcattgatgtttcacgaaaattccacttttaccactcaaaatattttttgagtggtattttttctatctgatatttaatgagatagcgcaatatcctatttatatcatccacatccttaccacttataaccatacctaattttgcatcgttcgagaacagaaataacagccagtgcgcagggctgattgttaaacgactaaaaagattggacgatgacaaatcttcaagagttattattaaaacccgtctggcagatgacaggcgaagagttcatattcctaagcaaacacgcttccaaccaaacggaagcgcaaccgcaacccgtcacggacacagaaagaaagtatgtgtacggaatacttggcattgccaaactgttcgggtgcagtctgcccaccgccaaccgtataaagaaaagcggaaagattgacaaagccattacgcaaatagggcgcaagattatcattgatgcggaacttgcccttgaactggccggaaagaaaaccggaggacgaaaataatgggaggggtacttatggattatatgaaagacaacagggaaatatcggcagaagaagccgtaatcctttggcaagcctcacgtttgagcctgtcgagaagttacgagaaagcccctgagattctcaaagtacatggttccgtcataggaacattggggaatttcagcgcatccatcggcaaagccaaaagcaaaaagacgttcaatgtgtcggctatcgtagctgccgcattgaagaacggtacggtattacggtatgtcgctgaacttccggaagacaaacggaaaatcctttatgtggacacggaacagagcccttatcattgtctgaaagtcatgaaacgtattttacggatggctgggcttcccgatgacagggacaatgagcatctggaatttctcgctttgaggaaatacacgcccgaacagcgtatcaggattgtagaacaggctatctacaatacgcctgacatagcccttgtaatcatagacggcatccgtgacatggtatatgacatcaacagtcccggtgaatcaacacgcatcatatccaaactgatgcagtggacggacgacaggcagatacatatccacacgatactccaccagaacaagggcgatgagaacgcgagggggcatatcggcacggaactgaacaacaaggctgaaaccgtccttcttgtggaaaaggacaagagcaatggagaaataagcaatgtttcagccatgcacatacgggcaatggacttcgagcctttcgcattccgcatcaacgacaatgccttgcccgaactcatggagggttacaagcccgaagccaagaaaccgggaagaccggaagaggaaaaattcgacccttacaggcatatcaccgaacagcagcaccgcatcgcactggaagcagttttcggattgaaagaggaatacggctacaaggagttggaagatgctttaatcaaaagctatacgtcaataggtgtaaagctgaaccatcaaaaggcggtaccgctcatcaccatgcttcgcaacaaacggatgatagtgcaggagaacggcaggaagtacacgttcatgcccgacttccactattagcccacaccttgcaatcgcttcactttattccgagggtctatatattagggataaagcgaagtggttcggaatgtgacaaaaccgcttcactttattaccgtactctatatatacgaaaataaagtaaagtgattataaagaccgtacttcataaagaggtacgggcgaaaagagaaataaaccaattcaattatcattaaaccaatcgttttatggatatacagacagcgaaacaaatcaagatagcagattatctgcacagtttgggcttttctcccgtcaaacagcaggggataaacctgtggtataaatcacctctaagggaagaaacggaagcctcgttcaaggtaaataccgagcgcaatcaatggtatgattttgcactcggcaagggtggtaacatcatcgcactggcacaggaactctactgttccgagcatgtgccatatctcctgcaaagaatcaaagaacagacgcccagcattcgtcccgtgtctttttcttttggcaagcaatcatcttccgagccaagtttccaacagctggagattgtaccgctttcttctcctgccctgctcacctatttgcaggaaaggggaataaacattgcactggcgaaaaaagaatgcagtgaagcacatttcacccatcatggcaaacgctatttcgccattgcctttcccaacgtgtcgggcggatatgaaatccgcaaccgctattttaaaggctgcatcgcaccgaaagagatttcccatatcagacagtcgcgaacagtaagggaaacgtgttatgtgttcgagggatttatggactatctttcattccttactttgagattggagaattgcccgaaatatcccgaactggacaggcaagattacatggtgctgaactccgtagccaatgtttccaaagctctctatcctttggggagctacgagcgcatccattgtttctttgacaatgacagtgcagggatggaagcactccaacaaatacgtgtggaatacggcagggatttatacatccgtgatgcttcgcagacctacagcggatgcaaggacttgaacgaatacttacagaaacagactgaaagaaagaggcaagcccagtctgcaaaggagacgcacagccgaccaccgaaaaagaaaaacggctttcggttatagcccactataactacacgcttcgctttcgtagttgtgggctctcccgaggggattagggctttgccctaatgacccactcagggcgtttctcccctgagaacccagaccaaagagtgaccctctctttggaaactccgcttatgggttgcatccctaagaacccctctgcgaaagcgaacaaagtaatctgtcgtaaacaataaatctgaatagtaatatggcaataaaatcaagcatacatatcaaaccttgcaacaccaaatcaagtgaggctcacaatcgaaggactgccgagtatatgcgtaatatcggagagtccaaaatctacatcgtgcctgaactatccgctgacaacgagcaatggataaacccggacttcggcaatccgaatttacagacacattacgacaatatcaaacgaatggtaaaggaaaagacaggtcgtgccatgcaggagaaagagcgtgagcgaaaaggcaagaacggcaagattatcaaagtggcaggatgctcgccaatccgtgagggtgtgttgctcatcaaaccggacaccatactggcagacgtgaagaaatttggcgaggaatgccaaagacgctggggcatcgctccgcttcaaatctttctgcacaaagatgaagggcattggctgaacggacagcccgaagccgaagatagggagagtttcctaattggtgggaagtggttcaaacctaattatcacgctcatatcgttttcgattggatgaaccacgatacgggaaagagccgaaagctcaatgacaacgatatgatggaaatgcaaactttggcatccgatattctcctgatgaagcgtggacaatcaaaggctgttacaggcaaggaacatttggaacgaaacgatttcatcattgagaaacagaaagccgaactgcaacgtatagatgaaaccaagcgatacaaggaacaacaggtaagtcttgccgaacaggaactcaaacaggtaaaatcggaaatacgcacggacaaactcaaaagcgtagccactgatgctgccactgccatagcaagcggagttggttctcttttcggaagtggaaagttgaaagaactggaacaagccaacgagaaattgcgtcaggaagtggtcaagcgcaataagggcattgacgaactaaaagccaagatgcaacaaatacaggaacagcacggcaaacaaatacgcaatcttcaaggaatacataaccaagaacttgaagccaaagacagggaaatatcaagactgaacaccttgcttgaaaaggcattcaactggtttccgatgctcaaagaaatgttgagaatggaaaaactgtgcacagtcattggatttaccaaagatatgatagattgtcttttgacaaagaaagaagccatcagatgtaatggaaaaatctattccgaagagcacagacgaaagtttgacatcaagaacgatattttcaaggtagagaaaagtccaaccgatagcagtaaacttgtgctaaccataaacaagaaaccaattggagattggttcaaggaacaaatggaaaaattatggcaaagtttacgtcacacgacagaagaaccaagaaaaaatagagggctcaagatgtaatcttgataatatttgactatatctcaataaaattcactaactttgtaaacggattgagccaactctctccaagacatattagaaaagaaagaagcgttatgcttatcttgtagtttgaaaacctgagaaactttcaaaatgagatacaaggagagcgtagtggttctcacgctatagcgtgggctactatatccatatctgtatctcaggttttctcaggaccttcaaactaagacgtggcatagtcagcaccacgcttcgtgatttaataaaatgacgttctccgtggggctggggagaacattgacaaaaaatcaattctatgttttctactatttgtttaatcatttcaatcatttgtttcatttcagtatatggatgtcacatgacgttgaaaaatggtgatccgttatcttatgccggatatctttcgtccccattattatcttctataccttggattagtgggtttattctagcggtaatacccgaatgtttaatttttaatgtaacttggtattggatgtttctcataaacatagcaggcatttatattttaggaccaatcataactaaattctttttagtacgaatggcaagtggtaagggcttggggatggatgcttttatcgctctaataataggtataataactcttattttgggacttatatttcgctcttaaatcaaattcatacaaaggtcatgaaagctatacaagttatcttaattttggcattattattatgcctattcccaatgccttatggatatttcattttagttagatatttggctacagttgtttttacaataatggcataccatcattacaaacaacaaaacaatacgacaacttacttatgggtgtgtctagccttattatttcaaccattttttaagattacattggggcgagaaatttggagtgtagtagatatagttgttgctatcatactagtcataatattgtggaaagaaaggaaagcaactgataaagctagcgctttgaaaggagtaatgcaagaaataaacaagaacctatttcccggaggaacaaaacaaattgaaaaagagactcaattactacaaacttcattgcatgaaaagtattcttttgaggatgtaaagaatacattactatatatatcttctatttttttattatcaacagacaaaagtcaggatggaattgtttcacgcgtattaaaacgtccacagaatagccttgaccgctcatccatcattgtgatatatcagttcgtagccaaaaaagcaatgggaaagaataagaaaacaaacgattctgagctgcaatatatccttaattttataaacggcaacatcaataatggatgtaccgaaaacgagatacctaacggatatggtgagttcggattaacaaaaactaatccagtaccagtaaaaggaatcttagccaatgaagcctacctatcccaattgcgtacattaaaaggtgacgaactacgttggaacagattaggatcaacacacgcacccaatattgattctcctattgatatttaccgcattacaaccaaagacggaatagacatgggacatatttatattaatccatatcagaatcacacatcaacaaaagctccgaaaggttttatacatataggtacaggctattcacaatcacctcttccaatctgttaccaacaaatttatagtaaaaatttagctattgatgacattagagataaacaaggaaatttgctaacatcaatatcgatgcgacagataatacctttactaataaaatataatgatggcaaaaccaatgatttaatagaaaaagcaaagaatgaatatttagttttaataaaacaaggttatcctgatgcttacaataatctcgccataattgatgacttccacaacggtggcaataaaactatattccaaaaaggagtagaagcaggaagtctgaacgcctgttttaatctttccatagtagaagattatgaagaaggctttgcttggaataaaaaagctataacttggataaaagaaccaacaagtgaaatagaaatagttctaattataaatatggccattcgctaccacttcgggtatggttgtactgcaaatctatctaaagccaaagagctatacaataaagcactgtattggaatagcaatattgcagaaaataatttgggagctattttcatgaaagaaggtaatttagaacaagcaaaacgattgtttaatcgagctatcgcagaaaaaagccattatcgtcatggaattgatgtttacgaagttatttcaatggctcaacaaaatttgcagctcatataaaataagcagatgagaatgttattaatcctaatactatccctaatacaactgccttgtgtaattgaggggtggatttcatattttctaaattgcatagtcaagctaatctctgacatcatcttcttattggctattatttcattcgtctggtggccattagatatgttatgcggagcattatgggctggatgtgaatgccttaagcaaaaacttttttcacgaaatataaaatttagtgatgcattgatattatatactcaactatttcccactatttaaatactaatcatatgaaattttttaatttgatttttagttctaaaaacaagctccgaatctctaaaaagcaaacttctgctcagactatatctcctatagaaaaacggacaaaacagacggaagattactcatcagaagaaatgattcagaatgcatccgattggacgaattattttcttcaaacagctcctcagttagacaatggagtataccagaaagatgaaatttatatgttttgctgttggatattattagattatggtgtaaatcatggctatttagacaagcattctaatagagacagtttctattctaccatttatcaagcagtacgtaacaccggcaaatacagtcaatcaaattcagaacaatttatgtttagagttgaccaatacaaatggcagattaaagaaatgttaaaatgtgattatccgagaactaaaatattttttcctgaaactctttacgctagatttgtaaaaattgatttcaagcattataccccaacttttggggaaattgatgattctcttattctattcagtgaatttttagcgtctttttggaatcaaatcaatagtgaactaatgaaaagatatcccactaagaaataaataattaaatttaagcttggtaatataaatggtaaccatagtggtgaggatacacctctagccattccgaacagagaagttaagctcacttacgccaatggtactgcatcattgtggaagagtaggaagttgccaaagattcttactttattaacatttaaattttagtaatatgacgtttaaagaattaatttagaaggggtcttcatggataaagaagaccccaagtagattggaagtttgtattctgacagtattgatgaatattacactggcgataggtcactatcactagtttcaacaatgtccaagttagtagcaagcggaacaagtgatatcaactatatgtgctatcgaaaaaacactttgtgaatataatgaaggtaaaaccgtagaatacaaacctaaaaggaaaaggtaattccgtatcctaacgatggaaaacgtgaaataacccaattgggaggattcgctcctcccaattgctttttattacccttctaagcataagatattatcgaaaaaagacttcaagccttaaataaaataaaaacacccaattttacattcttgggtgtaaaattgggtgtttgttttgcaatttgctgattttcagcatttattgcggagagacagggattcgaaccccgggtgcctcgcagcacaacggttttcaagaccgccgcaatcgaccactctgccacctctccaaaacttctttttcaagaagtgcttctctcttaaagcggtgcaaaggtacaaatcatttttaaatctgcaaacatctttcctgttttttcacgaaataattgtacttttgtacccatgatatacccacagaactttgaacagaagataggcttcgaccaaatacgccaactgctaaaagataaatgcctcagtacgcttggcgaagagcgagtgacagatatggtgttctccgaccgctttaatgaagtagaagaacgcctggatcaggttacagaattcgtacgtatacttcaagaagaagataattttccggcacaatatttttttgatgtacgtccgtccctgaaacggatacgggtggaaggcatgtatttggacgagcaggagcttttcgacctgcgccgctctttagaaacgatacgcgacattgtacgctttttgcaaaaaagcgaaaatgaagaagaagaggaaaccacatctccttatccttgtctgaagcgactggcaggagacataacggtattcccgcaacttatcggaaaaataaacggcattctttctccctacggaaaaataaaggataacgcctcggcagaactggcgcgcatccgccgcgaactggcaagtacaatgggaagtatctcacgctcattgaacagcattctgcgcaatgcccaatcggaaggtgttgtagacaaggacgtaacccccacaatgcgcgacgggcgactggtgattcctgtagctccagccttgaaacgaaaaataaaaggcatcgtacatgacgaatccgccagtggtaaaaccgtattcatcgaacccgccgaagtagtggaagccaacaaccgcatccgcgaactcgaaggggacgaacggcgggagattatccgcatccttatggaattttccaatttgttgcgcccatccattcccgatgttttgctgtcatatgaatttcttgccgaaatagatttcatacgtgccaaggccttgttttccgagcaaatcaccggactgaaaccggcttttgaaaacaagcaggttatagactggacaatggcggtacatccgctgttgcaactctctcttgccaaacatgggaaaaaagttataccgctggatatagagctggacgaaaaacaacgtattctcatcatctccggtcccaacgccggcggaaagtctgtctgcctgaaaaccgtagggttgctgcaatacatgttgcaatgcggcctgctcatcccgatgcacgaacgtagccatgccggcatattcagcaatatattcattgacatcggcgacgagcagtctatcgaagatgacctcagcacctactcctcgcacctgaccaatatgaagataatgatgaaaaactgcaacgaacgcagtctcatccttatcgacgagttcggtggcggtacggaaccccagattggcggagcgatagccgaagcagtgttgaaacgtttcaaccaaaagcagacgttcggcgttattactacacactaccagaatctgaagcattttgccgaagaccatgatggggtggtaaacggagccatgttatacgaccgccatttgatgcaggccctttttcagctccagataggtaatccgggcagttcatttgccgtagagattgcccgtaaaatcggattgccggaagatgtaatctccgatgcttcggaaattgtaggcagtgaatacatcaatgccgacaagtacctgcaagatattgtacgcgacaaacgttattgggaaggcaaacgtcagactatccggcaacgcgaaaagcatatggaggaaaccattgcccattatcagacagagatagaagagttgcagaagtcgcgcaaggaaattctgcagaaagccaaagaggaggcggaacaactgatgcaggaagctaatgcccgcatagaatacaccatccgcgccattaaagaagcgcaggccgaaaaggaaaagacacgccagatacggcaggaattaaatgatttccgcgaatcgctggacaccctcaccgctaaggagcaggaagaaaaaattgcccgcaaaatagaaaaactgaaagaaaaacaaaaccggaaaaaggagaagaaagccaacaagaatcaggaaaatacattgtctgcacaagcattggcagagcaacaggcaaagaaagaagccgaacgtctggcagcaatcgtacccggaagctatgtcaagataaaaggacagacctcagtcggcgaagtattggagataaacggcaagaaagccatcgttgcgttcggaagtatcaaaaccacagtcaagctggataggctggaacggacaaatgcgcagcctaagcaagcggatgtctctaccaagagtacctatatcagttctcagacacaagacagcatgtacgaaaaaaagctgaacttcaagcaagatatagatgtacgcggcatgcgtggagacgaagccctacaggctgtgacctatttcatagacgatgccatattggtaggaatgtcacgcgtacgcatcctacacggaaccggtacgggcatcctgcgcacgcttatccgccaatatctgcaaaccgtgcccggtgtaagccattttgccgatgagcacattcaatttggcggagcggggattacggttgtagacttaagttaattgaaatttaaaaatcgagcaacagaaaactgcaaagttacaatattaacaatcctgataaacaaataatccaataacccattagcaagatgaaatcaatcaaagaactatatcgcatcggcaccggtccttcaagcagccataccatgggacctcgcaaggcagccgagatatttctggaaagacatccggaagctgcatcgttcaaagtaacattatacggcagtctggcggcaacaggcaagggtcacatgaccaacattgccattaccgaggtgctgcagccgatagcaccggtagagattatctgggagcctaagatttttctccccttccaccctaacggaatgaagtttgtctccgttgacaaagcaggaaaagagaccgaccgatggacagtgttcagtatcggcggcggcgctttggcagaagagaatgacggagcatcctcggtcaatacacccgatgtgtattccatgagcagcatgacggaaatcatgcaatggtgcgaacgtacaggaaagagctattgggaatacgtcaaggaatgtgaagacagcgatctatgggattacctgcaagaagtatggaaaaccatgcaggatgccgtgaaacggggattggaacaggaaggtgtattgcccggtccgttgaatctacgccgtaaagcttccacttactatatacgtgccagcggatacaaacaatccctgcaatcgcgcggactggtatttgcctatgcattggcggtaagtgaagaaaatgcttcgggcggcgtcatcgtcactgctcctacatgcggctcgtgcggagtgatgcctgccgtactctaccacctttccaaaagtcgtgatttcagtgatacgcgtatcttgcgcgcccttgccacagccgggttggtaggaaatatagtaaagaccaacgcttccatttcaggcgcggaagtaggctgccagggagaagtcggcgtagcctgtgcaatggcttcggcagccgccaaccaactttttggcggcagccccgcacaaatagaatatgctgcggaaatgggtttggaacatcatctgggaatgacctgcgacccggtatgcggactggtgcagattccttgtatagaacggaatgcctatgccgccgcacgcgccttggatgccaacctttactcctctttcaccgatggtatgcaccgggtatctttcgacaaagtagtagcagttatgaaagaaaccggaaacgaccttccgtcgctttacaaggaaacaagtgaaggcggactggctaaagattataaaccgatgtagcagtcagagacaaaagcacgtccaacttactcaaaacaaaataaagaatctcttctcttaatatgtaaggagaagagattcttcattttgttccggttatacctcaatcaaacaagattaacgcccggtcttcagctcatctatcggccagtgcgtatcgtccttattgccacttacatcacgtttctgcaataaattaccgtctccggcatagaacaactgatactcctcattaccgttctccacttcgataacatactggacaggctgtacgggatattcaagcatatcaatatcttcccgtttccactgcgcatattctccgccttcgaaagcggtctgtaccgtaggcggcaaaccttcccaaagaatatccgtctccgtcaatttccaggttgcctgaacatcataccacacatccatttccctgccgtccatccaacagtcggctacgaaataattgcctttccgttcccattcaatgtccatggcagcaggatatttgtccttaagggctttcgacacggcatcgggaactgttatattatcgtttttgtcgtcatcatcgcacgcaccaaaagccattgccgcaatgaacatcatcgctaatacttgaatttttgttttcatcttcttggcaaaaaaatttaaagttatacattctgtattttcactatcaatcgtccatgcctacaaattttcctttgctgttgaatttcaaggaatagtcattggcaagttcaacttccaccccgctgcgtctgcgttcaatcttggtgatgacctcctgcgggaagttcgtctttacatactctttcacagataccggaatcagagcttcgggcacagcagctttcttgcaatccacatcagtccagtttccattgctgtcaaaatcaatctccgtacggtcggtcaacagcacctcataacttttcgagcccagtattccggcttcaatcttgatatgcgagatttgcggatcggtgaaataccggttgatgaagttacgggctgtcaaaggcaactgcttggcatcgcgcgtaatgacatcaccggcaaatgccaactgaacggctacaagagccaacacaaggatagataatactttcttcataatcgttatttttaatgttactgatttgtttcatatcattcacactgcaaataacgacagagaaataggaaagatttgggaataatcagtgttaacggttatttttattttctttaacaagtagaaagcaatgcattccatcctgccattcgtaagtaagcctcaaaaaagaaatccgggctatggaacgggctatggcgagtcccagtccggtggaatctttctttccgtcaatactatggtagaaacggcggaacaacttctcaccgtccaaaggagtatcacctgtattctttattaccagcgaatccggagtagtgagtatctgcaactctcccccatccgcattatgaagcaatgcattcttcaccagattggaaaccagaatctgtgccaacgaatgattacagcgaataataaaaggctgttccccctgcttacgcagcaagcgcacctgcttatgttcgtatatatccatcaaatcaggcaaaaggttttccagtatctcgtccaccgatacatcctccgactccgtgtactgcccgttctctatacgggaaagcagcagcaaggacttattcagtttcaccgcacgtcccaacgttgaatagatttcatccagttccttcatctgctgttcggtcaggccgtcgctttcagccagcagttccactttaccgcgcacgatggcaagcggtgtctgcaactcatgcgatgcgttttctataaactgcttctgctcttcataagccttgtaactgcggttgcccatatccaccgcagcctcgctcaactgacggaattcacgtatcttcgtagggttctccaatgccggaacttctttgccgggctggatgccgtgcaaccagtccagtaacttatgcaacgggcggaatacccctttcaatatcacttgaatgcccaccgatgtacaaatcagcaacagcaggaacaaagcccccaaataccagagcattgcctccaccatatcgtcccgttccaaaatggaaatcatcagagtaagctcgtaaaactgtccgtcgggcatgcggaatgccgtacgcatcacgcgtaccggttcgttctcgtcctcaagttcgatatacacggtagagtcataaaaaacttcctgataatgatttccctcctgttcagagatgggacggaatttataaaaagacatcaatgagccctccgtttcaagaagggaagaatcgtggagtacgtgttctattaatatttcggcataattttccagcgtatcgtccgtttcatcaacaacctcatcaataatggcataataaaacaataccccccatacagccatcaggacaaatagcaataaggagattttacgatatgtataatataccagtttcataattcggacaatttatagccaaagccataaacagctttcagctccacagaggcattggcctgcttcagcttcttgcgcaggttcttcacctgcgaatatatgaaatccaacgaatctgcctggtcaatattatcaccccacaccgactcggcaaggctcattttattgataacccggttggcgttcaccacaaagtaatacagcaggtcgaattccttacggttcagttgcaaaggagcaccgcctacttccgcctgccgtttgtccggatagagcaacaaattgcccacggtgacagacatatcgccttgtgcctgacggcggcgtattaaagattttatgcgtgcattcagttctgccagatggaaaggcttcgtcagataatcatccgcccccagttccagaccgtccactttatcgtccagcgaatccttggcggagatgatgagcacactgtccgtacggcgcaagtgcttcagctcgcgcaacaaatccagaccgcttcctcccggcagcataatgtccaataggatacagtcgtaatcatagtcgtttatcttgtccagagccgaaaaataatcggcagccgtttctacgacaaatttctctttcaggagcgaagtgcggattgtttcccgcaaatcttgctcatcttctacaatcaggattttcatgtcggcaaaaaaaactcacaaatctggaatcattctggaattacccgtatatcaattggaaacggcatcttccccatacacctcttccagcagttcctctttcgccatggagattttgccatccgcggaaaccgtcagccggagaggtacataaaggtcggattgcggatagcagatgctggcggcatagataatgccctgaggcgttgtcttatcatagaccagtccttccagaatggcatatttcagaaagcgggcatcgaccagtgagacgaaactttccttcgtaaacaccttgtccacaatctgttttccgccacaagtgatgcgcagcgcaatgctgttgtcgataaacctctctccctgctcattcgtcacaacaggcagactctcgtccgggcggcggacaacagacgagcggtactccctgcctttgtaggtaatggtcactttcgtatcggaaacctgcatacgctgtggagcagatatcactgtgctgtctttcatcaaaacctgtacatcgtctccgcctttattccgcgatgtgcaggaaataaccgacaacatcaccacacaagtcactatataaacaagagtcttcattgattctttttttttattgacaagggcaaaggaacaaaaagagcgggaaaaatacaaatgaaagccattaaaaacagcaagggagcataccaaaagaaaaacatcaggtacattctgccccctctcattaccgtcaagcatatccgtatatcctaagaatctgccttcaatcaaggttcgttcaggtaacggacgattattcccacttgcctcggcataaatgtccgcacccttgcgtggtatcccgtaagcagcaattccgcatacaattcgctgttacgtttaatccagcgcgtcagcgtacggatagcacaccgtgctgttgtgttggggcaatacaggcatgccagctctcttttcgtatacgttctgatacggaagtcattttcattttccatagtttttttgcagatttatcatcaaagtttttttattagagatacaaagatacaacatccgaaaggcgaagtcaagcaatcggagaaaagatatgaacctttcctgaaaaaagtccatatccctctcttttactttcgcttaccgttccaggcagactgaaagaatgttatcccaacggattttcttcttccccgtttccgccggttcccggagcagaaccgcctcccgaaacagtttccgttttttcccaacttgctctcgtcacgctggcacgtgtcagcatctccctgaagtactgtcccggcgtaaaaattattttccgacgataaaccgtatccgacttcacatcctcttccctgtcctgactctttgcattgatgcccggtcggaaacaaccgaaatcacccaactgtacggaaaaccccttgttaatgttaatgttcaatgtgtctatcaagccatccagaaccatctttaccacaccacgcggagccatgcctatcttggtgacttcatcgcacaaatcgccaaactgtattataccaagcgttttcagttgcgctacatacttttccgtttttgtctgatcaaaaccgaatactttctttttcacttcgtaattcaatgccataactttttttaatttaaacgattaataaatttgtttttcggttttgtttgctcgtcagtttgcaaaacctgcttctctgtgatcacaatacaaagatacaacaggcgcaaagcgacatggtgctttaactgtcgtttcagtaagttacagtcatgataaagaggattaacaacaatagataagctattgataaacaaagatatatatacctataaaaaacttttcacttttttcctgcatacaccacatttctccccattccgtatctcaccaacactccgtctctgataaactgattcaaatcgttaacggcctgcttgtagctacgtcccgtcagacgggcatactgggcacggttaatgcaaggattccgctgcaaatattcgtccagcaattgaaagcggcgctccatagacgaaaggttatccgaggaaagcggcacggcgggttgcggcctgcgctcaagcctcatcttaccgcttaaatcttcatgaaatttcttccccagacggaaattcagtccgcgcaaggcaactgacgcggcacgtacctcatctttctccatcgcacggcgccggcaactcaatgagggcgtaaaatagcccaactcacccaattctaccgtccaaccgttggccaggcaatcgcgcagttcgtccatgaacgctgccatcgcaccttcaagcacgctgcggctgatacccgtaaacaagtggacacggtctataaactcttttctatcaatcgttcccttagccacaaaatgggcataaaggggttgttgctcaccggtgcggcgaatatcgggtttctccaaaaggtcataataggcactcatacttttcaagatgctaagttttcaccattgctacactcagcatcctttctcacggtgacaaagagagaaagccgtttcttcaattaaatcgttccgccacggggtaaattttgttccaccacggagaaagttctgttccaccatggcggaatggaatttactccatggcggaacaatctggcattaggaagtaaagatactgctattttgccggataagcaataaaagctacaaaaaaagagaataataattccgcctgccgtcacagcgctttccagaacttctggaaatcccggtagcgcccgtaacataccaatcggtcgcccgcctgtatccggtcatcatccggcagttcgttcactacatcatgctcggtgaaagagatgcccaggcaattcttcaaagtctcggcacgcttcagagcaagcagtttcaacccgaactcgctgtcaagcttcagttcatttacattgtagcctataaatttttcgggcacagtaaaattcacaacgtagtaattggaatccacccggaacgtttcgatgtcggcaccaaactcaagcagatgaaccagtccgcgggccgcatcctcctcaggagtaaggatacgatccaggccgaaagcctccagcaccgaacggtgcaccccgtcgatagcccttgcatagatgcgtttcacctttttctgtttcaacagcgccaccacccggatggaagcgccgaaattctcgccgatagcgacaataacgacatcgacactattcaaaggaagcacggacaaagcctgcccgtcggttgcatcaatcacaaaggcggttgccaccttgtccttcaaactatccacacggccggcactgatgtccgcacctatcacctcatgtcccaaagccgaaagctcctcggcaagcacatgaccgtaattacccaaaccgataataatatatttcataatcaatcaatgttagcatttcacacacctgtttccaaatctcacttagttaatgataatctgtccgctcggatactggtacttcgtatgttttttctgcttgatgatgccgagcatcagtgttataagccccacacgtccgacaaacattaaaagcgccaccagcaacttgctgtcgctgcccagcaagggagtggcattcaggctggagccgaccgtactgatggccgaaacacattcaaaggtaatagcaagcagggatagtcccggctccaggatactgatgatgaagacagacacgaacagcactccgaacgacatcaccactgtagcattggaacgtcggatagagtcgtgcgacaactcacgcccgaacacctccacccgctccgtgccgcgcaataccgccacaagattcagcaccacaaccgcaaaagcgttcactttgataccgcctgcggtggactgcgaaccgccgccaatccacataagaataaggtagagcaataaagtctgtacccccaggccggctaaatccacactggaaaaacccgccgtacggggacaggcagcattgaaaaacgcctgtgtccacttatcggcaaccgacatccccgcaaaagacgcgttccactcaaaaaaagcgataccggccgtgcccaccgccaagagcaggaaggtaacaatcagcacaatacgcgtattcaggttataaagatggtagaaacggcggccgtcccactcccatgtatgcaaaaatcgccagaaacggcgtatatgataaaggataatgtccttgaagttcaccaatatggggaaaccgataccgcccagaataatcagcagtgaaatgtatatatagaacgggttatgccccttcatcagcaacggattgcccaaattgcccggcaaggtggaaaacccagcattgcagaatgccgatatagaatgaaaagccgaaaacgccagctcttcgtgcacatccatccccattgtaccatgaatatcgctccagatggcaaacgtacctatcccctctatcaccaatgtaaagccaaggatatacaccagtgtggacaacagggaattcaaagaattggaactgaccatatcgcgcaccaccaactgattatacaaagaggtattccccatgaagaacatcgcgaagaaacttgtcagcgtcatcacccccagaccgccaatctgaatcagcagaatgatgattacaaaacccgttgtcgtgaaagtggatgccacgtctaccgaagtcagtcccgtcacacacaccgcactggtggaaataaacagcgaatccacccacgagatgcccgccaccgtagaacggggaagcatcagcaaccctgtccctatgagtatgataatgaagaaactgaccgccaggataagcgaagggtttgtccgtcgccccagcaaccgtaccagcccatacgacagattcaggaaagacagcaccagcagcaatacaagatgataggccttgccgttcagaaaatcccagactgcctgcacggcgccttccacttccgggcgatgaaagataaccggaaccagcgtcagataaagcagaaaagtcaatatccaggtcagcatactgaaagtctgcctcgtatctttatactccaacaggatatgtaaggatatatcaaccagaaaaacaatccacacaccatggtacagacgctgcaattggtgagcctccgctgccgaaatggtaaatccgtgttcgtataccagaccgacaatcagcagaatggacgccaggtacgtcaaggctgtcattactcccaacgccacgcgtatatagggatgaatccatttattctggtacaaaaagaacttatgatagagcttcataaatatatcggttaatgagacatggcaaacttagacaaatctgcccttataaacaaaaaacaatggaaaaaagaaattggtttaaaaataatagctacatttggacacagaatcacttttaatttataataaccactatgagcaacaaaacaaaaagattcatccttccggaagaagaaattccacattactggtataatatacaggccgacatggtgaacaagcccatgccgccgctcaaccccgctaccaagcaaccgctgaaagcggaagatttgtatcccgtttttgcagaagagctctgccgccaagaactcaatcagaccgatgcctggattgaaatacccgaacaggtgcgcgaaatgtacaaatactaccgaagcactccgctggtgcgtgcctacggactggaaaaagcgctgggtacaccggcacatatctatttcaaaaacgagagtgtgagcccgatggggtctcacaaactgaactccgccataccgcaggcctactattgcaagcaggagggtgtgacaaacgtcaccaccgaaaccggagccggacaatggggagcttcgctggcttatgccgcccgcctcttcgggttggaagccgccgtataccaggtaaaaatcagctatgagcaaaagccttaccgccgcagtatcatgcagaccttcggtgcgcaggtaactccttcgccctccatgtccacccgtgccggaaaagacattctgaccgctcaccccaaccaccagggttcgctgggcacggccatttccgaggctatcgagctggcacgaaccacacccaactgtaagtatacactcggttccgtattgagccacgtcactctgcaccagactgtaatcggcctggaagccgaaaaacaaatgcaaatggccggcgaatatcccgatatggtcattgcctgcttcggaggcggttccaacttcggaggcatcgcattcccatttatgcgccacactatcctcgaaggcaaaaaaacacggttcattgccgcagaaccggcatcctgcccgaaactgacacgcggcaaattccaatacgacttcggcgatgaagccggatataccccgctactgccgatgtttaccctgggacataatttcgctcccgccaacatccacgccggcggtctgcgctatcacggtgccggcgtcatcgtatcgcaactgctgaaagacggctatatggaagcgacggacatcaaacaactcgaatcgttcgaagccggctgccttttcgcacaggcagaaggaatcatccctgcaccggagtcctgccacgccattgcagccactgtacgcgaagcaaataaatgcaaggaaacgggcgaagagaaagtcatcctgttcaacctgtccggccatggcctcatcgatatggcatcgtacgacaagtaccttgccggcgatttgcaaaactatgaactgaccgacaacgatatccggagaaatctggatgaaataggcaatctggtctaatagatatttgccatactgacgagcggttcatagagtttctctatgtcctgcgaatccatttcaatctgcacctggtctcccggaatcagacttgtttccgcagggaccaggttttttccatccctatgcacattgatgataacacagtgttcgggcaaggaaagctcgcttactgccttgccgtcgaagtaagaaccggtcatgacttccacagacagcgtataccggttttcttcacggaaatcgggagagttaatcatatcctcgtataagattacgttgaaagacttcatctggagcaactccgtaaaataatacgtcaaaccgcctaccaccaccgagggataaaagacttcgaagtgtccggttatctccgttatcagcacaattgccgtaagcggtgtacgctcaatggccaccaaaaatgccgacatggatatcagcatgacataagtgatatttggggactcgataatgccgtactttacagcgaccagtccaacaagctgccccaacagtccgcccgtcaccaaagtgggaataaagttaccacccggcaagcctgaagacacggagcacaccgaaaacccgaaatgcaacagcatgacggcaagcacccacattatttccgtactgccgttctgcgcctgttgcagcaaaaactgctcgccgccaccggtcaggtttacctgcatcaacgagataatgtaggcaaccagtaccaaataaaacatcttgatatataccggagacttgaccttagaatatacccgcttgaacgaaatcataagcacagagtatatcttgccggcaatggaaatgataacagccaacaaaaggaaatacttcatccggacaagaaaagtcaaaacaggttccgacacctcaatcagatgataagggttcacgggaaaaaccaaaccggcaaccgctcctgccactacacccgccaacaacgtagtaatggctgtcttaggtgcatcgaaacgttcgatggattcgataacaatcaatgaagaggccaatggagcagcaaaagcagccgcaagccccgcccctgctcccgccgccagcaactgcttgcgctcgccctgcagaatatgcgtccatcgggacacaagactgccgatataggagcctatctgcacagaaggcccctcacgccccaatgacaatccggcagccacagaaagaattccaccagcgaatttggaaaccagctccacaaacgggtgtttataggttatgcgtccgttgattaccccgcgcgtctgcggaatgccgccgccactgataagaggcatcctgcctaccagaaaggacacaaacatcagaatcccccaaaacagcaaaaacaggagtatatgccagtaccaggcagggcgggatgcgaaaaagtcgctgcggatatgtagcaggaaataaagcagatagtgataacagaccgcaataagccctgtcagcaatcccacaatcatgctgacaaaataaagccgcgcatctaccaacttcaacttccagatatgccagccgcgaaccgttttccaattctttattttctgaaaaaaacgcatggagtattctttgttatctgcattcccctacaacaatttctctcctgtgaagttctgaaccggctacccgattatatttattttaccctctcagcattgctgataataaaaaagaatctcctcatcaagccatacacagagaggagattcttcgctacattcaaaagctaagaacggagctttttatattatgacacacttattatattaaaccacagtttttccggcagcttaagacttctgtgcagaacgtaccgggtgtttatgttttccttgcgcaacagcctgcttttttctgcggtcaaattcttttttcaacttgttggcattgttctgttccgtccggtaaatcttcataatctgtttgggagaaagtatttttctgaattcatcataatacttctcacgcacatccagtatcttacgactttgggcaaaacgtccttttatctgctgctccatctcggcatccgtcagcaccgatttaggttgcggcttcatgcctttctgctccgttccctgcccggaggagagctgcctgcggttcatcattctgcattcgcgcaattccttcaaatagttctgataaaccggtacaaatctggcagccgcggcatcatccaacatcagtgtgttcaccatctgattggtctggcgttccatgaactgctccggtgtgtgacgttgccttttatctttattcacctggttttgagcagagagactgaactgaccgcctatcataaggcacgtcagaaatacgtaaatgaattttgctttcataactcttctttttttttaaagacaatactattaatttaaaaatatatcgctttcggagaagctgacgagctcttccagctcctcgtccgacatttcacgaatccatttatcagcaggggccgccgccgtacaattcccggtatccagcatctgccctcctctatcaccttccctgaaaagagacggcataaacagaaagccgaccaatgccgcagctatggcaatacccgcagaaacggttatccacaaacgatgccccgccggcttgctaccatacgtatgtttccgcacattacgctgcatttcgtcaaagaaaccttcgggcacacgatagggagttttttttcctatatcatcaaaatcaaactcttttttcataatctcaattatttagtatgtactctttaatcttttccttcgcataatgataattcaccttaagcgtatctgccttaccgtcgagaatgcgggcgatttcctcgtaatcaagttcatcatagtagcggagattgaatatcaaccgttgcttctccggcaatctcaatatggcttcctggaacttgacggccaactcattttcatagtccacataatcggaagccttcaaactggaaatcaggttttcctgaatatcttcggtcgaaacggtttcccgccttttacggctattcaacaagcggagactttcattcgttgcaatccggtaaatccatgtgctcagtgaactctcgcaacggaattgctcccaatgcctgtacacctgaataaagacttcctgcaatacatcctccgcatcttcgtgcagcactaccaaacgccgtatataataatatatcggttcctgaaaacattccaccaacagttgaaagccctgttcacggttggatttatatatttgtcgaatcttgttttcgtttatcatcagttcatccgggttttactggttagaaaggagaaatgggaagaagttaaatgagacggagcgtatttgtcgtttattaacaaaaaaagtcggggctgcatctttacaagacacagccccgacccatctgtttataagtttacggcaattaccagaatctgtttcgctcaggattatactcaaatcccactcttttcagtgtccggacaattacttctttctcaacgttcatatcctcacaaagtgcatccagtgaaggatagaaatcacgcaatttcatattgatgaagctgtacagcatcatcggatcttcaggcaatttcatagtcacaatctttgtttaaattaaacactaataccgggcgcaaaaatacaataaaatatcatacgaaagagtattatcccttgaaatctgcaagttatccatgcaaacgattgaaacgacacgtcaattaaaacgttgcggtcccctctggctaacgattacatagataatgaccggcgctccgataatcggtgtaactgcattcaaaggtataatacctgcctcaccgggcagaacgcaaatcaggttgcaaagcaatgctactgctccaccgctcaagatagtcacaggcaacaaggagttgtgattggctgtccgcaataccatacgggctatatgaggaacggcaagtccgataaatgcaaccggtccgcaaaaagcggtggttatggcagtcagcaaaccggtgatgaccaaaagccagttgcgcacatatcgtatattgattcccaaattctccgcataacgctctcccagcaataatgcgttcagaggttttatcagtaataaagagccgaataatccggcaacggtcaccaatgcgaaagcaggcatttgctggagagagacaccgccaaaattacccaatccccataccatataagattgcactccctctgccgtagcaaagaaattcagcagggcaatggcggacgaagcaatataacctatcatgatacccgttatcagcaacataacattgctttttaacaacgtagaaaagaataggataagtcccattatcagcatagcacctacaaacgccccagccagtacggaaaagaaaccggacaaactgaatgttccggcagatatgcttccaccaaaaaacagcatcacgaacgccactcccagactcgccccggagttaatgcccagaatagacgggcctgccagcggattcttaaaagcggtctgcaacatcagtccgcagactgccagtgcacctccgcaaaacaatgctgtcaaagcttgaggcaggcgggactcccatacaataaaactccagcttgccttctcgccttcatgccccatgagtatgctgaaaacatcggatacgggaatcggaaccgaccctatcagcagattagccataaacagtaatacaattaccattcctaatccgatgccatatttccatcctttattcattcaatttgcaaaaatagcgcaaaccgcctaaatctcctatttcgggatgtaaaatctgtatcaaatccgacaacaaatagtccggacggaaaggagtttcttcataaaaaggaacttttgccgtgttacatccgtaaatattccgtgttttaaatgctttgaagccagtataacctatataatcggctttcaaatcagaataggtcatatcacggtctcgattgtacttaatagtccatacatctgcatcaccagccttgtcaaaaactgtttcaaaagccaaaggaatggaaccgctgtgtttatcttccgcaaaagcataacgcccgcaggcatcattaaacaaacgcccgattgtactgcaaccacccggtacataccaggcagaaccgcttttcagttcactaacaatagacaaagacgaagacgaaagtgaagcacgttttctaagctggttataacaactatccacctcggcaaaaaggctgtcggcttttgaaacaacaccaaaaagcaacccgtagaaacgcatccattcggcacgccccaaagcggaagtctccatatagtcggcacactcgataataggaatattcagtttttcaacgcgtccgtaaccaccgctgttctcaaacggagaaagcaaaatagcatcgggatgcaggtcgataatcttttccatatcaggattcataccgtcaccacagtcggtaaccgttccgttacggtatccgtcctgtataaccgggagtttaatgtacttcaagtcacacacaccgcctatactgcctgcagctcccaacttatccataagactgcaatgaaccgaggaataaatgaccgatttgcgaagcggagtacgcacaattgtcccctcgggcatatgcgccggtaaaggttgggatgccggaaccaagatataggtgtgcaatgttttcagggtatcccaagggttacgtaaagtggcaatagtgtagtcgggataacttactaacgtgaggttatcggcataacgcagagggatagtatcaccggatataaaaacagagacagtcttgtccttcccactacaagcggaaaggaacaagaccagtgtcagcataagaaacaataatgtaacttttttcatttttaattaaagaatacagcagaattgggattaatgcctcctgcatcgaacttctcgataaatgtaccgtctttcttgaaacggtagatggtgccgttcgttgtgaactcggaagtactgatataaatatcaccgttattttcgttgacttccaacatgtacaacgtgcttgaagtaagttcggcaggggcgtctttgaggaaagaagcattattcatctgcccggtcttgatgttataagtaaagaaagtgttgactgttgtatatgtattccagtccgtcaatgaattcaccagatataagatatcattagcagcacacatacgggtggcactgcctaattccgtcaccttattgttggcagcaggatctatcatctgcaatgaatagccaacatcgccataattgccccatgaaatcaaaaagactttatcatcctcttcaatcaaagcattggggttcaaacctaccgtcaacagctctttcagcttgaaagtacgcaaatctatcacctttacgtcagtgtgctgagtgctccaatcagcagtacagctattcgccacatacagcatatcctcgcagattgccacaccttccagattgtcaccaagtccggtcaatttatccactacctccaacgttttcgcattgattttagccacagctcctccgtagaaggaagcatagatatatccatcctcagcatctatatagcgaataccagcactgaggtcattatcactaacaaacgaaacacgtttcaactccacacctgcggcattcagcttggtcagataattggaaccgcttacagctatatatatttcatcttcatacttaatcatgctctgaccaaggtcacccaacttggcattgttttgggtcttgtagatatcactgataaaatccgcatccttattgggtgcataaaaggcaagtcctgcattgttcgccccttgagagccttcgttcagaatatagacacgcgtctgcggcagtgtcaccttcgacccgccgtcatccagagaatcgtcatcgtcgtcactacaagatgccaaagagacacccaaagcaagcatgcagagcataccgaataataaacttcttactttcataatcacagttgttattgtttataattagtttttgttgttcataaatagattattcaaaacttgaaagtacccgtcaaccgccacgaacgacccggcataggataatattttatcacgtcatactgttcatcggtcagatttataatctcggcctgcaacagaagccggcaaccgcccaaagcaaactcatgagagaggctcatcgtatgctccagatagccctcaatctcattctccggaatgttctgcgacaaatagtaacgctttcccactcctaccgccgagtatcccacattcacccacggcgtttctacaatggcagacgcgtttccgctatgaagaggagtataaggcaattggtcc

SEQ ID NO: 4073 - DNA, 62597 bp, Unknown
  gut microbiota DNA sequence
ccgcaaacggtggcaatgcgcaggggagcggtggaagaggaggtgattccttcgattgccaggttcagcagtttgaagaaactccatgaggagtgtccggcaaggcggtcgccccggtcgaattctatgcttttcttccggtaacctatccagcagaatagtcctttggtatagcgttcctgttcgcgcaagtgtcttaatgtcagtacgcagcggcggtcgagcaggcggaagtctcctacgtttggcaggatatctatccggctcatcttttgtaagatgctgtagaaggcaagtgacagccggcggcgcatccagctctcttcaccacggttgcggcgtttggcgtagatgtcgtcataaccttcttcccagtattgcagcatccggtctacaagttcgggagggtcttgcaggtcggcatccattaccacgcagcagtctccggtggtgtagtcgaagcctgcaagcatggcgatttccttgccgaagttgcgcgagaggttcacgaaatttaccctgctgtccgtttgtcggagttggcggataacgtcgagtgtccggtcgctgctgccgtcattgataaataggatttcccatgcataagtgctgttgcggttgataagttctatcaagcgctgatatagggtagggagcatcgcttcttcgttgtagaccggaatcagtagggttactttcttcatttcgcaaatgtgtatggtaaatactttgcaaatatattattttccggagaagtccgggataaatattataattaaaaattattgatttgagaaatatcagtcttttcgtttgaaaacgaagcgtaccaacaggaaattgaccggaatggctatggcgaataccggaataggggcaagggttttggagagtcccaaccagaggaatgtattcagcaaaccgatgtgcagcaggtaattgaataaatgtgctccgccaaaaccgaacgccttgctccatgacggctttttgccgaacgtgaaatatgcggtaaggtagaaattggcgataaagctcagggcatagccgagggtataggctatatttacattgatgaaccgttgcagtaagaagtatatcccgtagtgcaaagcggttgcaaggatacccactataacaaaacgtatgaactcgggaaatctttttaaatgcttcattttaggtttacgctatcattgagccggcaaagttaggtattgttgtagaatatttcgtacttttgcagccggaaaaatataaaaacgaaaatatatgtcggacagaaagatagcgttctggtttattgcactgttaagtgtacttgtactggttccctttttaggggaaaccatattctattcgaaaggggaaccgcgtgaggcaatagttgcatataccatgctggaaagcggtaactggatactcccgacgaattacggagtggaaatagcttataaaccgcctttcctttattggacaatagccgtcatttcatccgtcttgggaggagttacggagttctcggcacgtatgccgtcggcgcttgcttttttggctatgcagttggtattcttcagcttcgtagccaaacgcaaggatgtaaagactgcatttctgacctctatccttcttttgtcctcttttgaagtgcaccgtgcggcggtagcttgccggcttgatatgctgcaggtttctctcatcgtgatttcattgtgtctgcttttccgatgggatgagaagaattgcaaagggattccttggctggccgtactgttgatggcatgcgctacattgacaaaagggccggtcggctctatctttccctgtttgggtatcggggtgtatcagctgttgcgcgggcgttcgttcggaaaggctttcttttcactgctgggcatcgggttgctgtccctcattcctttgggcatttggttttgggcagcttatcagcaaggcggagaggcgtttgtcaatttgatgctggaagagaataccggacgtttcttccggaaaatgtcctatgcatcgcacgagaatccgttgtggtataactttctgactattatttggggatgggttccctggactttagtgctgcttatttccttgttcggactgaaatggaaaaagatacgtcttctgccggaaggtgcttccgttggcgaacgtttaaagaaagcgtggtgcaaattccgttctcagtcaccgttgcagctttttgcgtgggtggtgattttaacgattttcatcttctattgtattcccaaaagtaagcgtagcgtctatctgctgcctatctatccgtttatgggaatgctgcttgccgaatacctgctggcattggtgcaacgaggcgcgaaagtattccggatttctgcctggattttcgttgcatttgcaatgttgcttaccgttactttctttgccgtgcgtttggacatgattcccgaaagtatttggggaacaggcaagcatgccgccgagaatatagcttttgtgaatgcactgcatacggtggagctctcactgccgaaatggctgattgtgttcctgccgcttgtagctgccggctgcttgctgtatatgctggtaaagcgtgcggacacgcgttcgctgttgtatggtacggctggctgcattttgtgtatatttgtgtcgttggacggcgtttatcagcctactatattggcggtgaagtcggacagacatctggctgtacgcctgaatgagttagagcctcaaggtctggtctattcgtatgccgactgggttaagttctatggtataaattattatctgggcgaccgggtgcgtatctttgataaactgaaccctgcccaaggttatgtgctggtgacggacgaactgcaagaacagttcctgcaggatacggaagacacctaccaggtggaggaagtataccgcactcctctgcgcagttgcgacttgcgccgaaaagtcattgtttataaattcagcaaaaaataaaaatgagtccccaagggttgattgataaatattatccggaagccaatgaattgaggcatatcctactgacgcacagccgttctgtggccgataaggctttgtggattgccgaccgccatccggagttgtctttggacagagattttctgtatgaagcagctatgttgcacgatataggtatattcctgacagatgccgacggcatttattgctttggcgacaaaccctatatctgtcatggctatttgggagcggacctggtacgttcggaaggatatccgcgtcatgccttggtttgtgaaaggcatacgggggccggtctcgcactggaggatattattgcgcaaaatctgcctgttcctcaccgggacatgcttccggtaagtatggaagagcaggttgtatgttttgcagataagttttattccaagacacatctggacagggaaaaaagtgtagagaaagcgcgtgacagcctgctgcgttatggcaaagccggcgtgcaacgctttgattattggtgtaaactgtttttgtagcaatctaaatttctttaaaaagggagattatccgtataaattacgtacttttgcccgttcaagcgtaaactattagttaatgacgccattgaaagcaaatacattcatatcattcatactactattcgtcttacttcttctttccggtgaggctgcttcgcaacgtcgtcggcgcggtgttgtaccaccaggaagacagcaagtggactctttgcggagtgattcgctggggcaggggattgcatcttctcataggagaggtatgcgcgataccttgcaacccgattctttgcggatggatacgctggctgcttccggcaagaagaaacagcctttggacgctccggtgacttatgaggcaaacgattccattgtatttactcaaggcggatatgcgcatctctatggtcagggaaaagtaaactatcagcagatagaattggcggcagatgttattaccatgaatatggatagtagcacggtttatgcccatggagtggaggattcgttgggcgtgaagaagggaacaccggttttcaaggatggagaaaccccatacgagactaatacgattcgctataacttcaagagtaagaagggtattataagtaatgtagtcagccagcagggtgaaggatatgtaaccggaaacaatgcaaaaaaaggcgctaatgacgagctgtatatgaagagtggccgatacacgacctgcgaccaccatgagcacccccacttctatatgcagatgacttacgcaaaagtgcgccccaaaaagaatgtagtgaccggacctgcctatctggtggtggaggatgtgcctttgccgcttgccgtgccgttctttttcttcccgttttcgagcagctattcgtcgggtttcctcatgcctacctatatggatgactccagccgcggtttcggtttgacggacggtggatattactttgccatcagtgacaagatggatttgaagttgcgtgccgatatttttacgaaaggttcctgggctttgaatgccgagtccaattatatcaaacggtacaaatattcgggcttgtttcaggcaagctaccaagtgacgaaaaccggtgataaaggattaccggattattctgtggctaaggacttcaagattgtatggtctcacagacaggatgcgaaggccaatccgaatcagacattttctgccagcgtgaactttgctaccagtagttatgagcgtaccaacatcggcaatatgtacaactcgaatgccatgtcgcagaatacaaaaacttcaagtatcagttattcccgttatttcttcgacaggaaactgacgattgcggcaaccaccaatatcgcacagactatgaaagactcctcggtcaatgtcactctgcccgacttgaatatctctttgtccacgctttacccttttaagcgtaagaaagcggcgggtgaagaaaaatggtatgagaagatttccatccggtatacggggcgtttgaccaacagtatccagaccaaggacaacctgctgtttaaatccaatctgataaaggactggaaaaacggtatgaagcatgagatacccatcagcgctactttcacattgttcaagtacttcaatgtaacgccttctgtcaactataccgaacgctggtatacgcgcaaggtcatgaaagactgggaccctaatgccggaggaagcggcagggaagtggctactgatacgatttacggttttcaccgtgtgtatgattacagagccagcctgggtatcaatacgaagatatacggtatgtataatcctatattccttcccaaaaagaagatacagatccgccatgtcataaccccgtcggtgagcataagtgccgcaccggattttggttcctcgcgctacggttattacgactcctatatcaagaattatgcggacggaagacgggatacggtggtttattctccctatgccggtcaggcgtttgatgtgccgggaagaggcaagcagggaaatataaccttcagtatctccaacaacctggagatgaagtattacagcagtaagaaggatacgattaagaaaatcagtctgattgacgagttgggagctaatattaattacaatatggcggctgcgacacgtccttggggtgaccttgggctgaatttgcgtttgaagttgagcaagaattacacgttcagtatgagctcttcattcaagacatacggttataagttcgataagaatggaaatgtggtagagaatgaccgtacggaatggtcctacggacgtttcggtattttccagggatacggttcttcctttagctatacgtttaataacgaaacgtggaaaaagtggaaagagaagctgagcggcactaaggatgccgataaggagaaagataaggaaaattcttccgaggaaggggaagatgcggaggcaagttccgatgagagcggcattcccaagaagaaagtggaaaaggcagcagtggatgccgatggttatcaggtgttcaagatgccgtggtctttgaatttcaattatagttttaatatttccgaagaccgtagcaagcctatcaatcggaaaaaaatgcgctatccttaccgttatactcataacttgagcgcttcgggtaatataaaactttccaataagtgggcggtgagctttaactccggttacgattttgaagcaaagaagatagtacagaccacctttaatatcacacgtgacctgcactgtttcagcatgtcggccagtctgtctcctttcggacagtggaaatattacaactttaccattcgtgccaacgcaagcattttgcaagatttgaaatgggagcagagaagccagacacagagtaatattcagtggtactaattagggtgatgtttccaactgtttctggcggcattatttgattttaggcacgggattacacggagtttaataacgttacctgtttcattccttcttccgcgaactccgtgtaattccgtgcctaaaagaaatcgtcaagcacattttttcgtaccccctttttatcagtgccgccttaccattttatctcttcctttccgtgcgctttcaggtattcattcgtcttgctgaaatgtttgtttccgaagaaaccgttgtatgcggaaagaggagaagggtgtgcggatgtcagtaccaagtgtttgttgcgatcgataaaagcaccttttcgttgtgcataagctccccataatataaagaccaaatgctcccgttcttcggcaagaatacggatggcggcatctgtaaatgtttcccagccgcggttctgatgggagccggcttgatgggcacgtacggtgagagtggcattgagcagtaatacgccttgttccgcccaacgggtcaagttgccggtaggtggcgcatctgttccgatatccgctttgatttctttaaaaatattgactaaagagggcgggaagggcacgccgtcgttgacggagaaacagagtccgtgtgcttgtccgggaccatggtatgggtcctggccgataatcactacctttaccttgtcaaaaggacataagttgaaagcattgaatatcaattttcctggtggatatatggcatatttaccatattcctcacgcacgaagttcgttaatgtgtaaaagtaatctttgtcaaattcaggctgcaaatgtgctttccagctatcttcgatctgaacgttcataataggaagtgttagtagtttacgacgctaagatacaaatatttcaccatagtatacaaagagccccgcagagttttttgctttttcctttgaaactctgcgggactttatattgtttacaggttgtatttagattaaatgtatgttgtgtgccttacattccgagcgcatatcttcgggccagatgctggcttgtatttctccgatatgggctttgcgcaaatagaacatacacaaccgggactgaccgataccgccaccgatagacaagggcagcgcatctcccatcaggcgtttgtggaaatagagttccagacgtttttcttcaccttcctgcttgagctgacgctggagggcttctttgtctacgcggatacccattgaggataattccacactgcgttgaagcacatcgtcccacaataataagtcgccgtttaagccgggcagaccgttcaagccgggagttgtgtagtcatcatagtccggagcgcgtccatcgtgttttttgccgtcgcttagtttgcaaccgatgccgatgataaatacggcgccgaacttcttggcaatggcatgctcacggcatttcggttctatattgggatacatctgccggagctcttccgcatggataaagtgtaatttctgtggcaggcagggcttgatttgcggatacatttcatataccatatattccgtacggaccattgcagcataaatgcgggtgactatctctttcagaaagtctatgttacggtcttgttcggtgataacgcgctcccaatcccattggtctacatataaggaatgtaagttgcccagctcttcgtccgcacggatggcattcatatcggtataaattccgtatcccggttctataccgtattcggcaagtgtcagacgcttccatttggcaagcgaatgtaccacttctgcctgcgcatcgcctaaatctttgatgggaaacgatacagcccgttccacaccgttcaaatcgtcgttgatacccatgccttttaatacaaagagaggggcggtgacacgacgcaggcggagttcggaagaaagattcaactgaaagaattctttaatctgtttaatgcctaattccgtttgttttaagtccaataaaggtttgtatccttcgggttttatcaggtagctcataggtttaatttctgaaacttctattaatttgttcggcaaagatagaaataatattgatacttgtttttattttgattgaaaaaataacaaaatgtatatgtatatccgtttaatgttctcaaaataatattgaaagggtaatatgcaaaacagatataaaaaatgtatgaagattaggaatatgcagagattttttctacttttgcattcgaattaaggctccgtagcttagtgaatagagcgtcagattccggttctgaaggtcgtgcgtttgaatcgcaccggggtcacagaaaaatccttgataaactgttggttatcaaggatttttttatttatatatctcttgggtcatccgtctgtttgtccttattcatcaagacccatatctgtcgttgccattcatatacggcaaatctctcatcatcggaattgtcggtcttgtcaacatatgtccttatacttggggcggaagggtatttggtctggataatatcgtctatcagatagctgtacaaccctctgattttcttgaaaagaaagcattggaacataaggttgatatattcagggttgttgcatatatacattttatacatttgatatgtatccgactgcatgtaatctgaagccctgctgctaagattggacttctcaagttcttctttcagggcttcttccagctttttgtactcggcagagtctgttatgctgtaccaataatgttcatcggacttagtggttagctttatccatgtgtaggcttcccagtaatcaattgccattcttatggaatctctgtattccgggggcatggcaaaatagagagaatctttttcccagtccttgaaaagcgttgcgatagaatcaattttctcttgtttcagttgtttatatatgtccggtagtttttcatcaagaacggaagttatctggaaggcaccgctctctatgctacagttgacccgtggattggttatgacagaatcgttgaatatgaaagctatctgcctgcctgttgcctttcccgtttcctcagcccatttttttcgtttatagttgctgatttgtccgctgattacatatttcccgaaataatcggtatccagtttaagggcaatgaaatccttcgtcgttacgataggctctctggaaatgctgtccgtctgtccggacaagatatgataccagccattttcccgaagcttgttctgacaaatcgaaaaatacggcaggaaagaaaacaatgtcagtattccaagcagctttctccacataacgtctctttgttttctaaacttcaattttaagaattgtcctctctttactcttcagatgcaagcgcatctcgcacagcttcccagttatcgcagaaagcctgcatggaagggaataacagattggctcccgcatccagtagcacttgtccgtccagcggaccggtattgacagcgattgtgaatatccctgccgctgctcccgcctggacgccgatgggtgcattctccacgacgatagcttcattggcctttacccctgctttttccagtcccatgagataaggttccggattgggcttgccatatttcacatcaaaggcggtgaccatacgttcgcgttggaacatgccgggaaagttatgcgccagtctgtccagcagggagtgctggccggaaccggttaccaatacgggagtcaacccttccgcttttattttctgtaacacttcccatgctccgggcatacgttcgggttcgggatgtctgttgaattcttcgcttttttcggcatagatactctctatcatctcaggagtggcatctttgccgtattgccgttgatatacgatgttgattgttgctgctcccgtacgtccttcgtgcatataagcttcctcgcgactcagatgcagaccgtgacgttccattaccgtatgccatgcatcggcatgataaggcatggagttgaacaacacgccgtccatgtcgaaaagaacggccttcagccggatattgtcgtatccgtgttctcttaaatagcgggatattgcttctttaaacacttgataaattgagaataaaaaattagaaataggggaataaaacagagagttgggaatcaagaaacagccttttggtgttgcacatggtaatttgtgtgcagccatttctcaattctcaactctcgatttttaatttatcacagtcttgcctggatggctttggattcttcttcgtaacccggcttgttcagcagggcgaacatattcttcttgtaggcttccacacccggttggttgaacggattaacccccagcaggtagccgctgatgccgcatgctttctcaaagaagtacagcaatccgccgagactttcctcgttcagtgcaggaatcacgatgcgcatgttgggtacgccaccgtctacgtgagccagttgtgtaccgagttccgccatcttgttcacctcgtctacgtgctttccggcgaggaagttcagaccgtcgaggttggcttcgtccgaaggaacttgcagcgaatactgcgtcttttctactgaaatgacagtttcataaatggtacgttcaccttcctgaatccattgtcccatggagtgcaggtcggtagagaaatccacggatgcagggaagatacccttgttctctttaccttcggattcaccgtaaagttgcttccaccattcgcttacgtagtgcaatttggggttgaagtttacaaggatttcaatcttcttgccgttcttgtagagttcattgcgggtggctgcatagatagctgccgggttttcagcgaacggaacatcctttccgcaagccttttccatggctgccgcgcctgctaccagcttttcgatgtcgaagcctgcaacggcgatgggcagcagacctaccggggtgagtacggagaaacggccgcctacgttatcggggataatgaaagatttgtacccttcattgtctgcagtaacgcgtgctgcgcctttcttggcatctgtaacggcaacgatcacctttttggccatctccttgccgcgttggtcttcgcattgctttttcagcaggcggaaggccaaagccgtttcggtagtggttcccgatttggaaatattgatgacaccgaatttcttgtctttcagatattcggtaagctcgtacagataatcttcaccgatgttgtgtcctgcatacagaataaccgggccggacttcttgtcctgcaaccatgcgaaactgtttgacaaagcctcgataacggcgcgtgcaccgaggtagcttccgccgattccggcaacaaccactgcttcacaattctcgcgcagcacttgcgcggtagctttcaggtctgccaggtgctcctttgtaatggaagaaggaaggtgtagccagcctaaaaagtcgttgcctttaccggttccgttttccaatgcttcctgtgcagccttgacttgggcttcgtaggcgaaaacattttctttggaaatgaatccaagagtcttttcaatgttcaaactaatcataatattataggttttaaattctgtattttgtccttgctgtcctcttttccgcattaccggaaagagtcagtcagtaacttgatttcaatcatcggtgagatgcgctcatataagatgttgtacacagcatccagtatcggcatgttcacgtggtaatgcttgttgatttccttgatgcacttggttccgtaataaccttcggctatcatttccatttctatctgggcactttttacggaatatcctttacctatcatcgtaccgaacgtacggttacggctgaagttggagtatcccgtcaccaacatgtcacccagataaacggaatcgctgatgtttctgttcagcggatgtacggtttgcaggaaacggttcatctcctgtatggcgttggacatgagtaccgcctggaaattatcgccgtatttcagtccgctgcaaatgccggcggcaatggcatatacatttttgagtacggagccgtattcgatacctgccacgtcgttgcttacggaagtcttgatgaatgaacttgccagacggcgggaaaacttgtccgccttgtctatatcgggacacgctatcgtgagataggaaagccgctcgagcgcaacctcttccgcatggcagggacccgccagcactgcgatattttcggtaggaacaccgtattctttcgtgaagtattccgatacaatcatgttgtcatcgggtacgatgcccttaatggcagtgatgatgaacttatccttgatttttgtcttcagcttcttcaggtgagccttcagataaggagaaggagttacaaagataagcgtatccgactccttgactacatcgttgatgtttgagttgaaattgatacgcttggtatcgaacttgacgcccgtcaggtaggcagggttatgaccgagacgcttaaaatcggcaatgcggtcgtcgcgccgcatataccaatttatagtctcttcttgcgccagtaccatctttgcaatggcagtggcccagcttcctccgcccataatggctatcttaccgggtagtttcatttcttagattttctcaacccaaccttccacatctttcacggtcggatttgccagttccagtttatatttcttgttgatgccgcaaatgtccatgtgcagcttttgcgggtttacatcctttatgtcgctaaccaggttgtagccggctttctggatgactgccacccattcttcggggatacccagttccatgaatttggcaggcgcgtctttcggagtgaccttttcggggcgcatctgcgggaagaacaatacttcctggatgaatgcctgtccggtcatcaacatcgtcagacggtcgatgccgataccgatgcccgatgtgggaggcataccgtattgcagcgctttcaggaagtcctggtcgataaacatagcttcgtcgtcacccttttcactcagtttcaactgctctttgaagcgttcttcctgatcgatggggtcgttcagctcactgtatgcgttggccagctctttaccgttcaccatcagctcgaagcgttcggtcagtccgggcttgctgcggtgcatcttggtcagcgggctcatctctaccggatagtcggtgatgaaggtaggctgtatgaatgtgccttcacagaattcgccgaagatttcgtctatcagcttgcctttgcccatagtgtcgtcaatctccattttcagttcgcggcacacctggcggatttcttcctcgctcttgccgttgaggtcgtagccggtcttttccttaatggcatccaggatgggcaggcggcggtaaggagccttgaagctgatggtctttccgtcgatggtagtctctgtgctgccgtttacagcgatacagatacgttcgaggagtttctcggtgaatcccatcatccagttgtagtccttatactgcacgtacagctccatgcaggtgaattccgggttatggtttttgtccataccttcgttacggaaattctttccgatttcgtatacaccctcaaaaccgcctacgataagtctcttcaggtaaagctcggtggcgatacgcaggtagaggtccatatccaatgagttgtggtgggtgatgaaggggcgtgcgcttgcaccgccggggatggattgcagaatcggtgtttccacttccgtatagccggcttcgtccagtacggcacgcatggtcttgatgattgtggcgcgtttcaggaatgtttccttgacgccgtcgttcacgatgaggtccacgtagcgttggcggtagcgcagttccgggtcgtcgaacgagtcgtaggccacaccgtctttatattttacgataggaagcggtttgatgcttttggcaagcacggtcagcttctgggcatggatactgatttcgcccatctgagtgcggaatacaaagccttcgataccgatgaagtcgcctaaatcgagcaagcgtttgaatacggtattatacatttccttgtcttcgcccggacagatgtcatcgcgggtgatatatacttggatacggcctttggagtcctgtaattcgatgaaagaggctttccccatgacgcggcggctcatgatgcgtccggctacggatacgtggcgcggttcggcgtcgtctttgaattcttttttaatatcggtagagaaagcgttggttacatactctgctgcgggatagggttcgatacccatcgcgcgaagttcattcatgctgttgcgacgaatgatttcttgttcacttagttctaatacgttcatttcgctataattcactcaatttggggacaaaaatacgaaacatttttcagatagcgaacctttaggggaatttattcgccgtatgctccgtgtgctctgtggcaggttgtgggataatcgccgggtaagttctcgggagaaggagccttgggtcgagcttgatacgctttcttccctgtctctgatacgcttccggtaggagagagtgcggttcttccttaagacgggacgcgatacttgctcacctgacgaattttgagtacctttgcgccctcgaaaaaacaggtaaaaagtatggcaggacaaaaaacacccacagcgttgggcacggagaatataggtaaattactgatgcagtacgccgttccggcaatcatcgccatgacggcatcttccttatataatatggtggacagtatcttcatcggtcacggtgtgggcacaatggctatttcgggactggcgttgactttccccttgatgaaccttgcagcggctttcggttcgctggtaggtgtgggagcggctacgttgatttccgtcaaactcgggcagaaggactatgacacggcgcagcgggtactgggcaatgtatttgtgctgaatattctgctgggtgtggcttttacggtggttgtaatggcattcctcgaccctattctttactttttcggcggcagtgacgagactgtggggtatgcgcgcgattatatgcagattatccttctcggcaatgccgttacgcatctttatctggggttgaatgcggtgctgcgttcttcggggcatccgcagaaggcgatgtatgccaccattgccacggtgattatcaacacgatactcgacccggtgttcatctacggtttcggctggggcattcgcggggcggccattgccacgattgtggcgcaggtcctatcattgatatggcagctcaggatattcagcaataaagacgaactgctgcattttcaccgcggtattttccgtttgaagcgtaagatagtcttcgattcactggctatcggcatgtcgccgttcctgatgaatatggcggcatgcttcatcgtaatccttatcaatcagggattgaaaaagtatggcggcgatttggctatcggcgctttcggcattgtcaaccggctggtatttatcatcgtaatgattgtaatgggactgaaccagggaatgcagcccattgcgggctataacttcggagccgggcagcatgcccgtgtcatcaagactctgaaactgacgataatctatgcaacctgtgtcactactttcggctttattgtaggtatgctcttctccgactgggtagtgagtatctttacttcggatgccgaactgattgccctttcggcaaagggcctgcgcattgtggtgatgtttttccccattataggctttcaaatggttaccgctaacttcttccagagtataggaatggcgagtaaggcaatatttctttcccttacccgccagatgatggtgttgctgccttgtctgataattctgccccgttttttcggtgtggcaggcgtttggtatagtatgccgatttccgacttgctggccagtctgatagcgggcacgatgctggtgtggcagctccgcaaattcaaggcgcaggcataaggcggtattgtgttaaaacaaagatacttaccaccggtctcttttcagctacatccaactttcatcagtttggcagcggaaccatgggtctgcgtccgtgattcagtttcaagcctgctttataggactccggaccgtgcaggttctttatatccatctcaccgagattgaccagaatgccgcgtgccatgaggccggcatcttcgtttgctttgcgcggaagtgtttcggctttgtctttcaggtctgccagatgcacgcggatggcgggctgcatggctgtatccagagagaggcattccagcagggaataaccgatttttctatcggcttcttttgccggattattcaggcgttcgatgcctttggcggtttctcccagataagcggcggcataggcggtttcgcaggctatgtaggggtcggcatccttgagcaaggcaagcagaggtgcgggacaggttttcaattctcctttggctccgagttgtgccaaaccgacggacgcccaatagcgcatttcgggatattggctggacagtgctttctcaaatacgggagcatcgcctgcgtgggctgtacctgccagctctacgaggttgtacagctcgttcaaggggtatttctctttacgtactttatcatacaataccacattctcgcgagaggtgggtatgaagaaacccaggtctttggtggcgcggatatggtcggaaagggctgtacgcatctttaccagcacttctgcgtattcgggagagtcggacaggttgtgcagttcaccggggtctttttcaaggtcgaacagcatttcggcaggatgggcattgaatgtctgcgcccagtcggggttggtgttatgtccgcctaaaaccagcttgtcccatgctttgttggacggcatgccccattggtagtaattgcgcagggcaaactgacggtagggtatgtagctgcggatgtatttgaaacgtccgtcggttgcagcacgtaccggcatgaagtggtgcagttggttggccgccagtgcgaactggatttcacgcttttcatcggacgcgtacttcccgaacaatgcctttccctgcatgtgtttgggcggttttacgcctgcaagactaagtacggtaggtcccaagtctgtgaagttgaccaaagaataatctttgccggatgccttttctcccgccaggtgttgccacttgggcgggaagtaggctatcaggggcacttccagaccgctttcatacaaatagcctttgccgcgtggaacgcaaccgccgtggtcgctgaagaagaagataatcgtgttgtcgtccaatcctttttctttcaggtctttcaggaagaatcccagccatgtgtccacatcctgcacggcttccagatggccggcatagtcggaacgtacttcgggcaggtcgggcacgtaggcgggtagggtgagcagttccggataaatgccctcttgggtgtaatctcgccgtccgtcggtatggaaggtgcggatacgtcccatgtgcgaggtcaccgtattgtatacggcaaagaaaggctggtctttaccacgcttcgggctgttgtaagaggcttctctcgtacattcgtcccagcagcttttgttgtccgtggtggaattgtagtgtgtcttgctgttgttggtgcagtaatatccggcttcacgcagccattgcgggaagaagatgtttgccggggtgtcgtatggaaccggatggacatccattccgtaggtcgaggagtagcaacccgtaatgagcgatgagcgtgcggccgaactttgcggggccaccgaccatgcgttcatgaattgtatgccgcgggcagccagactgtctgcattgggggtgtgcacatccttgttgccgtagcagccgaattcgtaagcactggtatcttcgaaggtgagccagagaatattgggcctttcgtttttcttgttgtctgccgcatccgcttgggcggtatgcagcccgcagaaagcggtacacatgagtagagataagtttttcatgctatgttaaatgttagttttacatgttatatcggtttttcagtagtggttgctaaggtagggcatttgttctgataagcatgcctgatgtgtttaaaaagctgctaatattgttttggcatgcaggttttcaacaaaattgatgaagattcaacaaaattgcagaaccggtaaacgtatgttgcggtgtattggagaaaataaggacgctatattaccggaatgtcttacttttgaaaaataaatctaatagtgtataatggtatgagaaacatcgtttttatagtgattgcgtttgtactttctttctcgggacgtgtatgtgccggaaatcccgtttattcagacaactccttgcgcaatgatgcggagaaactgctggtggagtgggtggatgctctgctgacctaccaatgcgaagggctgcatccgtcgctcgacggcggtattctgtgtcccgcctgtgcccgcattcacggacggataggagacacggttcttcctctgatgtatctggcagacaaaaccggcaatgacaaatatctgcttgctgccaagaaactgatgaaatggatggagaacgtgcaccgtccggacggctcctggatgaatgatgtacacgtatccgattggagcgggactaccgtattcgccgctattgctctgtatgaggcagtgcattatcacgggcatctgctggatgactctacgcgtaaccattggaaagagcagttgttggaagccggcgaattcatgatgaagaatccgcagatgtacagccgccgtatgcaggggagtatgaagcgcctgaacaatgtgaactattccgcttcggtgacgtatgccttgcaggctcttggagagatgttcgaccgcccggacttcaaggaggaagcccggattgttgcttcggacttgaagaagttctttacggcgaacgattcctttttatacggcgaaggacctaaaatatggacacctaccaagaacggctgcctcccggtggacttgggatataatgtagaggaatccttgcctaatctggcttattatgcgcttatggtgaacgaccgggagttgctctccatcgtggaacgctccatgaatacccatctggaatttatgttgcccgacggtgcatgggacaacagttggggcacgcgcagttttaagtggacatattggggcggacgtacaagcgacggctttatgggcggttattatgccatggctgcgcatcatccggagtacctggaggctattcgccgcaatatacaattactgaaaaaatcgacggatgacggtttgcttcatgccggacgcgattatcgggcctctggcattccggcttgtattcatcataccttcggacatgccaaggcgctgacggcttttcttgagcttccacccgtcaagacgcaacaatacaaggcattgccgcgcgataatgcttatggggtaaagtatttccgggatattcgtacatggctggttgcagaaggtccgtggcgttctacatgtaccggtttcgatgcggaatataaggtaaaaggaactcatcccatgggaggcgccgtttctctgttatggcacgaacaggctggtccggtatttgccgctacgaccaaccggtatgctttgatagaagcacccaatatgcagagcaacagtcggaagtatataatgagcggaacgccgcgggttgaaatggtgcaatacggaacgatttacagtaatctggacgacttggatacggatattacgtatactaaagaaaaagatacgcaccgtttccatgtcaatacccatctggtggatgccgaccagcagactccgattcagggagcgattcccgtaacgttggattatgtgtattcccaacagggcttgtcgatagaaatggaacattgccctttgaccgcctgcctggttttaccggttatcgccgcgccttcggaagttgtggatattacgccggaaggcatgcgccttcagaaaaaggacggcgtgttggaggtagtttgcgtgaacggcaggatgaaggttgctcctaccgataaagacggacggatatttaatcctgtgccgggcttttctttcattcccttgcaggtttttccggatagtccggataagaaaattcaagttaaaatcatgtataattaatgtattttttattttctttgttctgtgttaataatgtaatatgtatgaaaatatttcgatttttattagtattatgcggaacattgtttgccagtatggggcttgccggtgaaatagacggtatgcgtttcatacatatcggtttggaagaagggttgtcgcatagtaccatattcggaatcaatcaggataaagaaggcaatctgtggtttgccacttatgacggatttaataaatatgacggttataattttactgtctaccggcatcagtataagaatccgaagagtatagccagcgatataacccgttgtgtcgtcattgacaatgataaccggatatggataggaacgagagaaggcttgtcgctttataatcatcgcaagaatgaattttctaatttcttttataagaaaaagggacaaaatgtaacagtcaggaatattgtgcctatgcagaaggactggcttatgcttgggacaaccgaaggtattttactttttgacgtgaaaggagaacgtttcctgaatgatacgttgtcggctactttacattcgttgaaaccgttaacgctgctcaggcaagatgatgatatttttattggcactaaagggaaggtatatatgtattcattgcaaaacggagcattggaaacattacttgacctgcatgacaaggtgcagataaacagtatcttgtgccagactcccaatcggatatgggtagcgactgaaggcaacgggctgtatctgtatgatgtaaagaacaaaaagctggataactatcgttatgagaataagctttcctgtttgaactccaattatgtgcgttcgttggcattggatcaggagaaccgtttgtgggtagggacttacagcgggctgaatatatatcaggaagggaaagaacgctttatatcggttgagagttcgatggctcaggcagggacgttgtcgcagaactcggtgcgttgcatcttcagagactcgcagggcggaatgtggctgggtacatactggggaggattgaattactatcatcctttgtgcaaccgtttccagcagattaaacatattcctttctccaattcgctcagtgataatgttgtcagttgcattgtagaggataaaaagaacaatttatggatcggaacaagtgacggtggtctgaacttctatgataatacggcgaaaacttataagaattatttgtttaatccggatatatcggaaggtgttccttttaaagacgttaaaacggtatatgtagatgaagcatcggataagatatatgtaggcgcccacgctggcggtatgatggtgttgcatcgtaaaaccggaagaaaggagttttataatcagcaaaacgggggcttgccgagcaatcatatttattctattatatccgatgggaaagacggtctttggatagcttctctggactatttgtttcattttgatattgccggaaaacgctttaccgttataaatgaagatgtggaagggcatccgattcaaaaaaagaaccgtttgctatttagggattcccgtaagcgcatctggataggtggggagaagggactttccgtttataatcaggtggggatggctttgcaggccaatacggattttcgtataactccggtattgcaacagtcttttgtgaattgtatctacgagtctttatccggttctatatgggtaggtacccgtgacgggctttttgccttgaaggaagcggataaggagttgcagcaatatacaacggacgacggtttgccaagcaatgttatctatggaatactggaagacagttacgggcgcttgtgggtcagtaccaatcagggactgagttgttttgacccggagaaccgtaaaatgcgcaattttacaatagtggacgggctgcagagcaatcagtttaatgccggttcttattgccgcatcggcaatggcaatatgttgttcggcggcattaacggcatcaccatgttccgtcccgaaaccctgatagacaacccttatactccgaaaccggtaatcaataagctttttgtttttaacaaggaggtgcttccgaatgatgaaactggaatactgaaagagaatatagagagtgttaaccacataaccctgaaatcttcccaaaactcgttttccctttcctttgtcgtttccaactacatagccggcaagcacaatacgtttgcctataagttgaagggatatcatgatgaatggtataaacagggagacataagtccggtgtcgtactccaatttgccggcaggagattataccttccttttaaaggcagccaataatgacggaaagtggagcggggaggtagaggctcttcacatccgtgtccttccggtctggtatcgcacgtggtgggcctttttgatttttgcattgttttttattttgttggtttttgctgtgttccgtttcttctggttgcgtaagagtatgcagacagaaatccgtatggagcggcttgacagggaaaaaaaggaagaaatcagccagatgaaaatccgtttttatgtgaatatctcacatgagttacgtactccgttgactttgattatttctcctttgcaagagttgctcagtagtgtcaccgggcattgggagcgcgaaaagctgttgtatattcagcggaatgcaagaagactgttgcatttggtcaatcaactgatggactaccggcgtgccgaattgggtatttttgagttgaggccgagttatgccaatgcatataaaagggtattgaacagctttttaaattacgagagtctggcaaagaaaaaggacatagactataatttctattcagaattgcaggatgaggatgtgttgtttgacggtacttatctggatttgattatcaacaatctattatccaatgcttttaagtatacggaagaaggggagaggatttatgtaaaactctacagagaagataaaaatgttgttttgcaggtagcagatacgggagtgggcataccaaaggataagcagaggaagattttcgaacgtttttatcaggtagagaacgtacacgaaggaagcggcattggattatcgctggttcagcgtctggttgaattgcatcacgggcagataacgttggtgagcgaggttggaaaaggctctacgttttccatttatattcctcaggacaagtcggtgtatactgcggaggaacttgcggagagcaagggagagatggaggaacagcgtgtctattcgacaaatgcgcatgaggtttataccgatgatgtagaaacggaagtggcagaagccggtgaaaaagaggcgggaagcaggcatggaacaattcttatagtggaagacaatgaggagctgcggcggtatttgttcaacggtctgtccgctcagtttaatctgatagaggcggagaacgggcaaaaggcgttggaggtgcttaaagaaaatgacgtagacctgattctttcggatgttatgatgccggttatggatggagtcaaactttgtaaatcggtgaaacagaatttgagaacctgtcatataccggtgtatctgttgtctgccaaggtcgatataaagtatcagttgcaggggttgcaggtaggtgcggacgattacatacccaaaccgttctcgatggatgtattgatagcaaagattttgaatatgctgcgtacccgctatcgtatttttgagcattattccaatgcggcagagatagaaccggagaagatagcaaacaatgccatggatgaggaactgttgaggaaagcgattgctgtcgtggagaaaaacatgagcaatgtggagttctcaacggagcagtttgccagcgagatgaatatgagccgttccaatctccatttgaagttgaaggctataacaggaaaatcggctattgattttattcataaaatacgttttaaccgtgcttgtcagttattgaaggaaggtaagtatacggtttctgaaatcagttttatggtgggatataatactccttcttatttttccgcccgtttcaagaagtatatcggttgtcttcctacggagtatggaaaacagtgacgtatgtatcatttatggaatattattatgaagatgtattttttttctccctttcttctgatacttgttcattcattgctggtatcatgcagccgtacgggcacacccggctttacgatagcgagggaagacagtttgcggtatgaaggcaagacagttgaacttttcagaatgactaacaggaatggaatgacggttaaggttaccaattatggggcttctttaacatttgtttccgctcctgataaagagggcgtttttgctccggtagttttaggacttgacagcttgcgatattatctgggcagacaacccaagcttggtgctacggtagggcgttatgcaaatagaataaggaacgcggaacttgttttgaatgaccgggtctactatctggataaaaacaataaagggcattccattcatggtggcgtcaggggatttcatacccgggtttttaatacggatacgtcctatgtggtgaaggatacggcagtgattcgctttagttatctgagccctgatgcggaagggggatttccgggaaatctgaatatatcgttggcttataaattgacgcatgacaatgaagtgattctggattacagggcatcgaccgacaagccgactgtggttaatctgacaaatcacagttatttcaatttaacggggtgtaaggagtctgtactgaaccattattgtatgattgacggagattcgattacaccggttgatgccgcaggtattcctaccggagaacttatggcggtggcgggtacggaatacgacttcagaaccttgcaggcgcttggcgggcgcattggagaacttaaaaaaggatatgataccaattataaactcaataagcagccgggaactttggcgcttgcggctaaaattgtagagccggaatccggtcgggtactgaaggcgtataccaccgaaccgggtatgcagttctatactccggcagctaatctggactatctgaaagggcatggcaagcagtcatatgggcggtattacggcttttgtctcgaaatgcaacattttccggattcgcctcataatccgcattttccgactaccgtgttgctgccgggagagacttaccggcaaaccacggtctacagatttgaaacattatccgaaacagaataaattatttaattaaaacattggttatgaaaacgaaaagctggaaaaagtacatgtgtttaatgggtatttcacttatgatgatgccggctgtctgcgcaatgcaaacggctgaaggcggaaatggggacaatcccgttaaaaaaacgcgtagcactacttttattagtggagaaaaggcgtgggagcccgcaggagaaggcgtgacccggcagattatggggtatgacggacaggtaatgctggtaaaagtgaaatttgaaaaaggagcgataggtactcctcatactcactaccatacccaaaccacttatgtggcaagtggaaagtttgagtttacggtggggaatgagaagaaaacggtaaaggcaggtgacggtatttacatcgaacctgatattttgcacggatgtgtctgtctggaaccgggggtacttatagactgctttgctccaatgagaagtgattttttgaaatgagttttgtattgatgggtatttgattttattaacagatttgcaaatctctatcccaaaaggataaccccctttgtacatagctgtagggctatatattgtacaaaattactctgtattatacaaaattgatatttggaaagtgtaaaagtgtaacgaatgaaaacaatacttttacactttttttagcatttgcagtaagtttgccctcgaaaaattatttctaaagtagaaccttagatttatttattatgtacaaattaaaagaactgtttttaatgtttatcctcgcctttgtgagcatatccgcatatgcgcaaagtctgaccgttaccggtaaggtcattgatagtgagggttatgaagtaatcggtggtagtgttactgttaaaggtgccgccggcgttggaaccgttacggatgtaaacggtaactactccttaaaagtaaatgacgcatccaaagatgtactcgtcttttcgtacgtgggtatgacttcccaagaagtaaaggtcaatggtaagaatgtaatcaatgtaacgttgaaggctgatgccgtgttactggatgaagtagtagcaatcggttatgccacggttaagcgtaaggacttgactgggtctgtggcatcggtaggtaatcaggaaattgctaaagtacctgttagtgatgttacacaagcgttgtcaggacgtatggccggtgtacaggttcagcaaacggaaggagctccgggatcttctgtttccattcgtatccgtggtggtatctctattacccaaagtaatgagcctctttatgttatcgatggttttcccagtgaggatggaatgtcaactcttgacccggccgagatcgaaacgattgacgtgttgaaagatgcttctgcaacagctatttatggtgcacgtggtgctaatggtgttgtcgtgataacaactaaaaatggaagtaaatcaggtggtaaagcaactgttacatttgatagttatgttggcttcaagaaaatagctaaaaagttggatgtgctttctccgtatgaattcgctttgttggattatgaacgtactctttataaaataggaaaaggtgatggtggtgatttgaataagtggaaaagcatctatggagattatagtgatcttgaagcgaattatgccggacggaaaggtatcaattggcaggatgaaacgctgggccgtacagctttaacacaaaattatcgtgtaggtgtgtccggtaatacggaaaaaatgcaatatagcttggcatatgcttattatgatgaagagggtgcgatgatgtatagtggttcaaagaaacataatatttctttcaatatgaaccacgaagtaaataaatggttaagcgttaatgcccgtattagctatgaccaaatgcgtgttgaaggtatgggtacttctgaaggtggcgaccgttttaataaaatgcaacatattctgcaatatcgtccgacaattggtatcaatggtgtagatacggatttgttgggtgatgaagatcctttgtttgcagatgatagcggtaatgttatgcaaaatccgcttttgtcagctgccgaagaaactaaagacagagagtggcgtactttccaagcaaatgcaggtgctactattaaattattgaaaggcttgactttccgtaacacaactggtatgcgctatcagactcgtcgtaatgatattttttacggtgatcagtccatgactgccaaacgctcaagtattaatggtaatattactaatattgaaaatagcagtttccaaacatctaatgtgttgacttataattggtataatgataaccacaatgtaacggcgatgttaggacatgagtatgtaactaaatggacacgtaattttatggctggagctaataatttcccgaatgacgaaattggtctgggtgatttgtcattaggtactccgattactccgacttccagtgaaaactatgatgataagttgctctcattctttgcacgtgtgaactataatcttatggacaagtatttgttcacagcttctgtacgtgcagacggttcttctaagttcggtaaaaataataaatggggatatttcccagctttttctgccgcatggcgtttgggtgaggaagaatttataaaagatttgaatattttttccgatttaaaattccgtattggttatggtttggctggtaacaaccgtattggcagttattccagtttggctattatgtcatcagtgacttatcctaatgctaacagtgcacagtccggttatgcttctaaacaagttcctaatcctgatttgaagtgggaagctaataaaacgttcaatattggtttggacctcggtttctttaatcaacgtttgactatatctccggagttctatattaatcgtagtagtaatttgttatttgatgcccgccttccgaactcttccggttattcttctatgactattaatgccggtgagacagagaataaaggtattgatttgactattaattcagtgaatattacaaataaagatttcacatggaatacaacggttactttatcgcacaataagaattcggtaaaccagttgacgggtgagaaggtgcagctttatttagcggatatgggtgttaagggtgctggctcttcacataaaatcggagttggtgagcctttaggacaattctatggatatatttctgacggtttgtatcaagtgtctgattttaactatgataaagcatcgggtaaatatacattaaaagatggtattccttatcgtggtgagaaagataaggtacaaccgggtatgttgaaatttaagaatatagacggaagtgaagataataaaattacagaggatgataaaaccgtcataggaaatgcattcccgaagttctatggtggtatcaataatacttttacttataaggactttgatttgagtatattcttgacttacagttttggaaatgatgtattgaatgcaaccaagctgactaatacaagaacagctttaactaacaaaaatgtattggctgccgctgattggaatcaccgttgggtaacgattaataaagaaactggcgctctgataacagatccggaagaacttgctgctgccaatcaaggaaaaacaattgcttgctttgatgataacggctcatctgataatgcagttatacactcatgggctgtagaagatggttcttacctgaagctgagtaatataacactggggtacacattccctaaaaagattgttaataaaattggtttgtctaaattgcgtttgtatgctacaggtaataatttgctgacttggaccaagtacacaggttatgatccggaagtatctactatgagtaatgccatgacaccgggtgtggattttggtgcctatccgagaagccgctcttttgtgtttggtgttaatgtcgcattttaatgaactataaaaatcgaaatacaatgaaaaaaaataaattggtatatgtgcttggtgcactattgagtatgggtgtggtttcttgtgatttaacggaaaaacctacttcattctatgaaatggatacctattttacaactgcggataaagccaaaatggcggtaataggtatttacgactgtcttgctgctgaaggatcttatggacagtatgtcatgccgtttgcttcgtcggatgatatgtatatggttagaggaacagccaccggtgatggtactcgtcgtgatatttcccattatgctcttacttcttccaatacttgggttgcttccgtctggaattatatctatgagggaatagaccgcgcaaatactgcaattgcaggtattgagaagatgccgggctacgaaaatagtgatgagttgaaagaattggtcgctcaggcccgtttccttcgtgcttttttggcatttgatttggtacgttattggggtgatgtaccttttaaaactacaagtaccggtagctttggggatacagctcaaccccgtacagaacgagagaaaatctatgaccagattattattgatttggattttgctaaaatacatttgaaaccgggaaatgaagttgcttcttctgaagtaccttgccgtggagctgctcgtgctttattgatgcgtgtctatttgcagcgtgccggttatagtttggatcgtactacccgtacattgactcgtccggatgatgcaacgcgtaagaattattttgatgctgtgatagaggagtggaaagcttttggtacagaaggttatcataatttctatggtgccggatacgaagaactctttaaaaactattccaagctggtgttgaataatcaggaaagtttgtgggaaatagcttttgaaccgaacaatggccaaaaagacaatgccggatattgggctacatataacggaccgttggtagatgctccggacgcaggtagtggagctgcaaatcaaaactttttcggacgtgctaatgctttcttcatcgtattgccttattggggagatttttatgatgacaatgatgttcgtcgtgatgtgaattttgttgattatgtatacagatgggtaaaaaaagataaagctcaggtgaagatgtctgtatgccaagaaatatccaagaacatgtatcgttatccgggtaagtggcgtagagaatggatggcaccgggatttgtcgatcctaaccatacaggtgttaactactgcccgttacgttacgcagatgtagtgctgatggctgctgaggcttataatgaaataaatgatactccgaaagcgtgggagttattgaatgatgtacgtgctcgcgctcatgcaacggaaatcaattcctctaattatgcaagtttgatgaaagcgcctaaagtgtatgatttgcctttcattagcgatggagatgaggcaggcaagttccgtacagctctttattgggaacgggcttttgaaacagcttatgaaggtcagcgtaaatttgatttaattcgttggggagttttaggtgatgcgttgcgtgctgctcagacatatatagaaggttgggaagaaggtgctaatctatttaaagatgtagataaaaacggaaaaccgacaaaattagaagaaggagaatctcccgctgtatgggatccggttgtttgggcaacacaaaattatgtcgcaggtcataattttgtggatggtaagcatgaattactccctattcctttggccgaaatacaatctaatgcacagttgaatggagaaaataatccggggtatgaataaataggtattatattcgttataactattgaaatagagtctatttcatctactttttaaaattctgaaagatgtttcataagagtgttttcttatgccaaacatctttcagtttttcagagggtgatatatctgttgttatattatatgaaaaaaacattattactttgctatattgcaattttatatggtttttccggctgctctcccaaacaaccggaaaaagattatacctggctgaaacagggaatagaaacggctgcgttacaattgaaatttaccgtggctgaaatcggagattcaatccggttgccccgttccatctggacgggctatgacacggactttttatgtcgtcagctggataagaaacagttgacaggcaaagactctgcccggctgaaacccatacatgataatttgggttcccgccgttattgcttttccatttacgattggacaagcggttttttccccggcaatctttggctcgcttatcaacttaccggcgatgaaagcttgagggaaagcgctgtgaagttcactaattatctttatccgctgcgtgagtataaaggtacgcatgatataggttttatgatgaattgcagctacggtaacgccaatcgtttatctcctgccgacagcgtccgcagtgcattgatacaaacagcggataacctgtgcggccgtttcaatccggagataggctgtatccgttcctggaacttcgggaagtggaatttccccgttatcatagacaatatgatgaacctggacctgctgttttatgccactcgcctgaccggtgatgataaatataaggagcttgccttgacacacgcaaggactacgatgaaaaatcattttagagatgattattcatcctaccatgtagtcagttacaataacgatgggacggtggaaaaaaagtgcacgcatcagggaaagagtgacacatcgtcgtgggcgcgcggacaagcatggggattatatggctacacatcctgttatcgcgagtctaaggatgtgcaatttttgcggcaggccgagaatatagcctcgttaatcatgcggcgcgtaaagacggaagatgcagttcccttgtgggattatgatgcgcccgacacgcctcagacgcctcgtgacgcatctgctgccgctattaccgcttccgccctgatagaactgagcacgcttgtagaagacggacaagcatatatggagtatgccgggaagttgctcaaaagcctttcgtccgacgggtatttggcaaaaccgggaaccaaccggggctttgtactgatgcattcaacgggctcattgccgaacggttccgaaatagatacgccgcttaactatgccgattattattatctggaggcattgctccgttatatgcaggtaaaagagattgattataagcatatttaaattcattattaccatatcatgaagacaataagatacatttttagcatttgcttgcttatgcttgctgttgttgcagacgcacagcaactaaggcaggaggcttttgaactgataaatttggattatcctggtttggagaaagtaaaagcggcatgctcccggcagaagtgggaggcggcggcacaggaactgttgaattattaccgtagccgtaccggtattacacatccggatatagacttgaaaaacctcaccatatccagggaagaacagaaatgggcggatgatgctttggagcataccttctttgtacataaaggctatcagccttcctacaactacggcaaagatatcaactgggagtactggccggtaaaagacaatgagttgcgttggcagcttcatcgtcataagtggtttacgcctatgggtaaggcataccgtatctccggagatgagaaatacgcaaaggagtgggtacatcaatatatggattgggttcagaaaaacccgctggtgaacatgaagcaggaagagttcgagcttgtcagtgccggtgaggtaaaggaagatgccgacaatgtatattttgcatggcggcaactggaagtcagcaaccgtttgcaggaccagacctgccagtttcttttgttttgctccgcatcggcgtttactccggagttcctgaccgagtttatcgtcaattatcaccgccatggcgcacatctcctgaaaaattattcagcagaaggtaaccacctgctgtttgaagcccaacgtatggtttatgccggtgttttctttccggaactgaaagatgccgccatttggagagaaagtggaatcaatatcctgaatcgtgaaatcaagaagcaggtatacaatgacggcggacagtacgagctggatccccattatcaccttgcggcaatcaacatattctgcaaggccttgcgcatggcggattgtaacggtttccgcaatgagtttccgtcggaatacctggatacggtcaagaatatgattgctttctatgccaacatttgttttcccgactacaccaacccttgtttcagtgatgccaagttgggcgattatcaggcagaacttgccaactaccgcgattggcttgcattgttccccgactgcgattggatacgttattatgcgacagaagggcgtgaaggcgctcctttcccttatctttcccacggggcattgacatccggtttctttactttcagaaacggttggaagaaggatgcaacggtcatggtagttaaagccggacctaaaggagagtggcattgtcagccggataacggtactttcgaactctggttcaacggcaggaatctgtttcccgataccggtgcatacgtctatgccggaagtgccgaagtgatgaaactgcgcaactggttccgccagacacgtgtacataacaccctgactttggacggacgcaaccttgaaaccacgcagtccgtaaccggattgtggcagccggaaggtaaggagcagatactggtaacggaaaatcccggttataaagggttgaaacatcgtcgtaccgtctttcttgtggaccaggcctattttgtaatagtggacgaagccacaggcaatgccagaggaaccgtgaatttgaattatcatttccgtgaaggtgaggtaaacgttgatgcggagaaaaatatggtgactacggcttatgagggttcgagtaatgtgaagttgcaatgttttccggaaaaaagcgcgtctttaagagcggaagagggctggcgttccactgcctaccgtcagcgcgtagcccgtacttcggtagctttcgataccaataaggatgatgcggaggctgtgcgctacataacggttatctatccggtgaaggatgttgccgcttacccggtacttgaagcaaaattcctgaacaaaagttatgatgagaaaggggttgaggtcgaagtttccgtcaacggtacggtacgtcggttggcatcgcggctgaactgaatcatgaatgcggcagactgttttaaggcagacagttgctttgtgaacagtaaccgtcctgatacacaggaaatggatttgttttcattattttgatatttaatggaagaatacctatatttgctatctgcaaaacagatagattaaataaagtatggacaataaatttatagtaaatataggccgccagttaggcagtggcggacgggaaatcggagagaagctggctgcccggctgggtattgacttctacgacaaggaattgattaaccttgcttccgaagaaagcggattatgccgtgaattctttgaaaaagccgatgaaaaagcgtctcagggaattataggcggtctgttcgggatgcgtttcccgtttatcagtgacggggctatgccggctgccaactgtttgagcaacgatgcgttgtttaaggtgcaaagcgatgtgatacggaaactggcttccgagaaatcctgtttgttcgtagggcgttgcgccgactacattttgcgggataatccgcgttgcgtcaacatcttcatctctgcttcgcgcgaggatcgtatagcccgtttatgccgtctgcactctatttcggagagtgcggcggaagagaagatgaacaaagcggacaagcggcgtgccgaatattacaactattacagctataagacatggggagcggctgctacctatcatctttgcgtcgattcgtccgtattgggcattgacgaaacggtcggctatatagaagagttcgtaaggaagaaactgaaactgtacgaataaacgctgtgaccattgcaaatgaaatcgggaagaattttactgccatcctaacggagattatagtaaaattcttcccgattttattgataagagcctgaaagctccttgaactgattttacatcattgccagcaatatcatctgtccggcgaggatgcgcaggaacatcgtcagtggataaaccgtagaataacctaccgatggagcgtcattgcccgatgcctggttggaatatgccaatgcgggagggtcggtgttactgccggcaatcagtcccatcagcgtgaaataattgaccttgcaatagaaccgggcaatcataccgattatcagcaacgggatggtggtaatcaggaaaccgtagcctacatacgccagaccgcttccttccacgaccgtctgtacaaaatgctcacctgcctctatgcctacgctggcaaggaaaagtacgatacctatttcgcgcagcatcaggttggcactcatggtggtatacgttacaagatgcatcttatgtccgaaacgtccgataaggatggctaccaccagcggaccgcccgccagacctaatttcaccggtgtcggcatgcccggaaatgcgatgggaaggctgcctaacagaatgccgaggaagataccgacgaagatggtaacgatgttcggcgtatccagacgcttcaactggttgcccagtacaccggccacacgttccaccgcgtcctgctggcctacaaccattacacggtcacctacctggagcaccaggttgggatcggcaaacaggtccatacccgaacggttgatacgtgtcacgttaactccgtacatactgcggaagtgcatgcttccaagtttttttccgttgatttccgatttggtcaccagaatacggcgtgagaccatcggagtgtcctgcttctcccagtccacttgaatttcccttccgataaaggcggtaaccgcttcggcgtcttcctcggaacatacgatgaacaactggtcgccgatgtggaattccgtatcctggtttggaatgctgacgtgaccttcgtgacggatacgcgagcatacgaaagaacgtcccagaaaatccttcacctgaatcagctttttgccgtcgatagcctcattgcgcacttccagatgcagcatatgcggcatgtgcttcatatccgtttcttgcgtgttaagctcctcttcttcttttttcaggttgatgcggcagatgtaacgcacggcgataatagagccgatgatgccgaccacaccgagcgggtaggcgcaggcatatcccaatgcgatggggtctcccgtataattcagctggttcaacgcttcctgagctgcacccagaccgggagtgttggttacggcaccgtacaaaatgcctactatcatcggcaggtctatatttccatcgatgaaataaatgcccagtgcgactactatgttcagtgccacaatgcccacggcaagcatgttcagcgtcataccccctttcttgaaagaggagaagaacgacggccctacctgcagaccgatgcagaatacaaataaaatcaaaccaaattcgcggatgaaatgtaggatgtgtatttcacctgtaaatccgaaatgtcccatcaggataccggtaaagaggacaaacgtcactcccaacgatactccgaaaactttaatcttgcccagcaacacccccacggatataacgaatgcgtacaggcaaacgatatgtgcgacggatgtcgggtcccaaagaagactttctaaccaattcatagtaccttatttattgctttttaaaattttgcgcaaaattacttaataaaggggagctggcaaagggttttcttttctttttgtaataccagctttgcaaaagcaaggtatctatggagggatgccgggaataaggatggacatagtgttatccgtaagtgcaattttccctaaaaaacctttttgtttgaagtatttccttatatttgcaagtctattgatgacaaaatgaatactattcatctattttaattttaaataaactatggcagacagtaaagaaaaactcttctcggacttttctccggtttctacggaacagtggatggagaaagtaaccgcagacttaaagggtgcggactttgagaaaaagctcgtttggaggacgaatgagggattcaaggtaaaacctttctatcgtatggaagaccttgaaggtttaaagaccacggatgctcttcccggtgagttcccttatcttagaggtacaaagaaaaacaataatgagtggttcgtccgtcaggaaataaaggtggaatctcccgaagcagccaatgccaaggcgttggacattttgaacaagggtgtcgattcgctctctttccacgtgaaagccaaagaactgagtgcggagtatatcgaaactttgctgaaagacatctgtgcggagtgcatagaattgaatttctccacttgtcagggacacgtggtggaattggcacaacttctggtcggttatttccaaaagaaagattatgacctcacgaagttgcaaggttccattaactacgattatttcaacaagatgcttgccaaaggcaaggaaaagggcgatatggtggctactgccaaggctttgattgaagctaccgccatgcttccgaaataccgcgtcctgaacgtgaatgcgctgacgttgaacaatgccggtgcatatatctatcaggaactgggctacgcgctggcttggggtaatgaatacatgaaccagctgaccgatgccggactgccggcagctttggtagccaagaagataaagtttaatttcggtatcagttccaattacttccttgaaatagcaaaattccgcgctgcccgtatgttgtgggccaatatcgtggcttcctataatccggaatgcctgcgcgactgcgaaaacaagggcgaacacaacgaatgccgctgtgctgccaagatgagaatacatgcggaaacgtccactttcaaccttactttgttcgatgcgcacgtaaacctgttgcgtacgcagaccgaggctatgagtgccgctcttgcaggcgtcgactccatgacggttgttccgttcgacaagacgtatgccgttcccgatgaattctccgaacgtctggcacgcaaccagcagctgctcctgaaagaggaatcgcatttcgacaaggttatcgacccggctgccggttcttactacatcgagaacctgactgtggctattgccaagcaggcttgggagctgttccttgcagtggaagaagacggaggtttctacgcatccgtaaaatccggcaagatacaggctgccgtgaacgagagcaatacggcccgccatgcagccgttgccaagcgtaaggaagtgctgttgggtactaaccagttcccgaacttcaacgagaaggcgggcgacaagaaaccgttggaagcttcttgctgttgcggcggacacagcacttgcgaaaaggatgttccgtcactgaacttcgaccgtgcagccagcgaatttgaagcgttgcgtctggaaacggaagcgtccggcaagcgtcccaaagcatttatgctgactatcggcaacctggctatgcgtcaggcacgtgcccaatactcttgtaacttcctggcctgtgccggatatgaagttgttgacaacctcggtttcccgaccgtagaggaaggtgtggaagctgcaatggcggctaaagccgatattgtggttctctgttcgagcgatgatgaatatgcggaatatgcaattcccgctttcaaggccttgaacggccgcgccatgtttatcgtagccggcgctcccgcttgcatggacgagctgaaagcggcaggtatcgagaactttatccatgttcgtgtcaacgttctggaaacattaaaggaattcaacgctaaacttttgaagtaagatgagaaaagattttaaaaacttagatatatatgccgctttccagcccgccaatggtgctgagtggcaaaaggctaacggcattaaagccgactggaagactccggaacacattgaagtgaagcctgtttacaccaaagaagacctcgaaggtatggaacacctcgactatgcggcaggtatcccgccttatctgcgcggtccgtactctgtaatgtacaccttgcgtccgtggactatccgccagtatgcagggttctctactgccgaggagtccaatgctttctatcgccgtaacctggcttccggacagaaaggtctgtccgtggcattcgacctggctactcaccgcggctacgaccccgaccacgaacgtgtggtaggcgacgtcggtaaggcaggtgtgtccatctgttcactggaaaacatgaaggtgctcttcgatggcattcccttgaacaagatgtccgtatccatgaccatgaacggtgcggtgcttcctatcatggcattctacatcaatgccggtctggagcaaggcgccaagttggaagaaatggcgggtactatccagaacgatatcctgaaggaattcatggtgcgtaacacctatatctatccgcctgcattctccatgaagattatctccgatatctttgaatacacatctcagaagatgcctaagttcaactctatctctatctccggttaccatatgcaggaagccggcgccacagcggacatcgagttggcttacaccctggccgacggtctggaatatcttcgtgcaggtgttgccgcaggtatcgacatcgacgcattcgcaccgcgtctgtcattcttctgggctatcggcaccaaccacttcatggagatagccaagatgcgtgccgcacgtatgttgtgggcgaagattgtgaaacagttcaacccgaaaaacccgaaatcactcgcattgcgtacgcactcccagacttccggctggtcgctgaccgagcaggacccgttcaacaacgtgggccgtacctgtatcgaggctatggctgccgctttgggacatacccaatccttgcacaccaacgctttggacgaggctatcgcattgcctaccgatttctctgcgcgtattgcacgtaatacgcagatttatattcaggaagaaacttacatctgcaagaatgtcgacccgtggggcggttcttactatgtagagtctctgaccaatgagcttgcgcacaaggcttgggagctgattcaggaaatcgagaagctgggcggtatggcgaaggccatcgaaaccggtatccccaagatgcgtatcgaagaggctgccgcacgcacgcaggcacgtatcgacagtggttcgcagactattgtgggtgtaaacaaatatcgtctggagaaagaagctcctattgatattcttgagattgacaatacggctgtccgccaggaacagatccagaacctgaagatattgaaggaaggccgtgatgaggctgccgtgcagaaagcactcgatgccatcaccaaatgtgtggagacgaaggaaggcaacctgctggaactggcagtggaagcagcacgtgtccgtgccacattgggcgagatttcgtatgcttgcgaaaaagttgtaggacgttataaagcagtaatcagaactatttcaggcgtgtattcatcagaaagtaagaacgacagcgacttccacagagcttgtgagttggctgagaaatttgcgaagaaagagggacgtcagccccgtatcatggtagctaaaatgggtcaggacggtcacgaccgcggcgccaaagtggtggcaacgggttatgccgactgcggtttcgacgtagatatgggacctctgttccagactcctgccgaagctgcccgcgaagcggtggaaaacgacgttcacgtagtgggtgtttcttcattggctgccggacacaagacattggttccgcagattattgaagaactcaagaagttgggccgtgaggatattgtagtgattgcaggcggtgtgattcccgcacaggactatgatttcctttataaggccggcgtagctgccatctttggtccgggtactccggtggcaaaggctgcttgccagattcttgaaatcctgttggatgaggaataatccgcaacgataaatgttaaaaaaaggacggtgtgcgtttgcatatccgtccttttttcttaatctgtgttataaaacatactttttttcttggataatttgcagatttagcaaatgtccgtatctttgcaatgtgtttttcatagtattagatttaaggttaacaaaggttggagtacagcggtactcctttttttatgcccgtacgtcaggatgagcttaggggagagattatgaaatcaatgattatcaatcattcaaggtcttatgatactgaaccttccttatcaccagtttgctttcaccggaaatttgttgcgacacaattgtgaaacggatgcgcgtcagctttttccggttccaggagtggattaatttcggatcggtcagttcgacggtatccgttgcgggcgataagagttttttatcgtattccactttgaacctacctgcctctcctgtcagagtaatgtttttgttgcggtcgatttcgacttcgcagcaggtcatcaggtttaatacactcggttcgttgcatgccgaaagtttccatttgtcggtgattgtgaaatccttttttctgtgcagcgtatagttgcgaatccagctttttacatttgcttcctgcggataggcatgggcaatgtccacctggtaggatacggttttggcggtggctttgtattgctggctgtgtgcggcaaactcccggccgttcttctgcggggttccgttgatgaggggcaggttgtgataatcggactgcatggtccatatcgtgtaccgctccggtccgaaggtctgtcgggtataagtacctacgcctgcatcgataagcaccggcagggcattgtagtaaaggatacacgaccccacatcgttatggttatggctttcctgattgtttccgcctttcgctgcgaagaagaagccgtcgcttttgccttcggtgtcgcgtgccacgcagatttgggtgtctttaaaccaataagtgccggtaagcggttcgccttgcggatggccgatgatatctttgtacataaaaagctcgtccagggcagaagcgaaatatccgtttaccccgtccttgaaactttggttttgctgtgccatgaatgaggcgaatttcatcatggcggggtctccggtcagttcgccgtaccggtagaggatacccgggcttggacttactttgggtgcggagtcggcgaagtttacaaaatagttgccgccgatgtgtacccggtaaatatattgcgccatattacgcaagaggggagcgttgaagatgttcaccttgtttccggttactttagccagcaaatccagaaacttcagggcatagccggaagccccgctccaataggtgggaccctcgtcgcaggctccgtcctcgtgatacatgctgaaaaagaaatcagtggatttcatcagcttccagactccttgccgcacacgttccgggtctttctctatcagcatcagggcttgcagcacgttgtagttaatccacggattccagttatttacctgctggtcgccgaatcccatccaccagtaatcatcccgtgcgaagtaggggtttatcaggtttctgttgacttcctcgataatccgttcgttaatcagcgggctcaccttgtcgaattcgtctttcaggaaatagtaagtccatgccatttgcgcgccgatgtcggccactaccagttcgatggtcggttcattcctgtcgggcagtccggagcggtctttctgaaagccgaggtgtgccgagtgtatccaggacgtctcgcacagaaaccatacaccgtctatgatggcatccataaatctgccttgtccctctaccagttctgcgagggtcaaggcttgcagggctttgtggttggcgcgtccggtgcggatttcgccggtgcgcttaaaggcaaggtagtcggaggcaaggtccggtttccattcgtgtttcagggcgtgttcgccgttcctgatgataagctccctcatttcgggggttgttttctctttccaggatttccggtcggtataggcgggatagtccacccagctttgccggtagcggagtacattgcccaattcctcgtaagaaacggtctgctcaagaagatgcctttcggttgcatgggcgggaaaattgatacagacagttgcgatacataatgaacttgccagtaacaggctttttatttttgacatttgcggaatgtattagatgatttaaaataaagaacgaggataaatgattatccccgttcgtcaaagttaattaaaaaaacaaccgtttacccaacctttaccctttatttttcaaatcgatgtatctttttaatgcttccatatagtagtaatccgcgtagttcagcggtacgtctatttcagagccatgcggcagtgagccggtggaatgcatcagcacgtaaccttgattgctgcctttggctgccagatatttcggaccggacaagtttttcaggattgtttcggcatagtcggaatattttttgccgtcgggtgcaaatgtgctgagctccaggaaagccgatgccgtgacagccgcggcagacgcatcacgcggagtcttttcacctgccggggcatcatagtcccagtaaggaatcaggtcgtccgtctttacacgttccataatcatgtctgcaatgtgaacggcttcctgcaggaaagccgtgtcccgggtttcgcgatagcaggaagtatagccgtatactccccacgcttggccgcgcgaccaggccgattctgcatttttaccctggtgtgtctgtttgatttccacgcttccgtcattgttatagctgaccacgtgataggaggtgtagtccggacggaagtggtttttcatagtggtttgtgcatgctttacagccacattcttatacttctcatctcctgtcagcttatatacgttgaacagcaggtccaggttcatcatattgtcaatgattacggggaagttccacgcaccgaagtcccacgagcgtatacaaccgatttccgggttgaaacgggcgcacagattatccgctgtttctacgagtacggctttaatggtgtcgttaggggcgaggcggagggcattgccatagctgcaattcatcatgaagcccatgtcatgggtacctttcagctcacgtatcgggttcaggatgttggtatattcgatggcacgttttttcaactcttcatcgccggtcagttcataggcataccaaaggcttccggggaagaatccgctggtccagtcggcaatgccgcaaagacgtttttgtcctaattgcagggcttcgggattggggtgtaaagagtcgatgtatgctttgttctcgcgctgcagctgagtatcaagaaagtttacatcatagccggaatgtatggaacgtgggaacttgcttgttccggagagttcctcggcggttgatttcaactgataggaagcggcatcgagtgcgttgcttatccaggcttctttctggaccggagtgtttttgcagcctgtcatgcctatgagcagagcggttgcaagcaacagagagtttcttttcatgtcagtaagtatttagtgatttttgttcaccggcaaaaatatggatattcgtgaaatatcctatgcaggattgttgaaaggtgtttgggtgtagtttaaaggtatgttacttttgtcgaatactgttttaattctgtattttcttgggtgaaagcattacatttacctcttcaggctttttacctgaaagcctgtaaatagtgtgtggttttctaataggcggagtccgaaatatccgtctccctcattctttttaaccggcagtcggaacagctcctcgccgttgacactgtaagttgtgattcctttttccacacggattttgatgtcgtaccatttatttggaatcagcaagtgcgccttgtccgtatactctttgattacggggcgggctatggcatcactggtatccgccgctttggcaaagtactggcggaagcgggtagtggagttgtggtttccgccgtatcccacataaaacaggcttagcgttttataatgttggaaaattccgtttcgccattcgctgcgtgcgaagagattgtcgggggattccgggtcattggcgccccaaaagcagttcaggtcgctaagacggtcgtattttccgccttgcatcagcatcttcacgcgatagccgatttcataatcaccggtaaggcgttggttgtaccaaagtgtaagaccgtcgggtgcggtaatttccagcgtatcgcttgatacaaggatttttacttttccggagtggtcttcgattgtccagttctttaaaacgacctgtgcctgaaccgtgaaaggaagtaacatcagtacacttcccaatagcaatttgtgaaaggagctttttgtcataaatattactttagtttacagttgatattcagatagtagtttttgctgttgtggcaaaggtaaccaaatatttataaagtagagcccggttgtgctggaaggattttatgtgttatattttattgtgcattgcattggataggtggtttttatctgcaatggtaaaaacggatatttggttatcactcatcatttatgtggtaatatattgagagatagtgttttattgcatgctgataacagttttgtggtgatgaccaaattccggtcatcaccacaaaaagtaaaatatcaggattttacaattcgatatacaactcctttttgagtatgcctgttttccaggttattcttcttcaagatacgtccgaaatgctttgcatgcccgtctgtcagctttatgtcactgttttttgcatgcagaatttccaaaatctgtatcggcgacatccactctccctcttccccttcttgcggtaaacggaaatgacaatggaacaactgctcaatcggactgatttgctcgaattcccggttattttctttcagaacggcctcatccttgtcattaaaccaatatctttcgccgctgcgtatcgcttgcatggcttgtgcatacaactggcggtagtttatcgtcacgttcgtatcaatgggagcagtcacttccacacatacaaaacggcggctgccgctgctgtccgtcagcaggtctttgtggttgctcgtcccgatgaacgaggcataccgccttatctcctggatactgcttccatagggcttgcgcaggttggcaacgggtttttgcagaaggtgtttcagaaagccttgctgatggatgctcacctggtcgaactcgtcgatattcaccagcagaaagcgccccaggtacatttccgcatcgcgtttactgccgaaatccagactgtcggtatagccgaagcggagttcgggaggaaggataatacggcagaaggtggacttgcggtaaccctgtgcacctatcagcagcggtgatgtgctgttggcgtgcatcctgttgcccagtccgcgccaatgcgccaccatgttcagaaaccaacggtagaacagctcacgccaatacggattgttgcagggtacaagtccggcaagcgcacggatgcggtctttgccatcccagcggcctacgccgcacaggtattcttccactggattgtacagcggcacgcggttagaggtcaggtagcggttcacgtctctgtcccacacacgcaatccctcttgcagggcatccatagccacgctgttgcgcgctcgctggtccattacatgaaaatagaagtggatggagtcgcgttggcgatattccaaatcacccatcagctggttgtaccggaattcgtaacggcgttccatgaactcgttcagtttcagcatcgtgtcctgttcgggagtcagtacggattttctgccgaatccccggcactcgcggtagagattgtgcagtgcggtgcgcaccgtctgttcgtctgcctgccgtcggtagtgcatcattacctgccggacggcttcttcttcggggatgccgcttttgaagcattgctcgcctatggagatgagcagcgggtgaaaatcatcccggtcgcgctgccagttctccacttcgtccagcgcacgacccagggctgtttcaaacagcagagtgaaagtttgcgaggagtcgaatcctggctgcaaccgctttaaagggttgttttctgccaattttcgttggttgaatgtccgctcgccgggcatcgtcacgggttgttcgagacagaaaggtacagcatcgggggcaaagtaaggcgcttcgtccagcgtcatgcggaaagtatcggcaggcgagggctctttcaacgttacgggaaacggaagcaggggttggtaacattgtaccgccatgcggtaagcatgcgcatggaacaggctgatttcttcttcccgctgcggaagtttgccgttcggtaaggcaaacagcgcccatatctttacgctccgtccgctgcttcctgcgaaagctgcataggtttggggaaggagcgccgcctgttcttttaccagttccgcttcggacatgccggacagtccgcctacttccagcagtacaataccgttgtagcgtttcatccgccgttcgccctcgcggttgcgtccgtactccgtagcggggcatatgcgggggagcttgtcgatgtgtccgtaggttccgccgctaccatggcttgtatattcgagcatggtgcgtaatgcactgacatgcccgggcttggtttccgacttgattctggtaataaatgcggctgtatcgcaggtactgatactttccgtgcccgcgtcacggttttccttgataaaggttattctcatccggtgttggttgtttggaaaaatttagtggagataagagcgtttctcttagactctgcaagatacgcataaaacgggccggaagcaagcaaatccgcccttttgttttaagatttttgccagtatttatctccggaaataaatggaaataatcggaaaacaaaccgttgaaaacttgacttttcctgatggattttgtatctttacaaggtgtaaaaccccgttttgcaattgcgggccgaagagccttcatatgcgggccccacagcccgcagccggcaaccgccgggcctgcaactgcaaaacggggttttactataagcataacggcattttgcatggtccggacaaataaaaacaacgaagcaaagcgttgtttatcttcctgctttttccgaacggaccgcggagaatatccgaatttatgcggccgaatggcgtaagctaccgatacaacaggattttcaattattacataactaaaaaaaaagaacgacaatggcagcagagtatgattttcagaggaagcccaacccgaaaggagacggcgaattacaacccatgtatccccgcatcgtgaacaaggggactatcaccgtcaaacgtctggtcagcgatatttcacaggcaaccagttttactcccggagacgtcgagggagtgcttgctgcattggaaagccgcatctcctattacctttccgaagggcatcatgtacagttgggcaatatgggacatttctcggcgggactgacagcacgccctgtcatggacaaaaaggaaatccatgcgcagacgatatttttcggcaaggtgcatttccgcgtatcgcccggcttccggaaacagtgtgccggatttgtggaacgtgtaagggcagggtatggcttccggcatagtgaggatatcagcggtgcggaacgttaccgcagactatgcgcatttttggatgcaaatcctttcattacgcgcaaggattacagcggaattacgggacttttgaagaacaaggcgttgaatgacctcaatttattggtggagaaaggtattttaacaacattggggcaagggtcgcataaagtgtatgtaaggactgtaaatcagtgtgttgcagagtaaaatataacggaatgtaccttaaaaacagtgacgaccgaatattggtcgtcactgttataatattctttgtactacgtcaactatcctataatcagtaggttagtgtaggtagtgatgagtgatgacaaatattcctaatctaactaaagaatttaaatagcgcttagtagtagatgtacttttccctatcaatttagctatcttagacgaattaagtcccggatattgattgatgatatctaagacttcctgctctttggaatttacagtatcatttgttctatataacttcatcaagctttattttatttatctttaaccgtatcattgggctatattcccaaattgccttttgcaaaattagtgatattggataacggaataaataaaaaaataagcgatttttccttatcaatcaagctgttctctctgtcttacaaggacgattcttcggatgtttttcatacggaatctatgatagtaataacaatttgtttttgcgtttgctaaattaggttctttcccgctcaatcgctttttagtgtgttgtaattctacagtatcgttgatttggcttttagttctgtccagttttcttatatttttgtagaaaaagtatgggacaggtagataaaaacagcctgggattacgttgaatacgtaaacccaggctgtttttacgggtatttgcgggggcttgtttaccgattgttttttattctgccaaagccgcccttctacttcagtccgaaataattttctccttctccgccgacaggacttatgacgggaatattcccccctgcggcagtcaggattacgctttctcctttctttaaatccaataggtactcaccctctttttgcagggtcaatgtagcattgccggcctttacaaccggatttgccatatcggtgcgtaggatacacggttctccggcaaggcttttgatacggatgaagcttgtctttccgcctttccgcacagcggatacgaggaaagcgccttcggttctcaggtccttgaactgtacatctttccattgggaaggtacggcagggaatacacgtatctttccgctccagctttgcagcaacatgtcgtgtatgcactgtgcgcccgacaacggggtctcgataaccggtccgctctccatgtacatggtgttggggcgcagggtgcgggcaaacaggccgttgagtttctccagtgccttgtctccctcgccgaatgcagcatacagcgaagaagcccccgtataagtatatccgaggatattgcccggcaggctgtgccagtgctctacggatttttccataacttccttgctgccgttctgctctgcattcaacaggtagagcggatagaacatcagcagatgcgagtagtggcggtgcgagcggctgaaaggtacatccttgcctatcatcatgccgttttcgtcctgcgggtagtcggtcaggtgttctgcaacttgtttccagcggggtatcagctcgtcatcgacagatagaatcctgcttgcctcgagcaatgtattgcatccccagcgcagcagggcgatgtcgtagttgcagtcttcggcagtaccgtactccggagaataggttcttttcaaatggagcttgcccgatttatcttctgtcaggaaaggcagatagaaattgacggcccgtctcagtgtagggtacagggtattcctcaatatcgattcgtccatgctgaagcggtattgcagccagaggttatggcaaatccacgtcaggttgcctacctgggctttcttttcggttccgggaacattcaccgttgcccccgtcagggtaaagtcggtggctacgggcagtgcggcggcatctttccggtagggttcgggaacgttgtttatcaggttgtccagattgtttcctatcgcgtccaccagcggcatgcccagttccagccggttggatgggtatacggaccagtagctcagttgcacattcaggttccaccaggcattgggccagggagtcagcacttgccagggaccgctgttgtcgagcagtccgccgccggtgcgggtggccgatgccagcttgtacatctgcgcccagtagaaattctccatcttcttgtcgggaaggctcacgaaactttgcggatagtagttatgccaccattcccggtgtgctttccggagcacgggcaggtcggcttcctgcaggcttgccagtgccgtttccgccttttgcaaagcctctgttccgggaaaggaatgtgcgttgcttacgataagcgtgcttgtattctctttcctaatctctttccaggctgtggcagtaccgccgcaggcaagcaggggctgccagcagaggttcagcccattgcgtgcggacagttgcggggcgggattggacacatagtcttttttgaggtggttcttgttacctttccggattgcattcaactgcctcggcgaatccgtgttttccggatagaatttccaggtgaactccttttcgcctgccgtagcttcggcttcgaccaggatatagggactctcggaagtgacacaggctctcagctttatctctccccgggtggtacggatacacccggtggtttcagcgttccataagtccagcctcaggtcgccggattttatttctcccacgggatgcagaagaaaataaccgataagcagccggcctcttccatagatgctcgcatcgtctgtgcggtggtcgtgtaccatactgttgcctacatctacccgtatggcgttttttccgggttctttgcagatataggaacccatgctgccgtttcccatgaagggggcttcgtaccaggtttggggcaggcgggtccaggtcatgtcttgccgggacatgaaacttttccagtctgtctggctgtaacagccggctgtcaggtaccagattgcgattgtgagcagtagcagtttcttcatgtgtccgtatatgttttcttgttgatatgttttcttgctgttagatttccagttcgggaacttcgtctttcaactcggtctttttgccgttatcgtgtatcacggttgcaccgtaatccttgtaactgacgcttgcgtcgcagtctttgcgcgtgttgcgtacctcgaaagaaggctttccggcagtggatatgtttgctttgatattccagtcaccgatttggatactaccgtctttcagtttgcggggagcagcttgtgcgttttccgcatcattgtctttggcatgtgtgtacacaattgtagcgaagcggtacactttctgtttgtccgacgttgcggtgaagtgccaatggttgggatagggtgcgaagtgtcccttctcatcggcacgcagccagttgacggcaggtacgaagaaccgggaggtcgtatccgtttccagcgttccggaggagaagagataggcatcggacgcaccgtccttgctggtggcccgtatgtgtacgtattcccgggtcttgtccacattcatggggttggtaaccgtatgtagcaggtagctccaggtcacgggttcttcggcttccagctcgtcgtatataaaggaataaccgcttttgcctaaagttacgatgtggcggcggaagattttcagaccggtatcgtcccaaccgttttcaggggaaaattccaggttgctctgttcgccgcgcagcagccagagcggagagataacctttccgtaggcattggaagcatcgcctgccacatagctgatattgtcgctgacatagtaacggggaatccagccgtaaccttccgttccgatgcgttgtcccatgccgttcaccagaatggtgttgtgggcgcgggtggcgcggtggcagtaaacgccgtgtatgtcggtaaagctggtatggtgtccgctactgtaaaagagcgactggccgttccagaaagtattgaaagcattctggttggctatggcgtgcgaggtactgccgtaaggactgctgcggaagctgagcatggcgcttttgcgggtatcgtccaggttggtggagaacgaggccagtccgctctgcgggaatacatgtcccatgggaaggtctttcaaacccggcccgtccggcaagggcttgtcgcattgcaggcggaaccatgcaaggccgccggctttcgaggtgcttccctgttcgagtatgtcgggctggcgggcgctgatgtggcgcacgtaatctgcggcaaatgtattgccggtcatacgcgccagagcatcggcgtagccaacacgcgtaccgctcggggtaagtatcttctggtgcgagctgccgttaccgcccgatttggagaatggcggctgctggtagatgacgtacagggcatttccctgataccaggggtcggagaaatagttgaagccggtgaggcgggtatagaaataaggcacttccacaagtgtacggatgttgacgtggaagtaggagtcgccgttgtgccaggctccgtccttgttcagaccggggaagcgggcgagccacaggttatagcaatagtccgtccacgcatcggcttcgggcagttcaccgtaaacggtaaaggctgccatggtgaggatgcggaaagtcatctgccacacatggttgtcggcgatgtggttttccaggcggttgatattgtgcatgtacatgctgttgccgaattcctttatttcgttcagcaggaatctgcgcgtggcatcgtccagaacatcgtacagtgcgtcgtatgccatggagcagagcgagagcagggtggcttcgttgaagtcgcccactacgtttttgttgtctccccaggtcgccatctccttgacgcgcttcacggcttcgtcggcatagcggcggtctttggtgagtaggtaggcgcggataagtacgtcggtatttgcttcttcgctgtcgatgatgcggcggctttcgcgggtgagcatggcatttttctgcatctcgttggccagtccttttgccaggtccgagttaatgtcgtttaccgacttcatcggagtagagagtactttgtcggcacgtttgaggtaagtcttgcgttcggttttgccctcgctgcgctttatgaaaccgtcccattcgtccctgtcgagccatacacgggggtggtgggcaggcaggttcttaagtacggcatccagtgcgggcgggcagaatttccggggattgttctttaccgtaaattgcagcgtatcgctccattcggtctttccgtccgtaacatagccgtattgccagtaccatgtgcccggagccaaatcctgtttggggttgaagaacggccagcgcgtctcggcttgtacggtcgtttccggcttgaatgccggagtttgcgagtagcgcaggaagtagcgtagcttgctcttgtctgtttcttttttgggggtgtcctcttccgcaccgtccagtccgcttcgcaggatgttgagacctgccggcagcggccattggaaggacacggcacggtcgctgatttcagcgccgtccagcggcgaggaagttgcacgcatttcgtgcatcagcgttgtgccggtgagcctgatggtggcttctccggccgtttgcgcctgtgcagtggctgcaagactgaagaaaatgatggtggatactattttgttcatatacagcgttatataagtttattgattccaggtctgatggcggtttaatgtttggttgcttttgtgagcacctttcccggcacatcgtgcaatttgggacgcgtcggtctgattttatggctattcatgaatttctcaagaatatcacgatgttcctgcgccacttttgtataggcgttctccatcatcaggtttcttgtctcgccccggtcgttctgcatgtcgaacagttgttcgcggtgtcttcctttgtcgtacaatacatatttgtagcgtgcggtgcgtaccatccagccccgtgtcttgctgccgtcgaattgtgtttcggtaatgacatactcctggtggggagcttgtggattgccttcttcggctattttgcggaacgactttccgtcagcgtcttccggcagtttggcgcctgcccagtcgcaaacggtagcgaagaagtctacaccattactgatgagctgcggcagcttcgtgccggcatgtttcttgccgggcagggttacgatgaacgggatgtttaccacttcctcgtacagggccgatttctggttccagtggtgggcgcctattccgtctccgtggtcgctggagaagataacgacggtattctcccacaagttattcttgtcgatggcgtctacaatcttgccgatttcacggtctactttctctacgaggcgatagtatgtgtagcggtacatacgccagtcttcgggggtgaaagtggcggtggggtagacgttgaaattgttttccctttctttctcgatgacatcggcatcgtatgggttcttggcaaagttagggggaagtcccggacaattgcgtatttcgggtatgtccaggttgccgtagggaagattctggctgcgtgcatattcgcagatattatgcggattgtcataagaagctaccaggaagaacggtttgtcgtgtttgcgcgaaaggaattccacacatgcttctgccagtccgtcatcgctgtgtttgtaaatttggtcgaatcctcgcactttatccggaatatcgagttcgggcacatgccatttgccgccgtaggcgcattcgtatccagcattttttaccagtgtgcccaaagtccgtgtctggagcgattcttgtagcggagcaccgttgaccaacagtcctgttgtgcctggatagcatcctgtaaacatggcgccgcgtgaagggccgctgagcggtgcggtacagtaagcattctggaacatgataccggcggcagccagtctgtccagattgggcgtgtgcaagtccgggtttccggcgcagctcatggcgtttgccgtatgctggtcggtgaagatgtagatgatgttgggacgttcggcagcgtgtgccattgacgtactgagcagggataggcaggctatgtgcttcactgagattcgttttaccatattattagttttataattgttttttcggagactgttcctcgattgctaaattacgcctttttccatgtatctgcggactctaatgttttttttatggtacggaatgtttatttgattgctaattttgtatagttctgttttaattttgtgctaaaagagggatacggaggcactgaaatgcgggggaggaatgtgaacgcggagatgcggaaacacagaacaggagaggggacagggagaggaacagccttacatgaaaagagccggttttaagactctgtgtctctgcatctctgtgtctgaaacaagaacaacttccttccccggctcgcttaatcgaatttttgcattatctttgcattgcctaaaaaagaaaagcgaatgatagtttgtattgccgaaaagccttccgtggcgcgtgacatagccgatgtactcggagcgaaagataagaaagacgggtacatcgagggaaacggataccaggtgacctggacgttcgggcatctctgtacccttaaggaaccgcacgaatacacacccaactggaagtcgtggagcttgggcagcctgcctatggttccgccccgtttcggcatcaagctcatcagcaaccctacctacgaacgccagttccacgtaatcgagaacctcatgcagcatgccgacatgattataaactgcggtgatgccggacaggagggagagttgattcagcgttgggtgatgcagaaagccggtgcgcgttgtccggtgaagcgtctgtggatttcctcgctgacggaagaagccatccgcgaagggtttgccaaactgagggatgcgtccgatttccagccgttgtacgaggcggggctttcgcgtgccatcggcgactggctgctgggcatgaacgccacccgcctgtacaccatgaagtacgggcagaaccggcaggtactttccatcggacgtgtgcagacgcctacgctcgcgctcatcgtaaaccgacagctcgaaatacagaacttcgttcccaagcaatactgggaactgaagacggtgtatcgcgacaccaccttctccgccattctccgcaagagcgatgaggaactggtgctggaagcggaaaaacagaaagaaggggcagccgccaaagctgccaaacccgaagataaccggggaatagaacctatcacagaccgggaacggggtgaggctttgctggaacggataaagaattctccttttaccataacgaacgtcacccgcaagaacgggaaagaggctccgccccgtttgttcgacctgacgtccctgcaggtggagtgcaaccggaaattcgctttctctgccgacgagacgctgaaaaccatccagtcgctttacgaaaagaaagtaacgacttatccgcgtgtagataccacttttttgagtgacgacatctatcccaaatgtcccggcatactgaagggactgcgcgattaccaggcattgactgctccgttggacggggctactctgccgaagtcgaagaaggtgttcgacaactcgaaagtgacggaccaccatgccatcattcctaccggccagccgccccagaacctgacggatatggagcgccgcgtattcgacctgattgcacgtcgtttcattgccgtgttctatccggactgtctgttcgctacaaccaccgtaataggcgaggtggagcagatagagtttaaggtttcgggcaagcagatactggaacccggctggcgtgtggtattcggcacgccctcggcacagtcgcaggaggaaaaagaggagaagggcggcgaagaagagaacgtgctccctgcctttgtggtgggagagagcggcccgcacctgcccgacctgtacgagaagtggacgcaaccgccgcgtccgtacaccgaagccaccttgttgcgcgccatggaaactgccggcaagctggtggacaacgacgaactgcgcgatgccttgaaagagaacggtatcggccgtccttccacgcgtgccgccattatcgagacgctcttcaagcgcaactatatccgtaaggagaaaaagaacctgatagctacccctacgggtgtggaactgattcagattatccacgaagagttgttgaaatctgccgaactgacgggtatatgggaaaagaagttgcgtgaaatagagaagcgtacctataatgccggacagtttttggaggagttgaagcagatggtatcggagattgtgatgagtgtactttccgataacagcaaccgtcatatcacaatacaggctcccgtgccggaaaagggtaagggagaaaaagccgctgccgcatccgataaaccgaagaaagaaccgaagaaaagagcgccgcggaagtctgcaacgaagaaaacggagcaggtagccgctgagaagcaacctgccgatgcgctggtaggccagccttgcccgctttgcggaaaaggaacggttattaaaggaaaaacggcttacggttgttccgaatggaaaagcggttgtacattccgcaagccgttcgagtaaagttatatccggttataatcctttccgtatcttccggatgctgctctgaaatcttttcagctgtcagtagttcagatgaaattcaacaaccgcctcgattcctttgcgcagtatatccagcggaatgttctcgttgggagaatggatggcgttggactccagaccgaatcccatcagtatggttttgatgcccagtacctgctcgaatgtagagatgataggaatgctgccaccgcgacgtactgccaacggctttttgccgaaagctttggcgaagcctttctccgcagcctggtatgccgggagcgtgatggggcatacatatccctgcccgccgtgcatgggggtgacttttacctgtacggtatcgggggcgatagccatgatgtaatcggcaaacagttgcgaaatcttgtgatgatcctgatgcggaaccagtcggcaggatactttggcgtatgccttggagggcagtacggttttagaaccttcgcccgtatagccgccccagatgccgcatacatcgaaagacggacggcaactgttgcgctccagcgtgctgtatcctttttcgccgaaaagggcatttacgccgatagcctttttgtatttctcctcgtcgaacgggatgtgcgctatcatttcacgttccgcctgcggcacttcttccacatcgttgtagaagccgggaacggtgatgcgtccgtcggcatccgtcaccttgcttatcattccgcaaagcacattgatggggttggccaccgcaccgccgaaatgtccggagtgcaggtcgcggttcggaccggttacttctatctcccaataggcaagtccgcgcaggccggtagtcagcgagggaaggtctgcacccagcatgctggtgtcggacacgaggattacgtcggctttcagcagttctttgtgttcccggcagaagccttcgaggctgggcgagccaatctcttcctctccttcaaagatgaacttgacgttatgagtcagcaggttgttctttaccagatattcaaaagcctttacctggatgaaggactgtcctttgtcatcgtccgcaccgcgcgcccagatgtggccgtcgcgtacttcgggctcgaaaggattgcttttccagagttccagcggttcggcgggcattacgtcgtagtgtgcgtatatcaatacggttttggctttcgggtctacaatcttctgtccgaatacgatgggattgccagccgaaggcattaccagtgcttcgtctgcaccggcggcgagcagcagttgcgcccagcgttcggcacacgccagcatgtcgtcgtggtgttcgggtttggcactgatgctggggatacggataaggctgaacagctcttccagcattccggattcgttctctgcgatatatttctttatttccataataataatgtgaaatgatgaggtgatatcctatcactttatcacccgtttgttataattgtgtagtacggtcaatcaagtagaaatcgagcagggtcatggctgccatggcttccacgatgggcacggcgcggggcagtacgcaggggtcgtgacgtccgcgggctttgagggtggtgtccacgccgtccatgtttacggtgtgctgttccatgagcacggttgccacgggcttgaaggctacgcggaagtagatgtcctgtccgttgctgatgccgccctgaatgccgccggagtggttggtatgcgtttcgatgcgtccgttgttgttatagaacacatcgttctgttcggagcctttcatcttcagtcctttgaagccttcgccgtattcaaacgcttttgcggcgttgatactgagcatgccggcggcaagggcggattggagtttgccgtaaacgggttgtcccagtccgatggggcatcctttgataacgcaggtcaccacgccaccgatggtatcgccttcgccctttatcttgaagataagctcttccatttctttggctttctccgggtcggggcaacgcaccgggttggtatcaatcaggtcgaggtcgtaggcggtatagttttcttccagtttgatggggcctacctgcgaggtgtatgcggtgatgcggatgccaagctgtttcaaggcaagttttgccaatgcgcctgccactacgcgcgaaatggtttcgcgtgccgatgagcgtccgccgccacggtggtcgcgtattccgtattttacattatatgtatagtcggcgtgcgaggggcggtatacttctttcaggttgttatagtcgttggagtgttggttctcgttccacacgatgaatccgatggggcatccggtggacttgccctcgaagatgccggaaaggaattccaccttgtcggattctttgcgtgaggtagtgatgcgtgattgccccggtcgccggcggtcgagctccgattgtacgaagtccatatcgatggtgattcctgcggggaatccgtctattacgccgcctatgcctttaccgtgtgattctccgaaactggtaaggcggagaatattgccgaatgagttgaacatatcaattgctttaagggtttataatgaggttaatgtgccagtttgccttgttataaaaggctttgactttataaaggtaacaattttttttgtaaaacgtttcaaaaatgacaataaatcttttatttcccgacttttagagaataaaaatactgtttgaaaccgtatctttttgcggaaacatgtaagagtatttaataatgtaaagaatgcttataattcttcctatatgaaaaaaaggacatctattttttattaaagaccttgtttaaaggctttaaaaactgttattttgtactttcgatataaaagagaatattaactaacccttaactatgtagggattttattaactaaacaagtatttgtatgaagaaaaatttgttttatttattcgcattgatttgttcaatgagtttatttaccgcttgtagcgatgacgatgaggcgccgggcaattctggagtagttggagaggttgtcggtgactacaagggcttgatggatgtttactatgaaccaaatgtggaaatagccaaaggcatgcagcaaaagataactatcaagaagtcttccgacacttcaatcggtttggaattgaagaactttgtaataacggt

SEQ ID NO: 4074 - DNA, 35659 bp, Unknown
  gut microbiota DNA sequence
cgttgcgaggccaataaaataattctgcacaaaatccattcacttctgaacggatacatcttgtccggcaggctggaaagcggtgcgatgcccacagaagaatattgtgcagacgctcttcacttgtcaccttgctatttccgcgacctgctcaagttcgagaccggaaaaagcatgcacgaatactttcaactgatgcggctggacatggctaagaagatgttgcggaacaaggattatacggtcggcatgacagccaggaagctgggatatgcaaattcacagcacttcacctgcctgttcaagaagataacgggaatgacaccgacggaatataaatatgcacagaattaaaaaggattatcttgccggcattggcacaaaacaaacgccacaaacggttaaatcgcacgaatatactgcaaacattcccgaatattttaaaatactccaaaccaagtgcctttaccgattgttgtcccccacataactctaaaacttaactgatatgattaattatgtggataaaatggcggatgccctggtggatgtgctaaagtattcgaaccaggatgtggaatgggtggagcccgatgacatgaaacccaatgacggcgtacagcccgaatggttctatcctgccatagaaaatgcggagtattccgaaattaccgctatcctgcaatatacccagcaggaagccgtctttgaagatgaaatcggcgaactgatgctgggcattgccttggtggaaatgaagcattacgcacacatacgggacgccatcgtagcactgggcggtacacttcccaaaccgtatgacagcaagaacgtcaatataggcgaaacacccgtcgaagcgctcaccctcgccgcgcattcggaagtggccactatcgggttctacaagtcggtgaaggaacgaatcgccgcaagtacaccaaccgctgacatcgcccgcaagctgctgacaaaactgattgcggacgaaagccttcacctcaaactgcttacccggcaactgaaggtcatggcaggtgacgacaagaagtatgacgaactcatgaagaagatactggactgacaaagtattaccgtttttctcaataattcattacctttgcagcaaaattacaaataaacgaatcaaaacaatagggaacaatgagtgtacacgatttatgctgcatcggttatattacacaagacaagatagttaccaccaagaacacgatatacatgccgggcggcacttccttttactttgcgcatgccatcaagcatctcgacccgaacggcttcttattggtcacatcccttgcccacacggagatgaacgttgtggaagacatacggaaagaaggcattgaggtaaaagctctgcccagtgcccgttccgtctgctttgaaaacatatacggagaaaaccagaacgaacgtacgcaacgcgtcacggcaaaggccgacccgttcacaatggaaagcctgcaggacgtcaatgcacggattatccacctgggcagcctgcttgccgacgacttttcattggacgtcatcaaatacctgtcgggcaaaggcctgctttcggtagacgttcaggggttcctgcgcaaggtggacaatgaaaaggtgctgcccgtagactggccggaaaagagagaagccttgaagcacatccatatcttaaaggccaacgaaaccgaaatggaagtccttaccggctgcaaagagcctcacgaagccgccctgctcattgcagactggggtgtgaaagaagtgctgctgacgttgggagacaaaggttcgctgatatatgccaaaggacagttccatgaaattcccgcctactccgccctgcagatagtggatgccaccggatgcggagatacttatatggtgggctatctgtatatgcggaacaaaggcgcatcctatcgggaagcaggctgctttgccgctgccatgtgtaccatcaagctgcaaacacacggaccattctgcggaacagaggctgaaatcagaaggataatcaatcctgcataaaagacaacaaacgtttcattaaggagaaacttcggtttcccctgatgaaaacaataatttcccctgatggaaacggaagtttcctcaggagaaactaaccgttccccgccgtggaacaagtcgttccccaccgggaaacggtttgtttcacggtggggaacatatctgccggaatcttagctacgtccggagaaaaggatgcaggcaaagtaagacctgaaagagatacaaattataggtagagcaaagagctgcccttatcggttcggtgcggctttagccttgcggccgatacgccgtatccacagataatagcccgtcaatggaagcgttccgcccaacaatgcggcaatgaatgtcagtacacgggtaaacatacctccccaactgcccacatgcacggaatatatccagccgcgtatcttgcccgaagcatcggcatccttatacaaggcggttccggtgatttcgccgttactcggattaaaggtataacggtcggaagcccgctgattgccgaaacgttcaaaagatacggtggcagaaccgttggaaaccgtaatctgtttatagccgtcgttacgttctttcagttcctcataaacctgctgccagcaagtatatgaagtagcaaccgcttgcggggcatcatgatgccctgccccttgtttggcctctactccgaataccttataaaagcctgcgcgataccaggggaaagaccacgtaagcccggtcaacgccattgccagaagcaagataagtacatacatgcctcccgccacgtgcaaatcgtgccaaaagcggaaccggcctttatcggcgacaatcttcaggctgttcttcagggctttctttgtgcggggccaccagatgacaatgcccgaaaccagtacgaacacgaacatcagcgtacttacccccacaaccatcttgccccagaatattccgccgtccggcttcatgctgtccagcagccagcggtgcaggtgaaacatggtgaggaagaacggcgcacgctcatacctgccttttacctcaccggtatattggtctacataaacggatgcccgccgcggtttcgacagactgacccgacaggcacgttccgtatcggaagagatggagatgcctgtaacagcaacaccgtccggcagtgtttcggagactttctctatcaggtattccacgggaagcggagcgccgcttaccttttccacataatagaggtcgcgcctgcacagctccattacttcgtcttcaaataccagcgcagctcccgaaaagcagataaccgtaataatcagcccgaaagggacagacagccacagatgtattttacgaaatgctttcttcattgcagtcagttaagagggctcaacttgccgatacctgtaatctgcgtagcctctaccgtaacgccttttgtggcagtagcgctggacgggtctatcttgtaaacagccggatggccgtcggtagtagtcacagccatataggcataaccgttctccgtatacggagtgttgccgaagccggaaatcaggtctgccgacggaagaccggtgacataggtaagttttttgctttccgctttgaacacagccagctctttggcttcaaagcccgtctccgtcagagggcggtcgtacatcagcaacaggaaataatcatctgcaatatgccagcaacgcaggaaagattttccgccgctctgtttctccaggtcgcagtagtagctgtcgaagtcttcccggccattggggatgcgtaccacacctgccggcaagattgtctgctggcgggcatccttcatcgtcttggcatagcttggagagaatacgtaaatatcaccgttaccggcttcccagatagtctggtaatactgggatttgaaacggccgcaggcataactgattttatccgtactgatgagtttcttcgttgtcatcgtagcatcatcaaagattgccacccagcattcattgggatactgtgtccactgcaattcgcctttcttatacgaactgctgttggaaccgccgtcttcggtctttaccaaatcctcattgcccggcaatatatacttaccgccgtctacggcagcgccatactggctcagccccatgggaacggctgcactgtatatcttgttgttatgctcctgaattccggccaatgtcacgaactcgccgttgcccaggaaattctcggactggtaggccttgtttttcgtatcgttggtgttgaaggtttcgtccgctacatccaggtaagagagcaggaaagttttaggcagatacaggttgccgtcggcatactccgcaggtccgtcaccggtagaggcggttatgatatacttatcgtagatgccgtaggtagtgaatctcttcactgcaaactctcccgaacgcgcctgcacttcgtggttggagttcatgacataagaacgggtggttccggcacttccctgattgtaagtcagtccatagagataccggttcttgtagaacacccattgggaagcgccgtcgttgatgagcccgttgttgatggtagaaacagagccttcgtccaaagtcttggaagtcagcaatacgttagtcgtattgctcgaagcggtgacagaggaagcgatcacgaaatcgcctttggttccattattgtttccaccgcccggcacctccgtatccgtgcaggatgtcaatgccgttcctgccatcgcagaagtgagaagtacggctgataaaagattctttttcatgttgttttgttttattatattacactaatcgttattgattcatggtttcaattgccgaagtatacgcgcacctttccatagaatgcccgtccggctttctgcaggctgaagttgtcgtacagttgctcgtccgtaaagttccggcactcgaacgagaggttgtagcgtccgctacggagactgtaggaaaggctcaggttgtgggagaactggctcggaaccacgtagtcgcccttgttcgaaccgattttggaagaataataggtaaagctgtgcaagtactggttgtcgtaagatacagtcagcgcattgccttttttccagaggtcgcgccagtagaaggtcacgtcggaatcggcaaagatataaggcaggttgggcatgcgttccttataagctatattctccgcactgccggatatggacgtcttcatattgtcgcacacgttcatctgcgtgaagttgccgcccacactcaaccacctgccaaagccgtagcgggcggagatgttatatcctttcgtcagcaccttgccgtaattgacgtaagtggctgcggacttgccgccgctcaggtcggtgatgttgcgctggatgtagtctttggtgttacggtagacaaagccgccttccacgtacacggaatgtttgccgaaagtcttgttatagctcaggttcaggttgatgttgtcgctgttctccggccggatgccgatgtcgcccatttccaggtcctcattgccgaacatctcttcgatggtgggcagacggtaggccttttcataggacagtttggcttgcagtcccggcaggatgaagtaagtgcccgccgctccatagcctacggaatgtacgctgcgggtggtgcgtacatagtcgttctgattggcatccgtagccacaggtccggcgacaaactggttgtagtacttgccgaatacggataagttccagtcttcggacggcatcaggcggtaagagaggccggagatattcttgcgggtctccttggcaatggcatccgactgctcttctttggcaagcaatgaagtattggaacggctgaaagcattcagcacgtggttgaacgtcagcgtgtgcacccttccgaggcggtaattggcggtaaacgtaccgttccagttattgttgtcggcgcgcgagtgctggtaggactgctctccgggagagttcagcggcttcctttccccgtaccagttgtatttataggaagcggtatccacattggtcgtcaggttcttgttgtagttgacggtcagcactacatccagtcccttcgcaaacaggttgcgcttgttatactccaacgaaggcatcagcgaatgtcccttgcggtgtttctgtccgtacacgatgtcctgccgcacgccggtctgtacatcctggtacatattggagtaagtgaaaccgaacatcaaacggtccgcccacttcttgtcgataacgcctaccttgccgataaccgcttcattgtggtaagtatcgttgaagcgccgtacgcgcaccttcttgtcacggtctatcctgcccgtttcaaagtcctccaccggggagtcgatgcggtagtcattgtccgaatagttctgaaacgcgttgatttcgtacgtaaaaccattcttgaaggtctgcccgaagtgcacgttggacttatgcgtattgaacgaaccgtacgagtaggacgcatccagaaaccagcggcggcgtttcttgttcgtaacgatattgataacccctccgatggcatccgtgccgaatcccaccggcactacgcccttgtacacctcgatgcggtcggcaaaattcacggggatattgttcagcgcaaaagagcttccgacgccttcctgcggcacgccgtctataaagacctttacatgcttcccgctgaagccgtccagcatgagctgcatgtccgaccctaccccgcccgactcgcgcagtttcattcccggcgctttggtcaatgcatcgctcaggtttctggtagtgttctgcaactctttcgtatctaccgctacggcgttgaatgccgaccgcttgacacggctcacgcccgtcgacaccaccgttacttcgtccagttgctgagtttcgggggtgattgtgacattctgcctcaccctttgccctctgaccagcgtcaccggtttctctacggttttatagccgacggccgacaccaccagcgtatagtcgcccgcaggcgcactcacatgatagataccttcctgattggttattcccccgtaaccggtccctttcagatagaccgtcgcaaaatccacgacttctttctccgtagacaggattttacctgaaatcatcgtcttgcccggcctctgcgcatatacaggaaaggcgcatgccgtcaagaagaaaaataataaactaaatatggctgttttcaatttgaagtgattgttaagttgttactaataccgtatgcaaaggtcattagaaaaaagcaacctcacaatcacctcttttaggtaattataccgacgccatgctaagaaagtatcacacccgcaatcgctattgataggtatattccaccattctattcgcggttcatcaagcgatgttccgccatttgttcgtacttcgtgccgggacgtccatagtttgcatagggataaatggagatgccgccgcgcggggtgaagatgcccgtaacctcaatgtacttgggattcatcagacggatgaggtctttcattataatattgacgcaatcctcgtggaaagcgccgtggttgcggaaactgaagagatagagcttcagactcttgctctccaccattttcacatcgggaatgtagctgatgcggatttccgcaaaatcgggctgtcccgttatcgggcaaaggctggtgaactccgggcagttgaaacgtacccagtaatcgttaccgggatgtttgttgtcgaatgcctccagcacttcgggggcgtaatcctgcttgtactctgtctttcttcctaataaggaaagttggtcttttaattcggtcatattacaatcggtttataatcggttctgtttcctttgtggtataatacattcgtcattttcccgccagatacttctccagcccctctctgcggagcttgcatgcggggcagtgtccgcagccgtcgccgggaatgccgttgtaacaggtcagcgtttcatgacgaatcaggtcgagcactcccagttcatccgccagcgcccaagtctcggctttgtcaatccacatcaacggagtatggagtacgaactgctcgtccatggcaaggttgagcgttacgttgagcgatttgataaatgcgtccctgcaatcgggatacccgctgaaatccgtttgcgacacacccgtcacgatgtggttgatacccttttcgcgggcatagacggcggcaatgctgaggaagaacaggttgcgccccggcacaaaggtattcggaacgctgtctgccggcttctcccggtccatcaccatatcggggtccgtcaacgaattatgccccaacttgccgatgaaggaaacatccattacttcaaactccacttccgctttacgcgctatctcccgcgccagctccacttccttctgatgcttctgcccatacagaaagctcaacgcatatactttcctgaactcacgctttgcccaaaacaggcaagttgtcgaatcctgcccaccgctgaatacgaccaatgctgcttctttattcaccttattatatatttatgacaacctctactacttaaatttcactgattttccacaccttgtaagaaatcccctcgtcgtagacatcactaccgtctatccttttaatggctttcaccacccggatggtcaccggcagtattatcacctcgtacatggatttcagtacaatctgggtgcacatcatcagcagcaattcctgccatgcgataatgcctccgaacgccaccggaaagaatatcagcgaatcggccgtctcgcccactaccgtggaccagatggcacgtgcggaaaaatgacgtccgccgctcgccactttcatgcggctcatgacgtaggcgttcagaaacgaacctaccagaaatgccgtcaggctggcggcaacaatgcgcggcgccatgccgaacacgaagttgaaatggggcgccccgtcccaaaagggagcggcaggcagtgccacggcaatcagtcccaacatcaccacaaagaagttcatggcgaagccgctccagataatcaggcgcgccttgcggaagccccacacctcggcaatgcagtcgttgatgatataagaaacgggaaacactaacagtccggcagtaacggtaatgccgaaaacctgaattacttttgtctcgagaagattggccgctatcagacagacattgaacagaatgcccagcagcataaagggtacagatactttttgcttcatattcctgttttttacgtggtgttctagaatacacgaccgctattcgcggcatcatacatgtaactaatgatttcactcttgttaaatcgagtgcaaagatacgctttcttccggtgactgcaaaaccattttaaatttaagttgttcaaagcacattcaccaaaacctaacttaaatgaaaacaatcttaaaaacaatgtttctgttgtgcggtgcggcactgtctgccctcgcagtccacgcacagaaaaaagtgattatcgaggatgagtctcccaaaggtgtcgtattggtcaccatagacaaagcgggcgacgagataatccgcatcatgaacgagtcgcaaatgccctacatccacgaaccgcaggcaccccgcttcctgctgacggacagaaaagggaagttcgccctgggcatcggcggctatgtacgcgccacggcagagtacgacttcggcggcatcgtcgacaacatcgactttatccctgcctacatccccaacgggagcaaaatcagaaaccagtttcaaatggatgccagcacgtccaccattttcctgaaactggtagggcataccaagattctcggcgacttcgtggtgtacaccgccggcaacttccgcgacggttccaacaaaggcttccaactgcgcaatgcctacgtgtctttccgcgacgtgacggtgggctacacctacggcggcttcatggacctgggtgcaatgccttccaccatcgacttccaggggcctaacggagccaccttttaccgcgccacccaagtgtcatacacctacaaagggctgaaaaacttccgtttcaacgcctctgtcgaagtgcctgcggtagacggcacgaccaacagcgagcttgacatcgcacaacagcgcatgcccgacttcaccgcttatgcgcagtacggctggaacagcaaaagccatgtgcgcgtaggcggacttatccgcagcatgacctacaccagcaccctgagcgacaaggcgcatgccgttaccggcttcggcatacaggcatccaccaccttcaatctgggcaaacaatggcaggtgttcgggcaagccacctacgggaaaggcatcgggcaatacctgaacgacctcagcaacctgaacgtggacatcgttcccaatcccgatgaagcaggcaaaatgcaagcattgccgatgctgggctggtatgccggactgcaatacaacatcagtccgaaagtgttcctttcaagcacatacagcatgtcacgcctctattccgaaaacgggtatcctgccaacgaaccgtccacttaccgctatggacaatatttcgtagcaaacctgttctggaatgtcaccccaaacatgcaggtaggtgcggagtatctgcgcggttggcgtacgaacttcgacaattccaccaaccatgccaaccgcatgaacctgctggtgcaatattccttctgaaacctgcacggaaagccgtaaaaggaaagaaataaaaaggaaagaaataaaagccctaaaggcataagacaaagagaggatgtgccagccgaatttgcgacacatcctctcttacgtatataaaggattatgaaagatcagaagcgatagtctatgctgaggccgaataccttgttggtacggctgtacacgtttgtaccgggcagatttgtgccctgatagttttggccggttttggtataatcctcatagttggtccacatatagcccacattcaaatcggctctttccgaaagctgcaacttcgcgcccacacccagcgagtaggaatcgcacgagaagcttgtgtcgctctgatagtcatcggacaaaccataatcagtaaactgcacaccgccgctcagggtcagtcttttgataacatcccactctataccggccagatactcgtttgtccctttcgtcaggaacttctgtttgccacctgccatgcctgcgttcttatcgtcgtagaagtgatactccaccgatgcgcgcagcacaggaaggaactcataggcagcagccaccgaaagcatggcgggaatgtcgttcggcgtatttacaccgtgtttgtagtcctccagctcactttcgggagcgcctatcatgcgtagcgaatttatcttcgtgttattttcaatgttcagattggccttgaactcgtatttcgcaccaatcgtcagtttgccgaacttggcatccaaaccgatgaccggagtaaatccccaaccggtctggctgcaatccaggtcgatgccgataagctcggttccaacgggtatcgctccaccggtgggcaaaggcaaatcaacggccgcactggcattcagcgcacctttgtaaccacccgtaaagtagttcatgcgcccgcctgcaaaggcagacagccagtccgttatcttataggtcagccccaactgcacggagtagatatactgcttgccgtccatgtagctgttcagtgtataggctttgcccggaataccctgttgcagcaatccgcctatcaccatggcgtcgaacatggacaagccgtcatcgaacgaagcttttccgcctccgccggtaatgccgaagaaaccggagatggtccagtcgcccttcttataagcggcaaacacactgggaatgacaggcgcagaagccttgccttcataatatttgtccagccccaaagcctcgcacgaagcatcgatatttcttgtctggaacgcactctgaatactcaaggatgtataaaacccgtctttcggcaggaaggccagacccgcagggttggacaaggcagcatccacactggtggtgtttgcgccgcgcgacagcatacgaagaaaggcagggtgttgatttgtatttgtcaggagacctcctgcaaaagttggaattgaaacgattaacatcgcaatgctaatcaaagaaatttttctcatctaaatcttttttattgtttttgggcgcaaaggtacaataatattgcacataaataacaattttgcgcatttaatttaggagaaccgaagaatttaattgaaaaaatcaacagtttctactgaaacattcaccaatattcatgctgaaacagacaagggattgctccatttgccgtccctgccgcttgcatatactgcccctatgcccaaagggaaaagcagccgatgccaaatcgttccaccatgaggtaaatttcattccaccacggagaaagttccgttccaccatgacggaacaaaactttctccgtgtcggaacaacatagcgcctgctatcgccggcactcatcatccggacaacagattatgggcacaacctgccggatatgtcccgaacattcttacctttgcgcacgttatattctttgtgcatgccgccttttaacaaatgcagaaagtgcacttatacgaagcgcatccgtcatgcacacttaataacctgcgaatattcaccaaaacttaaaatctcatggcatatactattgcattcttcggcagcaagccctacgacgaggcttcattcaatgaaaaaaacagcggatacggttttgaactccgctattacaaaggacacctcaacctgaacaacgtgatactgacgcagggcgtggatgccgtgtgtatcttcgtaaacgatactgccgacgcggaagttatccggcaactggcggcaaacggagtgaaactccttgccctgcgctgcgccggatataataatgtagacctgaaagcggcagcggaaaacggcatcaccgtggtgcgcgtccccgcctactccccttacgcggtagcggaatacaccgttgccctcatgctctccctcaaccggaagataccccgcgccacctggcgcacacgcgacggcaacttctccctgcacggccttttgggattcgacatgtatggcaaaacggcaggtatcatcggcacaggtaaaatagccaagaagttaatcgctatcctgcgcggtttcggcatgaacatcctcgcctacgacctgtatcccgactacaatttcgcccgcgagcaccaggtggtatacaccacgctggacgaactgtaccgcagctcggacatcatctccctgcactgcccgctcacggagcagaccagatacctgattaacgactactccatcagtaagatgaaggacggcgtaatgattatcaacaccggccggggacagctcatccataccaatgccctgatagaaggactgaaaaacaagaaaatcggttctgccgggctggatgtgtacgaggaagagagcgaatatttctacgaagaccggtcggacaagattatcgacgatgatacgctggcacgcctgctgtcattcaataatgtaatcgtgacttcccaccaggcattcttcacgcgtgaagcccttgccaacatcgcatccactaccctgatgaatataaaggacttcatggaacacaagaaactggaaaacgaggtcagactgtaaaaaagcgtttatagaacattaatcatccacggctcaaactttcagggccacctgcttgttacacacagataaatcactaaaaagacagattatgaaaaaagtaacagacaaagccgaaagccgtggacgctcttcgtatgactggctcgacagccgccatacattcagttttgacaagtattacaacccccgccgcatgaatttcggcgccctgcgcgttctgaacgacgaccggatagctccgggaaaaggcttcggaacccatccgcataagaacatggagatcatctccattcccctgaaaggcaagctgaagcatggcgacagcaaacaaaacagccgtaccatcaccataggcgacatccagaccatgagtgcaggcacgggcatctaccacagcgaaatgaatggaagcgataccgaaccggcagagtttctccaaatctgggtaatacccgaaaagctgaataccccgcccgcctatcaggattatgacatccgtccctatctgcacaagaacaagctttcgcttatcgtatcgcccgacggcaatgctcctgccgggatgctgcaacaggcatggttctccatcggagaagtcgaggccggaaagaagctgggatatcacctgcaccagtcgcacgccggcgtgtacatcttcctcatagagggcgaaataaaggtagacggcacagtgctgtcccgccgcgacggtatgggagtatacgaaaccgacagttttgagttggaaacgctgcaagattcgcatatcctgctgattgaagtcccgatgtaggacttttgcataaaataacagccaaaccggaagtttgtgtggtgttttttgtaatattgcgctataattgaaaccgtacaatgaaacttgattatatttaccacagcggcttcgcgattgaagcggacggaataacggtcattatcgattactacaaagactcctcggaagaggcgccggaccggggaatcgtacacgaccatctgctaaagaagccgagaacgctctacgtgctttcctcgcatttccaccccgaccacttcaaccgcgacatcctttcatggaaggaacagcggcccgacatccggtatatcttctccaaagatattctgaaacaccggcgtgccacggcggaagatgccgtttacataaataagggggatgtctacgaagacgaaaatatccgtatcgaagccttcggctccaccgatgtaggcatctctttcctgatagatttgcaaggcgtacgcctgttccatgccggcgacctgaacaactggcattggagcgaagagtccactccgcaggagatacgcaaggcggaaggcgactttcttgcagagataaaaaacctgcaacaaaaggctccccgggtagatatagccatgtttccggtggacagccgcatcggaaaagattacatgcgcggtgcggaacagttcgtggaacggataaaaaccgctatatttgcacctatgcacttcagtgaggattaccggggcggcaacgctttccgcacctttgccgaaagccggggttgccgtttccttacaatctcccgccggggtgagagttttgacattactaaataaaacatagcattatgaaaaatttaacacaggttcttattgtgctgttctgcctttgcatgcctgccttgctgcatgcccagagggatgacagcaaatatctggccggcgctgttccggaagtggacggcaaggtagtattcaccaaagatttcagtatccccggaatgtctcaagacacaatctactcccgcctgttgaggtggatggatgcacgtctggcaaagaacgggaataacagtcgcgtagtcttttccgacaaggagaaaggacagattgtaggcatcggcgatgaatggattgtgttcagctccaccgcattgtcactggacagaacgaaaattctttatcagctcaccgtcacctgccaaccggaaaaatgtgtttttgaagtagagaagatacgtttcaactaccgcgaaggaaaagagaaatataccgccgaagaatggattaccgacaagtacgccttgaacaagtctcaaaccaaactggtgcgcggacttgccaaatggcgcagaaagactgtggacttcgtcgatgccctctgcattgaggtaacggaagccttaagcgccagcaccgccgcccaagctcctgtagaggaaaagaaagaagaaaagaaagagacaaaggcgctcgtcaattcgggtacaacggtgattgctcccaaaacgcaagttacagtagagactcccaaggccaccgctacaacaccggctacggttacggttgccgccacgccgcaaacaaatgtacaggctgcaccaagcgcctataaagaggtagccccggatgctgttcccgccgatgccatccaaaccggcaacggcaagctggtgattgtaattggcgaagaacctttcaatatgacgatgatgactgccaatgccggcggctcgttaggcaagatagcaggcaacaagccggtaatcttcaccattttgtcaccggaacagccttatgcacagatggaagcggcccagaattataccgtacgcttctaccccaacggacagacagagccttccgtcattctggaatgtaagaaagtgccgtcacaagccccgatagaaggtatgccgcgtacatacatcggcgaaatcctgaaagcaaaaattaaataaaccgatactataaacctaaaaaagtaacaacagtggaaataaaaagcaaattcgaccattttaatataaacgtcaccaacctggaacgcagcatcgctttctacgaacaagcattgggactgaaggaacatcatcggaaagagtcgtcggacggctctttcacgctggtctacctcaccgacggcagcacgggttttcttctggaactgacctgcctgaaagaacatccccaagcctacgaactgggcgagaacgaaagccatctctgcttccgcgtagcaggagactatgatgcaatccgccaatatcacaaggaaaacggctgggtatgttttgaaaataccgccatgggactctatttcattaacgaccccgacgattattggattgagatactgcccgccaagtaaattgtacggcatactttgcaacaagaggattactattaattacttaatacatcaacaacgtgagtatagaagaagcaatgatgggcggtattgttttcaaaggcaagaaagagaagcctaaagaagaaaacaaaatcaagaccaaagccaagaaaaagacctatatcaccggcctgcatggttccggtgcggcgaaaatgaaagccgaaatccgcaggaaacgcgcgaacaggcataaaggaaaataataattattttttcagataagaaggtgtaagtcccgttgggaaaaacttacaccttttttttataccatacctacccaaattacagagaagcattgaaaaattatccaatcaaaacgctatttagatatattacattaaaaaaggtctgataaataaaagaaagttaatgacaagttttgtttttatacaaacaatatatatctttggcatcgcaaacaaacaaataatattaaaaagaaagtgattttatcacaagagtataaaaaaaagcactacttttttttatccagaaaacttgtagtgtgttttcttatatcaataactttgaataacacatatgcccaggtgcaacgcggcaagaaagacgatgcgaaagccgaattaatatctttcaaagaccgttggggtatcaagacaaatgctgttgactggttattgaccgttcctaatattggcgtagaatttgacttgggcaataccatccggaacaaacgtacaatcggtgccaatataaagtggaactggaacacctcgcaaaagtacaccccatcccttattttcaatgtattcgatgcacgggtagagtggcgtcagtattttcgcacccgtaaaagaggcggtgtcaccaaagatgccaatctgatgacacgtctcaaggaaaccgtattcaccacccagcgcaagaatccgcgccaggaacgcgcttactactggggcgtatatgtcaacgccgccagctacaactttaaaatcggtaaggaaggcaagcagggtaacgcctacggagccggcatcagcgtgggatataccgctccgctttacggctaccgcaacaattacatagacctggagctgggaggttccgccggactgctttacacctcatacgatgtttatacgcacgatgcggaaagcgactgttacccgcgcatagcggagaaatgcaaaagcgggcacatcgtgccgttccctctgataacggatttacgcgtggctttcgtttaccggttcatgtcggcaggcagcaagtataaggaatcggtgtaccgccgtgtacagatacgcgacttcgcccgccaggcacttaatgaaaagataaataagatgcgcgaacgcatcgactctatcgacaatgcggtacggaaacaaggtttcagccgcccggacagcctgcttaccaaagaagagctgaaacaatggaagctgatgcagcaagagcgcaaggaactcgctttgaaagaagctgccgacaaactgcgcaaacaggtagccgattctttgggcatacaacttagcgatacactcacttccgaacaagaaaagaccatacgcaaggcactgaaagtacgtgaagaccaattgaagcagaaagccgaaacacaagattctgccaaacgtggcaaacgtgcagccaggaaagccaaactgcataccaaagaaaagaaagagaagaaagataaagactccgggaaaaaccggaaaaaagacggaaagccggaagcggaagccgccaacaaagaaaaaggagatgcttccggtgaagaagaagatgaaaaggaggataaaggatgaagaacaagacactgacataccttgccctcagcctgctgtgctgcatctgtgcctgcacctcggtagacctctgtccggaagcgggacatccgcacatcaccgacatgcgtgtacggctcaactggggcgacatcagcaaagatgagattccggcagaaatgcacatcgtagcaagccgtatcataaacacctggcgcacccgcggcatcatcaacacatccatagaccctgccacaaacaataatataacgcaacaggaaacgtcttccgacacccggactgcttcaaatgcaaaagaaaattcggaagataactcaatagagagtccggaagaaaccgcttcttctttttacttgcgcggaggtgagtacaacatttttatcatcaacgagcagtatgcggatgttccggcacagacaggcgatacggagcagtcccctactcctattatcagcatagaaaatctggacaattacatccacgacaataaggtaagcgtgaaagacctttatctgcaaatcagcagtatgggcaatgaaaagcccgacatcgtagagggcaatgacctgcccgatttcaatcctgacgatgaatacctgcaggaaataaagtcgcccatattctatgcggtgcaaaagaacataaacatccaaaccggacaaccgaccatcctggattttgatatgcaacgcatcagccagcgtatcaatatcgtcttcaatatccgcaccgaaggaaacataaaaagagaagacctcgcggcgcccatcatcgaattgtccggcgcttgcggacgcttcaacatcgccgacgcctgtctggacaccactcgcctctaccggatggcacatcaggtacaaccggacgagtttacgcaaaccggagagggtacttaccgatgcgtagtccatttccacaccctcggcgtcatccccagcgcggcaaaaggacatctcaacggaccgggcatcctgcaagttgccttgcaggtatccactccccaactggattcttccggtgcaccggtagtggatgaggaaggcaatcccgtgaaaaatagccgctacatctacggcgccatcaatccctatgacgaactgaccgcagcacaactcattgaagtgcgcgacggcaaaatatacctgcgttacagcaaagaagatgtaaacatcgaaatcacaacgcctttagtaataaaggccgaccagatagtacccaacgataccggcatgggatggcaaccgcacgatcccaccaatccggacgatgacataataatagagatataaagatgaaacgcctgacatatagcaatagcatgcaaaagcggagacaccggcacaaacttattctgccgttatggtgcatactgctgcttgttaccggttgcggtaatctgtacaccggcgacgagtcgctctatgaccccaatcatcaggacaaccagggcgaccagacgcaactgcccgtcatggtagcattcagcgaccctatatataatgtattgacacgcggtgcgggagtgctgaatcccacagacgaaacaaacttcagcaaacgcatagccgacggcactttcttcgtatacgcattccggcgcgacaatcccaacggaatgacctatgcccatcgccgggccgaagatgccgaccggcgctattgtctcatcgacggcagtctggacgaaatctccgccgaagaatgcacggcactgggactcaccgccgagcaatgcaaactgcacggcaaacgggcggcttatgcaggaaacggctcgttcattaactggaaaagttccggctacatcccctattacaatttgcaggaagaattcgatgccttcaacttctttgcttattactacgacaatgcgcaagtgggcgaagtgaagcgcgaagcagaccgtatctgtttcgatgtcaccgtagacggctcgcaagacctgatgtgcgccgctgccgccgacctcaaagcgctgtggaaaacggacgaaagatagctgccgactacagcgaacaggctgcccgcctgaaacagctcggcgccgacgaacgtcagctcatgcgcagctgctattacggcacgtacacggcacgccgcaacatctggcccataatccgcatgaagcatcagctttcatacgtcaagttaaaattctatcctgccagtaaaagcacgaaagacatcgtttacatcacgggtgtctggatagaatgcgtcaacaaaggcgttttcactgtagcctcgtccgaccctgcaaacgtaggcgtccatttccccacagagggagaacgggggaaattaccggcacgtgatgcagagggaaaagaaatagcatggaccgatgaagaaggaaaatcactctatccgatgcaagtaagggaagaagatgcggacaaggaagtaaaccagcgtccggcaacagacggcggggttttcctgctgccgccgggcaacaatgccacgctccttataaatacggtatattatcccgacgcaaccgggagtgaaccctatatcacgactttcagctacgacttaaaggatgccgtgtacaacaaagacgaaaacggcgcttacctctccagtgggtttatgggcggacgcgaatataacatcagcgcctatatatacggtccgcaggatataaagctgaatgtacaggctgcctcgtgggtaaacggtggagatatagagataggagaagaataaaattgaaacagacagagatttatatattttcttttattaattaaaaattcaatgaagtatgaaaaagcaatttttctatgcagcaatggcgctcgcagtaatgagcagctgttcaaaggacaatgatccgggtatcggtaatccggacgacaacaatgacaaggcagtgatcgcattaggcgtggacgtacccacggttacggccctcagcagaggaaccggctctgtgggcgatgtagaaggcgagaacaacaagtggaacagccaacgactgtatatccacatggtagacagagccaccggcttagaagcagaagaaggagctgaaggagcaaaaactccgattctcgataacgcaactctccagttcagagcccccaaagcaaccgaaggcaataacggtgcaatcagaatctataacaattatgtagaagataccgacaacggcgtgattcaatacaaatactacccgaccaacggcacctatacattctacggttatcatgttgacgatgcaacccacgatgatgcaaccattacggcagatgagaagaaagtgaagaatgtaacaatcaacggtactcaagacctattggcagccagtaccatagatatggccgagaatgatgcttccaatgaccaaagtttatataaagacatagctaccaagctaagcggcgagtggacggaacttatgaaataccagttcggcgcccgtacagcccgtaaaggcattgttcctgtcctgaaattcaaccatcagctggctcgtttgaagtttttcgtaagggcaggcagtgaaagcgcagccggctataaatatgaaggcagcaattgggtggaacgcaaaagtactgacggacaggataagacactcggtatgcaagtcactaagattaccttgaaagacatggtaaatgttgtcgacatggatctggctactacgacttccgcaagaaacggagcctccaccgctccttttgttgtatgcagtaaagatgctgataacaaaaacaagttagacccggacaaaggtttaatcactccggtagtgcccaagtatccttacggccacgaaaatattccggcagatagtgaccccgacgctaaaggaactcaagtgggtgaacctgttatgtttttccctaacggaaacatcagcttatccatagaccttaaacaatatgtagaagatacaaaagacgaaacagacggtgacaagattacatacaaagaagttgagaagctggatactcccttaatcatcgatcagtccaagatttcaaaagatgtgaaagaattcaaggccggtgcttcttacaacgtatacattacaatctatggtttcgaaaagatagaggttaccgcagtgctgaccgcatgggaagacggtggtgacattgaaaccgacattgaagacggaaaataagaaccggctcctctatcgggaaataactcctgagaccaatccaactaccaacgggcggtacgagaactaccaaccgttggtacttgaaataccaaagcgtggtacaggagctaccaactgttggcacggaagctaccaaacgttggtacaaggaataccaaagcatggtaccggaagtaccataccgaggaacataggagagcaacgatatgtttaaccaattactcactacaatcatgaaaaagaatttatggatgctggcagccgccctttgcatgacagcctgctcgcaaaacgaggatatcgtaatagagcaaccggtcagcgacaacgacttcgaatcgccggacggacggctaatcatccaattgggtggaatagagacacgtataggggccagcgtaggcgtaacacgcgcaccgctggataagctatacgatgagaccagcggtgctactacccgattgggtattttcgcccttgccaccaatgacgctaccaccagcaccgccattaccgatgccaacagaaccgcagcatggggcgatacggagaactacggaattctgctgaacaatatacaggcagcagtaaccgcctggcccaagcaagacggctccgacgtaaaaccggacggtttggagaatgacctggcacagaaaatcacattatataaaggcaatgccgcaaacggtgtgtactactacccgatgcagaagaaatacgactatagcttctacggctacgccccttatcaggaaggccaaaccataagtgccgcaaagccggaaataacattcgcccatttcgacggctcgcaggacatcatctggaacaatgccaccgccggagagatagcgccaaacagcatttacctgaaaaaggatgtaaagaacgacgcttccctgaccggctataaagcccaatacatccgccagttgaagtatcaccacgaactgaaccggacagcctctgaaaagttacaggactatccgtggatacccaacatcaacttcgagcaccaactggcacagttgcgtttctccgtgattcccgccaccgagcagtccgaagaggacagaacagccgtccaaaacatgaaagtgaaaaatatcaccattaaaaaccacggcacaacggccaccctcaacgttctgaccgggaaactgacctttaccgacaacggttccctgcttatgcgggaagccaccgacgacggcaaaggcaatattacttttacggacgacaatgccgacggaaccgtcgaagttcccaaagacatttatgtccagaaatacgaaggcggacaatatacgcttaacggcgtgtcaagcgccaacccgctgatacaaggctatctgatggtgaaaccggacatggaacaattcctgatggacgtcaccatcatggctcccgatgccagtggagtgccgcaagacctgattgtacgcgacatccccgtcaatgcccccgctcccgccgtcgattcaggcaaaagtgacaatttgttctatgccggctattactacaacgtacgtatcggcatctacgccacccaacaaatcaacgctaccgccactttagctacctggaaaccgggcggtgactccgtagacgtacccatagagtaaaggcggaaagcacccgcataaaaacagaagaagtgtaatgagtaaaaagaaaaacatatcgtacctgttcggcctcgcattcctgttattggcaggatgcgacacagacactgccacagttcctcttcccgatgacggggagagggctgtggaagtgcggctgagggcatcggtatgcaccgtagagactaccgtcggccggagcgtcattgaaggcacggccctgaatacaggagatgaaataggtatatttctgatgagagacagtaatttcagcaccccatacttgcagaatcttccctatcgatatgcagagggcggacaactgagtttgcagccggaaggaacaaaagtgtactaccctgcccggcaggacacgctctatctgtacggttattatccttatacggaaacagccgctgcagatgaaaacggtaaagtatccattcccgttaccgccgctctggaagcaaaggacgccacagactacctttacaccggtgagaccaaaggcagcaagaaagcggctgcaaccgcagcaggcattgccgtctccttgaaacatgccttggcacggctacgcctcaacatatccaccgaccgccccgaatatacggcggactcatacccggtgttgcaaagcatcggttttaccacccgtgagggacaaacagggacaatggacctgcaaacaggcgacatcacatccgacaatccggacaccggtacatccgtcagctccgattaccggaacgaagcatccccgctcaaccttatccccggaacagccggcattcaaaaggattatctgctgctgccatacgggcatgagactatcagtgcgctccgccgcttgacattcagtataaaagagccggacggaagcgaaaaagacatcgtagtgttcgacgaagccgatgccggtgcaaacactcccccgctaatcgtactggaagccggcagcataaccaccctcaacatcctatatacgcaaagcatggctgcaaaagcttccgtaaacgactggaacaagggtacggaacatacatttcaatagaacggaacttacaaatcccaaccaacaaaacgctaaaaaccgatatgccgaaaaccaatcaccatacactctctttaagcagcatcttctttctgctgctactttgcagtttccctaccctgcacgcccagcaactggcagtaaagaccaacggcctgatgcttgccgccatggctcccaacatcggctgcgaattcgttgtgggcgaacggagcagtatcgacatctcggctttcggcgcagtcaacatctatggcaacaaagccaaaatgataggtcttctgcccgaataccgctattggtttaacggacgccccatgacacgggaatttgtgggaatagccgctctcggcgtgtcctacgacatcacatggggagaccgcatctatcagggcgatgctgccggcgccgggattaccttcggctatgcgctgaacctgaaccgacgcctcaacgtagagttttacggcggattcggcgccgtgtacttcaagcaaaaacaatactacaaaaacgataacatagaggactacaccgacggaacggcacaagccaacgccaacggttataaactgctacctatcaaaataggtgtctccatatcctatatcttcaaataaagaataaccgccatgaaaaatttcatcataacatcagccgtttgcattgctatgattttatcttccgcatcaagcatggcgcaacaaatcactatcgtgtccggcaaagtgctgaacctgcccgaaggtgaaaaaaagccgcgccccttccccatgggagagaccgtgcgtatttttgctttcaataccgtggcctcggcacgcgatgccctgaaagcgcttgaaaccggcggtggcggaacattgctcttcgacgccgatgccgtggcgggcgccgacggatactatgaaatacgtgtagcggaaaacggcgcgctaatctttaacgtgcaaatgaaaaacgaactgcgcgaagtgaattacaaacaggagataaacgccaacatcgacggcggcatcgctcttgaggaggtggaagttgtggcagaaaacccaaacccgcaaccccggcccgtagccgggaaaatagtgggcaacaaactgattgtaaacaactcggtagccattcccagcaattacggcgcgcccaaccgccggctcatcatgcaaccttatatcatggactgtaccaccgaagagatagtgagctacatggacccgacagttatggacggccccgaatacggactgacgcaagaccgccgcatggcctacgacatcaggaacgacaaactggctccctatatcaatacccgccgccaactggatgccacacgcttcaacctggacatcaatgactcggtacccgtacccgaccccagacgcatttacagtgtattgtccaaagttattatagcagactatacccaccctacatacgaagcggaatggaaaatgactacctgcaaaataaaacgcccgttgcagtttctggagttctcgttccccgattttgaattagaccccgataaatacaaggaaacgccccggcgcgaacgccggaatacggcaggcaatatttcgctgacattccttgtgggcaaggccgaactggatcctgccgactctgccaatgtggtgcagatgaacaagttgcaggaagacctgatgaacatcgtaaacggtgagggcaccacactgaaagaatttaagataaccggcgtatcgtctcccgaaggacgctatgccagcaaccttgcgcttgccaagcaacgaacggctttcgccctacggaaaatcacttcggtaatacctgccgccaaatggagccgggtatacaaacatcctacggaaacccgtgttgccacttggaatgaagtagccgatttactggaacgggacagcctcactgcggaagcgcgggagataagggaaatcaccgggaaatataagaatccggatgcgcagtttgccgccgtatcgcgtctgccctactactccaccatcatcaaagaacggctgcccaaactacgcaccgtacagtacgaatacaaacatgaaatattccgtgaactgaatccggatgaaatattggacaaatacttgcacgaccctcaatacgccgatggcaaaaaatcgtttacccgatacgagtactggcatttgttccggatgataaaagccccggaagaagcggagaaactctatcggcgcgcttacagggaaacaatggcctacgacacgaaagggaaagaaaagccgtggattctggcggcaaacaaccttgcaatagcgctgctacgcagggatactttcgacgtagagatactgaaacccctgattgaccttaagcggaaagtgaacatggtggactctttcaatgacggcatcagcataaccaagactgaggtaaaccccgaaacaatcgttgccaaccagctcgcaatgtacatacgcgcctataactttaaagaggccagcatccttgccgacaaacttccggataccgaacgcttccagatgataaaggcatttgccaactgtctgggtggatactacgactaccggggtgcagccaccgtaaaggagggcgaggaacgtaaaaaggtattcaaattggtaaaggagtcgtcaccgctcaataatattgtaatgtgcatggctatggaaacggacaattacaacaaagaagcacagaaagcattggaagaactgcctgaaacggccatgactaaatacatgaaactggtgatttacatccgggaaaagaaactgtatgaatggagctacgataacgccctcgactttgacgaagcctgcaagaagttggaagaaatcgtcaaactggatgagaaatactacaaaatagccgttaacgacggtgaaatcagcaaggaatttatggaatattacgaccagggcgactggaaactttattaaacggatatggagagttgaacatcatgaagaaaccactgattatattgattgtactgcacacactgataccttttgcctttgcccaacagcaaacgggcaataatccttctccggcaacgcatcctaaagataccgtcggcataggattcgatgctacccggcagatgttccaaagacgttaccagcatccggatgcagtgcctttcgacacactatggaaaaataatgtgtatatctccttgtttggcggcatggacaaaatgattccgcgcggaaacacggatttcaacaccggtcccgtgggcggtatcgccgccaattggcagttcgcccccgcccatgccctgcgtgcctcattgctggcgggtaacttctcgcgcaaaatagacaacgaaaccctattgcgtttcggcctgcaggcggattatctgctgaatgtatcatcctacgtcaacggctacaatcccggacgtatcttcgagttcctgaccgtagcgggagtcggctatcaattatctgcactggcaggcagagtggaacatgtggccgacctgcatttaggtttccaactgaaactgcaccctaccgcacatgtggacttttatctggaaccccgcttcaccattatgagtgacggcatagaccattctttccaaaagaactggcataaatatgacatgacctacggtgcgaccgtaggaatgaactaccgcctgaaagcatggaagcctttcggcaaaatgcgcatactggaaggcaatcattttttggacaatacctttatcggcatcgctgccggcgggcagtttcaagcttcccgcctgacaagtgaaatgggactgacaaactccatcggcccgcacatcagcctgtctgccggcaaatggctgataccggcattcggcttacggctgtcggcattcaaatcggccgatacctggcataagaaagtaatcgcctcttcggcgagttcggccggtgaagagttttatgagatgtccgcatacgccggggggcgcctggaaggtatgctggatgccacttatttttttaacggcaggcaactcagtcccaaattctccgtcaatgtattggcgggcggtgaactgggatatattcaaaaagaaaatggttatcggcccgcaaaaggcggatatacgggatttacaggcggcttgcaatttaaataccggctttggggcgatgtttctttatttgcagagccacgcaccagtctggcatcctattcattaaagaccaatgaaaaggaagaaggcagatacgtagccaaaaagttcacagacaatctgtacagtatcaatataggtatagagatacagcgtaccgatgaagaaaaccgtatggcacgctctttaaaccgtgatttgtttaagccttctttctttgtaagcggcgcaatcggtttctccgttcccatacaaatgaaacggtatgaaccgaaacgctacttcgattacatggtcacagcaagcgtaggacgcattttcaccccgttgtcatcactccgtttagcagcggattacggacctctgtccacagaccggaaagggaaaaccttggattatgatatggcaagcggaagccttgactatatgctgaaccttaccaatctgatgacgggatatgaccccgaacgcaaatacgacgtacagctatttgccggaatagtggcttctatgcggatgaaacatgagaaccgcttctttatcggcggagaagcgggactgcaaacatcttaccgggtgggtcgccgcttcaaggtattcctcgaacccaaaatccgcatttacggcaaggaactgctaatgcaggataatgtgcaggggagcgacatcatgatgtcgctaaatgccggaacaagcttttcgttctaaacgggaacaggttatttcagaagttcatcaatcttcttaaccaaagccgagaactcttccggattataaaggcgggtgagcatcacgatgcgtccttccttatcaatcaatacattacgggtaatacctgcttggcgcaacgcatatttggcgaaaatatcagcccccgggtccaatcccaacggataggtaacgcctgtggacttgccaaaagctatgactttattcaacggctcgtcacggtcgatgcccattaacatgaaatccggatcggacttatgcttctgccatatatccttttcgataaaaggcatctccttacggcacacaccacaccagcttgccgtaaactgcaacataaccaccttgccacggaaatcggaaagcgtaacggtcctgccgtctgtcagcgtaacggtaaaatcgggagccacctgccccactttcacaatataaccggtatcgtctgcctctgcttcctgtgccatacctaccatgctgcacaatgcgaataggccaagtaccaatgatctgagtcgcttcatttttctttgtttttaagtattcataaatagatttcctgtcacaaaagaaactaattaggcataacaaaacaaatagagtatgaactctttgcaaatatttaactcataccccacacgaaatgcgcggatttacacagacagcatctaatgaccgttcagtcattcataaaccgtcttgtgtaaatccgcgcaacttatattcaaagccttaccgctccgaaaacccgttccttagatattgggttttatgtccaacttcacgggcttaatcatgttttcgggcttcaggatagtatccaaatcttctttggaaagaatgttgtgttccagaaccagttcatagaccccttttcccgttgcaagggcttctttggctatcttggtagaatttttataaccgataaccggattaagagccgtaaccacaccgatgctatcgtgtacatatctgcggcatacttcctcattagcggtaataccgtcgatacagagcgtgcgcagggtatcgaatccgttcatcagcaaatcggcagactcaaaacaacattgcgccattacgggttccattgcattcagctccatttgagctgcttcgccactcatagccacacaaaggtcgttgccgattaccttataggatatctgattcattacctcagggataaccgggttaaccttacccggcataatggaagaccccggctgcatggcaggcagattgatttctcccaatccgcaacgcggaccggatgcaagcagacgaaggtcattgcatatcttgttcatcttcaccgcaactcttctcatagccgaggagtagcctacaaggcaagaagtatccgaagtagctcccactaagtcaccggacagtttcacgtcccatccggtaagcttcgacaaagccttcacgcatttctccgcatattccggttctgccgcaatacccgtgccgatggcggtagctcccatattgactgtaaggaattcctccgccgcaaagttcaggttctttatctcattgcgcaaaatgctggcaaatccgttgaatgtctgtccgagagtcatgggcacggcatcttccaactgcgtacgtcccattttaatgatgtgtttaaacgcttcggctttgcgttggaacgcatcgatcaactcctcaaaatgtttcacaagtttaaggtgagtataatacattcctatatgtatggcggtaggataagcgtcattggtggactgcgagcgattgacatgatcgttcggtgaacagtattggtattcgccgcgtttatgtcccatgatttcaagcgcgcgattagctattacctcattggcattcatattggtagtggtgcctgctcccccctgaatcatgtctaccgggaactgctcgtggtgcttgccttcgagtatctccttacaggctttaaggatagcatccgtttgctgcccggtaagcagaccaagttcggaattggcaatggctgctcccattttggtaatggcaagagcgttgataaacaaaggatattcgttcagatgaaatttactgatacggaaattctcgatacctctgagagtctgtactccatacatggcgctttccggtatttcacggctgccgattaaatcgctttctgtgcgagtttttgtagatagttcttctttcataatatatgtttattaactatttcaataagcggtcatcaaagaataaccaaagatagcataaattgttttgtaaacaataatacttattattaggttaacaacatttaatacaagcctttttatacacatattactatatataatatgacaaaatgtaagaacacacagggttaccactccaaattactaaatagttaatatatgcttaatttagaaaatataaaataataaatacaacaaattcaccccctgttattgttatataagggattattttagaaattagccaatagtagagaatataacaaccttatctaattttttaaataataagtatatggttttacaattattatttgtactgaccgctattatcataggtgcacgcttaggcggcataggtctcggagtaatgggcggcgtaggtttgggcatactgacttttgtatttggcttacaacccactgcaccaccgatagacgtaatgttgatgatagccgccgttatttccgcagcttcctgcatgcaggcggccggcggacttgattacatggtaaagttagcggaaaaactgctgcgcaagaacccgtctcaggttactatcctcagccccatcgtcacctacctgtttactttcgtagccggtacaggacacgtggcatactcggttcttcccgtcattgccgaagttgcaaccgaaaccaaaatcagacctgagcgtccgctgggtatcgctgtcatcgcttcacagcaggccatcacggcaagtcccatttcggcggctacagttgcactgctcggcctgcttgccggatttgacatcactttattcgacatactcaaaataacgattccggcaacaatcctcggtgtactggtaggcgcattgtgctccatgcgtgtgggaaaagaactgattgacgacccggaatatcaaaaacgtatgacagaaggctacttcgacggcaagaaagtgaaaatcgacgatgtaacaaacaaacgccatgctatgatttcggtactcatatttatccttgccacggcattcatcgttcttttcggctcattcgaagggatgcgtccttctttcctgattgacggaaaaacagtttccttagggatgtccgccattatcgaaatcatcatgctttcggctgccgccctcattttgctggtaactaagacagacggaataaaagcaacacaaggctctgtcttcccggctggaatgcaggctgtaatcgccatcttcggcattgcctggatgggcgatacattcctgaatggaaatatggcgcaactcaccgcctctatcgaaggtatcgtacgccagatgccctggctgttcggcatcgctttgttcgtcatgtctatcctgctgtacagtcaggcagccacagtacgcgctttagtaccgctgggcattgctttgggcatatcgccatatatgctgatagccatgtttcctgccgtaaacgggtatttcttcatcccgaactaccctaccgtagttgcagccatcaactttgaccgtacaggaaccacccgaatcggtaaatatatactcaaccactcttttatgatgccgggtatcgtctctacggcagttgccatagccttgggattattattcatacaatttttctaagcatatttacctttaacctattttttaattcaaacaaattaagttatgaaaagattagaaaaactcagcatggtagccgttatgctactgctttccgtcacaatggctttcgctcagcagaagcctaacatccatatccttgccaccggcggaaccattgccggaaccggaacgtctgcaaccgccaccaactatactgccggacaagtagccatcggtacgctgctcgatgccgtacccgaacttaaaaacatagctaacgtaaccggcgaacaaattgtcaagataggttcacaagacatgaacgatgatgtatggctgactcttgcaaagaaaatcaaccagcttctgaaacgctctgacatcgacggcatcgtaattacccacggaaccgatacaatggaagaaacggcctatttcctcaacctgacagtcaagagcgacaaaccggtagttctggtcggagcaatgcgcccctctaccgctatcagtgccgacggacctcttaacttatacaatgccgtcgttgtggccggagcaaaagagtccaaagggaaaggcgttttagtggcaatgaacggaagcgtgcttggtgctgcaagcgtattgaagatgaacactgttgacgtgcagaccttccaagctcccaacgcgggtgcactcggttatgtactgaacggcaaggtcacgtataatatgtcgtctgtaaagaaacacaccacccactcggtatttgatgttaccaatctgaactcactccccaaagtgggaattgtctacagctactcaaacatcgaggctgacatggtgactccgatgctgagcaatggctataagggtatcatccatgcaggagtaggcaatggaaacattcacaagaatatattccccgtattaacggaagcccgcaagaaaggtattctcgtagtccgttcgtcaagagtgccgacgggtcccacttcgctcgatgcagaagtagacgacgcacagtatcagtttgtcgcatcacaggaactgaatccccagaaagcacgtgtcctgctgatgcttgcactgaccaaaaccaccgactggaaacagattcaggaatatttcaacgaatattaaaaactgatagaaatgataaagaaactcacatttatacttctggctgcgggctgtacacaagtcatgtacgcccaaagcacggagaagaacgagaagttccttgaaaacaagaccctgtttgaagaactcaccaatgtaaagaaaaaacaagataagttcaacttattcctcaatatgcagggcagcttcgatgcaaacttccgcgacggcttcgaagagggagctttcaaaatgaggcaacttcgcattgaaaccaaaggaaatatcaacaactggctttcgtaccgatacaggcaacggctgaaccgctcgaacgacagtagcggcaacatagacaaccttcct

SEQ ID NO: 4075 - DNA, 39426 bp, Unknown
  gut microbiota DNA sequence
cccgtcaatagatgaggatttttacgttgacccgataaaatgaaaaaagaccgctgaatcagcgatcttttttagttgcggaggcctgactcgaacagacgacctttgggttatgagcccaacgagctaccaactgctccactccgcgatgttttgtgagtgcaaaggtacggcttttatttgaatttgcaaataaaagccggattatttttcataagaaatgcactaatatacataatcggttgataaataggctgataaaatacaaatatttttatttgctaattggcttgattgttaataaaatgtgcttttgtttgtgatatatgcggaaatgtcttacttttgcacaaattattaagcaatgtgcaattagtctatggccgtatcgaagacaaaagctaaattagtggatgtagcccgtcagttgtttgctaaaatgggtgttgagaataccacgatgaatgatattgccctcgcttctaaaaaaggtaggagaacgctttatacctattttaagagcaaggaagatatttatatggctgttgtcgaatcggaactggatatgctttcggacatgatgaagcgtgtggcggagaagaatatatcgccggacgagaagatgattgaaatgatatacacgcgtctggatgcagtgaaagaggtggtattccgtaatgggacgctccgggctaatttctttcgcgacatttggcgggtagagaaggtacgtaagcgttttgatgccaaggagatactgctgttcaaagatgtattgcgcgaaggagtggagaaaggcgtgttcagaatagacgatattgacatgactgccgagttggtgcattattgcgtaaaagggattgaagtgccctatatccgcggccatatcggtgcaaagttggatgatgaaacccgcgacaaatacgttgtcaacctcgtgtttggcgcattgcatagaacataaaaacatttaatcaataattaaaaacagtatgggattattagacggaaaaacagccattgtaaccggcgctgctcgcggcattggtaaggctatcgctttaaagttcgctcaagaaggagctaatatagcattcaccgacctggtgattgacgaaaatgctgaagctacagctaaagaaatcgaaacgttgggcgtaaaggccaaagcatatgcttccaatgctgccagctttgaagatactgccaaagtggtggaggctatccatgcagacttcggtcgcattgatattctggtaaacaacgccggtatcacccgtgacggtctgatgatgcgcatgaccgaacagcaatgggatatggttatcaacgtgaacttgaaatcggctttcaacttcattcacgcttgtactccgattatgatgcgccagaaagccggcagcattatcaatatggcttctgttgtaggtgttcacggtaatgcaggccaggcaaactactctgcttctaaggccggtatgattgcattggcaaagtctatcgcacaagagttgggttctcgcggcatccgtgccaacgctattgctccgggcttcattatgacggctatgacggatgcgctgtccgaagaagtaaaagccgaatggtgcaagaagatacctttgcgtcgtggcggtactcccgaagacgttgccaatattgctaccttcctggcttctgatatgtcttcttatgtatcaggacaggtaattcaggtagacggtggtatgaacatgtaaaatagtgattgacggttagcggttagtgagaattgccagccgctaacctcagttttttaatcactaatcgctaatcactaatcgctaaataaatgactgtcgtatacgaagacaatcatatcattatagtcaacaagaccgcttccgagatagttcagggagacaagacgggtgatacgccgctttcggaaaccgtaaagctgtatcttaaggagaaataccaaaagcccggcaatgtctttataggtgttacacaccgtttggaccgccccgtaagcggtcttgttgtttttgccaaaacgagtaaggcacttgcccgtctgaacgagatgttcaggaacagtgaggtgaagaaaacctattgggcagtggtgaagaaccgccctcgggagtcagagggtgagttggtgaactatttggtacgtaatgagaagcaaaacaagagctatgcctacgataaggaagtgccgaacagcaagaaagcgattttgcattatcggctcatagcccggtcgcagaactattatctgctggaaatagacctgaaaacggggcggcatcatcagatacgctgtcagttggcaaaaatgggatgtcccattaagggagatttgaagtacggttctccccgttccaatcccgacggaagcatttgtctgcatgcgcgctttgtgcgctttgtacatccggtatccaagaagctgatagaggtggaagcccctgtccctgccggtaatctatggaatggctttgaaatggtttgataatctgttaataacaaattcaatgaaaaagattctgattctttcgggactgtccctgcttgttgcgcttgcagttcgggcacaggataaagtgaccgaatacaatgtacgtcctgccgttgcggtgcgtactccgctccagggtgacagtatcaattttactggggagaagttcacggccgacgctttgttgaaaaccgatatcagtcttgacttcgacgggcgtccttatgaacgtatcacggcggataccgcaggatatgtacgggtggagaaagccgataaggataatctgttctatctgtttgccacccatctgcgtgcggaacgctttatgaaaggaaagttgaatatttactctcccgtgcgtttcgaggtgtttgtgaatggcgtttccaaacagtctaaaacaactgcggaagatagcttgtcgcaggttgctccttcggtactcagtctgcgtctggagccggaaacggattatgagatagtcgttaaattgttgtcgacggctgccgataaggctgttcccgtattgaagtgcgagtttgagaaagataaggagtttgccgatgtaggttatcggctcgcacccgatttgaaaagacgtttcgcattgcacaatacggctttcggaagtcgcgtgcgctcggtcagtctctctccgaacggcaaatatctgcttgcctgctatgcggataactactcgttgaagcgctcaaggacacgttgtgaactgaccgaactgaagacaggcagggtgatactgcccgctgccgatgagaaaatgcgttggatgccccgcagcaataagctttattataccgtaacaggcaggcaacggaatgatttggttgtgttcgaccctgctaccatgcgcgaggaagtgttgctgaaagatgttcccgagggatattttgcatggtcgcctgcagaagactatcttatctactctccggatgataagggagaagcggtaggcggtcctttgaagcggctgctgcatcccgacgaccggattcccgatgcgcgttcccgcaactatctcgttaggtacgaccctgtcaccggactttccgaacgtctcacttacggcagccatgccgtttatctgaatgatatatcctctgacggcaagaaactcttgtgttccacctctaaatcgaatatcactcaatgtcctttctcgcttacttccatcttcgagctggatttggctacgttgcaggcagatacgctggtggcgtgggacccttatgtaaacagggcggcttactctcccaacggcggacagcttttggtaatcggcagtccgatggcttttgacggaatagggaaaaactgcggcgagcatcccatcgccaatgatttcgatactcaggcattcattgtggacaaggccacgaaaaaggttaatcccatcacgcgcgatttcaatcctgccgtcgacttcctgcagtggaaccgtgtagacggctgtatctacttcaatacaacggacgaagattgcagacatatctatcgctatgtgccgaagacggagagttttgaaatgctgccgcttcaggaagatgtgatttcttccttcgacctggcggagtacaatcctgcggttgccgcctatgtcggtggtggcaatgccagtgtgggagttgcctatacgtatgatgtgaagaagaaaacatccgttttgcttgccaatccgatgaagtctgttttggacaagatagatatgggcacaatgaaggagtggaacttcacggcggaagacggtacggagattaagggtatgatatgcctgccgccggctttcgacccgaacaggaaatatccgcttatcgtttattactacggcgggactacacctaccacacgcggcatcacttcgccttattgtgcgcaattgtttgcatcacgcgattatgtggtttatgttatccagcccagcggggctatcggttacggtcaggagttttccgcccgtcatgtcaatgcgtggggagaacgcactgccgatgaaatcatcgagggcacgaagaagttctgcgccgcgcatccgtttgtcaacgacaagcgtatcggctgtatcggagcatcctatggcggttttatgacgatgtacttgcagaccaagacggatttgtttgccgctgccgtttcgcatgcgggcatcagtaacgtgaccagttactggggcgagggctattggggctattcctacaactccgttgccgctgccggaagctatccgtggaataatcccgatttgtttaccaaacacggagcattgttcaatgcggataaaatcaagaccccgttgttgctgttgcatggtacggtggatacgaatgtgcctatcggcgagagtattcagttgtacaatgccttgaagatattgggtaagccggttgagttcataacggtggacggcgagaatcatttcatcagtgattatcccaagcgcgagttgtggcacaactctatcatggcatggtttgcacgttggctgcaggatagtccggcatggtggaacgacctttacccggaaagacattggtaggataccaagataagaggaaaaagctcctcactactttattacgacaaaaagtcgtttcccggaatagacaaggaggaaacggcttttttgttgtcagtgtgcttactattattcggcacatgaagttgtgaaatggatgctcttggccgtttgcatctgtgctcaggccaagaacgatccgtcacaaacaaacataaacagggctgctactaatactagttttttgttttttacttgtttttaattaggttaatatatttattcggttttggtttaggtagattctactttgatgttgtggagttaaacttcacacagtatatatatcaaatgacgtgccagagtgagggtggaaacggtaagtcgttgcagattagcacgctatttttaccgtgaaggtgcgcaggggtgtgaagatgtgtggaagcggtgtggaaagtgtggaatagagtgtggagtttttccacagttataactctattccatataatttaagtttgttgtaaagtgtctttctgtctatccccagcagttgggcggcgcggcttttgttatatcccgtctgcttcaaggcttcgattatctgctgcttctcggtctcttcgttacggagaggcatacctgctgcggatggggctaccggactcttcagttcgctaagctcgttcagggtgatgagcttgtcttgcgccaaaagggtggcacgccggacgatgttcttcatctggcgcaggttgcccggccattgatattccaataaagctttggatgccttttcgtcaaagccgatgaggtgcttgtccagttcgcggtttgcctggtccaggaagaagtttgcaaagagcaggatatcctcgcggcggtctttcagttgcggcatacgcagggtaaactcattgatgcggtggtagaggtcctcgcggaaagtccctttctcgatggcctgttccagattctcattggtggcggacactaagcgcacatctacctgtatctccttgttggagccgacagggcgtattttacgttcctgcagggcgcggagcaattgtatctgcacctcgtagctgagattgcctatttcatccaaaaagatagtgccgccgttggcagcaacgaacgcgcccgtcttgtcggtcagcgcaccggtaaaggaaccttttacatggccgaagaattcggaagccgccagctctttggggatagctccgcagtcaatggctatgaacggttgcttggcgcggcggctcaacttatggatgcgttgcgccacgtactccttgcctgttccgctggccccgttgatgaggacggacatgttggtgggagaaaccaggttcacataattataaagttgcctggcggcatcgctttcgccttccaggtagtcggatgaagagttctctgcacctttccggcagggattctcattgctttcggaacgcatggtctgtttggacgaaacagacggtctgtttgggtcgaacgcatggtctgtttgggtcgaacgcatggtctgttccgaagcaacggatgaggacttcagggcttcatccattttcttcaataactcgtcggggtttacgggttttgcaatgtagtcgcatgcgcccagtttcatggcttgcacggcagactgtatgtcggcatagcccgtcatgatgataagagggatgtgcagggaatgttctcccagccacttcagcaaatctatgccgtcgcggtcgggcaggcgcaagtcggacagtatcaggtccaccgtctcggcttcgatatgcttctgggcacgggctatactgcttgccgaactgacttggaatccttttttgccaagccatgttttcaatatcatgccgtaagtgatatcatcttctacgattaatatggatttcatcccttctgctttttatctcttttatggcacaaaggtaaatcgttttgtccgattttagtatatttgcaggcttaaattaaacaaaaagacagatgaaaagaaatctcattgtattattaaccatactggtatgcggtctgacagcctgcaaaccgggacaaaagaaagacggaaatatggaaaaagaaacgaagttgaagattgagacaagtgcgggtgacatcatcgtgaaactgtataacgaaacgccgaagcatcgcgataactttatcaagctggccgaggaaggtacttatgaaggtacgctgtttcaccgtgtcatcaaggacttcatgatacaggcgggcgaccccgaatcgaagaatgccccgaaaggcaagatgctgggagcgggcgatgtgggatacactgttcctgcggagtttgtctacccgaaatacttccataagaaaggtgcgctgtctgccgcccgtcagggagataacgtaaacccgaagaaggaatcgtccggttgtcagttctatatcgtgaccggaaaggtgtataacgattctacgcttctcggcatggaacatcagatgaaccaggcacgcctgaacaatgctttcaatgctttggcgcagaagcacatgaaggaaatctacaagatgcgtaaggacggtgaccaggaagggctgatgaatctgcaggacacgcttatcgcgcaggctgaggctcaggtggccggcgaaccggagttccgcttcacgccggaacaggtaaaggcatataccactgtaggcggcacaccgcatctggacggcgaatataccgtgttcggcgaagtcgttgaaggcatggatgtggtagataagatacaacaggtaaagacagaccgcagcgaccgtccggaagaggatgtgaagattgagaaggtgactgtgattgactgataaacagaattgcgtcaaacctttgggaagagagtctcgctctgtcacacaagtatgaagataaataagcattgtttccccaacggcctgcggctggtacactacgaggataccagcacgcagatggtggcactgaacatcgtttacgatgtcggtgcgcgcgacgagcatcccgagcataccggctttgcccatttgttcgagcatctgatgttcggcggttcggcgcatattcccgattacgatacgcctttgcagttggcggggggagaaaacaatgcctggaccaataatgacattaccaattactacctcaccgttccgaagccgaacgtagagacagccttttggctggagtccgaccgtatgctggagctggctttcagcgagcaaagcctcgaagtgcaacgcggtgtagtgatggaagagttcaagcaacgctgccttaaccagccgtatggcgatgtggggcatctgttccggccgttggcgttccgggtgcatccgtaccgctggcctactatcggcaaggaactctcgcacatagagcaagccacgctggacgaggtgaagagtttcttctatcgtttctatgctccgaacaatgccgtgttggcagtgacgggaaacatttcatgggatgaaaccgttaagcttaccgagaagtggtttgctcccataccccggcgggacgttccggtgaggcaattgccgcaggagccggagcaaacgcaggaacgccggctgacggtagaaagaaacgtgccgctggacgccttgttcatgggttatcacatgtgcagtcgcgagggtgcggattattacgcattcgatattctgtccgatattctcagcaacggacgttccagccgtttgaaccgccgcttggtacaggaacagaatatcttttccggtatcgacgcgtacatcagcggtacgcgtgatgcgggtctgctgcaaatcagcggtaaacctgcggcaggtgtgtcgttggagcaggcggaagctgctgtccgtaaagaactggaagagttgcagcggtctccggtagacgggcaggaactggagaaggttaagaacaagtttgaatctacccagatattcggcaatatcaactatctgaacgtagccacaaaccttgcctggttcgagctgacgggaaaggcggaagatattgaccttgaagtagagcgttatcgctccgttacgacggagcagttgcatactgtggcgcagcgtactttctgcgaaagcaatgccgtagtattatattataagagtgataaatgacagtcaaagggagcgtttttcgtctctttgcaggaagggaagggcgccgtttgacgaaacgaaagttccctgttaaggaaacttcggtttccttgttgaggaagcttcggtttcccgttgaggaagcttcagtttcctgttgaggaagcttcggtttcccattgaggaaactcccgtttcccgtcgggggaactcccgtttcccattagggaaactttggtttcttactaaggaaactttggtttcccgtcaggggaacaatggtttctccctttgaaacaaattttagacaataagatgatgaattggatagccggctataagcagcattataaagcgttgatatttttgggacttcccattgttatcggacaggtgggagtaattattctcggttttgccgatactctgatgatcgggcatcacagtaccgaggagttgggtgcagcttctttcgtaaacaatgtatttacgctttgcatcattttcagtaccggtttcagttacgggctgacgcctatcgtgggcagtctttacggcaaccgccgttttgcggaagcggggcaggcgttgcgttgcagtttggtggcgaatgtcctggtggcattgctccttacgtttatcatgacggtggtctacttcaacgtggagcgcctggggcagcccgaggaactgatgcctttgataaaaccttattacctggtattgcttgcttcgctggttttcgtgatgctgttcaacggcttcaagcagtttacggacggaatcacagatacgaagaccgccatgtggatattgctgggcggaaatacgctgaatatcataggcaactatatccttatcaacggcaaactgggcttcccggagctggggttgctgggagcaggcatcagtacgttgttctcgcgtattatgatggtggtggtgtttgcgttgattgtgctgcgcggtcgccgctttatccgctaccggatcgggttctcccgcatgggatggtcgtttccggtgttcaagaagctcaatgcactgggctggcctgtcggtttgcagatgggaatggagacggcctctttcagccttagcgccatcatggtgggctggctgggcactatcgctttggcatcccatcagataatgctgaccatttcgcaattcacgtttatgatgtactacggtatgggcgcagcggtggcggtgcgtgtcagcaatttcaaggggcaagacgatatggagaatgtacgccgctccacatttgcgggtttccacttgataatggctatggaagtagtgcttatgagcatcgtttttgtgatgcgcggacaggtgggcggctggtttacggatagcgcagaggcttcggcgctggtagcctctttgttcttccctttcttgatttatcagtttggcgacggactgcaaatcaactttgccaatgcgctgcggggcatatcggatgtaaagccgatgatggttattgcatttatttcttattttattatatctttgcccgtaggatatttttgcggttttgtgctgggctggggactggtcggcgtgtggatggctttcccgttcggtctgaccagtgccggggtgatgctgtggctgcgcttccgctataaaacgaggacgagatgatgcacggggcgatgctttgtcaccctgtcgctccataactcttttattacctgtttatgaatagcgtatcgaaagtaaagatagctgtcggatacactctgctgctgggagtgttgttcttttccctgttctttgtgcaccgggagatggagcatcttatgctttccgataaccgggacgtgcagtggacggacagtctcatcacgcttcttcggaagaaggatgcgaacaccatttacatgctgcgcgtgttgagcgagacgaacgacagcatggtctctacccgggagatagaaaatattatcgctacccggcaggattcgtttgtgacaaaccagcgcgtacagcagcgcatcattacgcatcgcgacacggtggttaccaagcccaggaagaaaggattcttccgccgtttgggagaggtgttcgtgccgcctaagaaagataccgccattcaggtaaagacttccctcgaatatgccacggatacggtgattaacgtgtataatccggtggattccctgcaggaaaagctgcgtgccgtggcacaacagcagaaggagcacattgcaattgtacagcgccgcaggcgtaccttgcaacgcatggaccggatgctgaccgcccgtatcgacagtctgctgaaaggctacgaacaggaaaccctgcagcgtgcccgcaaagaggcggagtaccagcagtccgtacgtcatcactccattaagactatcagcggcattgccgtcggtgcggtgctgctttccgtctttttcctgataatcatagggcgcgacattacgcgcagcaaccgctatcgccgcgaactggaagaagcccgccgccgtgccgaggacctgctggccacgcgcgagaagatgatgcttgccatcacccacgactttaaggcgccgctcggctccatcatgggctatgccgacctgctctcccgtctgacggtggacgaacggcaacgcttctacctggataatatgaaaacctcatcggaacatctgctgaagctggtggtcgatttgctcgatttccacaggctcgaccttcataaggcggagataaaccgggtcaccttccatcccgcccgcttgctggaagagattcatgtcagttttgaaccgctgacttctgccaaaggcctggagttgcattgcgatattgctcccgaactggagagtacttacatctgcgacccgctccgtctccgccagattatcaacaacctgctgtccaatgcagtgaagtttacggacgaggggagcataacgatgacggcgcgttacgaggaacgccggctggtggtggccattgccgatacgggcaaaggtatggaaccggcggacagggagcggattttccaggagtttacccgccttcccggtgcgcagggcaaagagggtttcggactcggtttgtctattgtgcgcatgcttgtgcagttgctggaaggaacgattgacgtggacagtgtgccgggcaagggaagtacatttacgctgcgtgttcccttgttccccgtacaggtatcggaggataccggcgagaaatatcaggagacggaaaccggaatttcttccgctctttcagagagcatgcccgcttcttcacaaccttcgctccgtgtgttgctgattgacgacgaccgcattcagcttacgcttaccgcagccatgctccagcatagcggcatcgcttcggtatcgtgcatgcaattagacgaattgttggatgccctgcgttccgacacctttgatgtgttgctcaccgatgtacagatgcctgccatcaacggtttcgacctgttgaaactgttgcgtgcgtcgaacctgccccaagcgcaggccattcccgtgatagccgttaccgcccgtagcgatatgaagccggaagagttcaaggaatatggctttgccggttgcctgcacaaaccgtttacggtggcggaactgttccgggaactgaatgcggaaggtatcggacaaacatctgccgtgcagagcgaagtagcagcagcggagacggttgaggcttcatcgccggatgctccttatgacttctcggcactcaccgctttctccggtgacgacccggaggcggcaaagtccattatggagagtttcgttaccgaaacccgcctcaatgccgaacgtttgcaaaaggcggcggatgcggcggatatggacgaggtggcggccgtttcgcacaagatgattcctctctttacgctgattggcgctacggaactggtggcggagcttaaaatactggaaggcttgcgcggtactccttttacagccgggcagaggcagcgggcactgcgttcgcttgctcttatcgaggacattatccgcttgcagacacgggcggattagagtaagcaattgcggtataagtggtcgtaaacaccggcgcaacatagtatttttcttttattaggaactttatctcaaaattaattgtttactttgtacgaattaatcgatgacagcttgacgttccaatgagaagaaaatggttaagaggggcactttgggtgcttcttactcctattatcctatttgtaatattgatgatattgctttacgtgccgcccgtacagaattttatacggaagcaggccacggcaatagcatcggatgctacgggcatgaatatctccgtagagcggatagaccttcgttttccgttgaacctgcttgtgcgaggtgttcaggtagtgcagccgggaagcgatactgctgatatccaacaccccgataccttgctgaacctcggaagcctgaatgtccgcgtacaggcatggcccttattgaaaggaagggtagaggtggatgacatcactttgcaacgggtggccgtaaactcttccggcctgctggaaggcatgcgcataaaaggtacgctcggacggttcttccttgccagtcacggcatagacctgaataaagaggatgccgtactgaaccgggtggaactgagcgatacccacgtgcaggtgatgcttgccgacactaccgaaactccggaggataccaccgaaaccgccttgaactggcgcgtagcattgcataacctgaaactgaagaatgtgtcggtggatttgcagatgccgctcgactccatgtcgctggcagccactatcggggatgcaagcatagaggatgccgaagccgacctcaagcggcagttctatggctggcgtaagtttgcccttacggggacttctgtgaattacgatacgggcacagccgttcctgccgagggatttgacgcttcgcacatcgcattgcgcgatatccgtatcggcatagattcggtgatgacctgcggccgcgacatgaatgccgttatccgcgagttctccatgtacgaccgttccgggctgacggtgacttccctgaccggacgcctctttgccgactcagccgttatccgtgttccctatttgcagctcaagaccccgcacagcgagatgaacctgacggcgcagacctattggaaacttgtcgatatacccactaccggacagttgtccgcccgctttaacgccaatatcggcaagcaggatgtattgctctttgccggcggactgcccgaaacctttaaagaggcttatcctttccgcccgttggtaatccatgccggtacggaaggcaatctgaaacagatgcagatttcccgtttcacggccgaacttcccggcgctttctcattgagcggcggcggtgagttgtggaaccttacggatagtctgaagcgtagcggagggcttgactttgagatgcagacgcaagaccttaatttcctcaccgggcttaccggggtcactcccgacggctctatcgttgtgcccgacagtatgaacctcgtagcgcgtctcgggctcgacgggcctcaatgcaatgccctgctcaaagtgcaggagggcaaaggcagtctgaatctggatgccgcttacaacctgtctaccgaggtctatcatgcagacctcgccatagatgccttgcagcttcatcatttcctgcccaaagattctgtttatgcacttactgcgcatgttgccgccaaaggcaggggagtggatatgacttcccgtcagacgacggctcttgtggaaaccaaactggacaaactgcaatatgcccgctggaatctgtcgggtgtgaacctgaatgcggagttgaaatctgcggtagcttctgtacggttgacgagcgataatgaactgttgaagatgcagtccgaagccgaccttcgtctcgaccgtaaatatatggacggcagactgaacatgaaagtagaggaactggacttgtataatctgggaatcgcatccgaacctttggaacatcccgttgcgttcaatctgggagcggaagcgcgtcgcgattccattaagttgcggatggatgccggcgatatggatttgcagttccgtgcccgcagcacgttggaggagttgctggggcagtcggacaagttcgtagccattctgacgaaacagatagaggaaagacgcctcgaccatgccgccttgcggcaggtattgccctcggcgggcatgaagttgacggcggggcaggccaatccggtcagctatttcctgaaaacaaaaaacataaggttcaatgacttcacccttcgtttcggaagtacgccggcacggggcatcaacggacggaccgccgttcacggattgcgtgtggactcgttgcagctcgatacggttttctttgccgtgaagcaggatacttcccggatgatgctgcaaagcggggtgattaacggaccgaagaatccgcagttcgtattccgcagtacgctgaccggtgagattcgcagtgaagatgccgaactgaccgtgaattatgtggacggaaagggacagacgggagtgctgttcggcgtcaatgcccgcccgctgacggagggacatggcaaaggcaacggagtattgcttaatctgacgcctgccgagccggttatcgcataccgtaagttccatttcgtagacaacagcaattggatatatctgcataacaacatgcgcgtctatgccaatatcgatatggatagtgacaacggtttgggcttccgtatgcagtcggacaagaacgacagcatttcattgcagaatatgaacgtggagttgagccgtttccaactgggcgaactgagcgaggtgcttccttatatgccccgtctcaccggcttgttctctgccgaggcgcagtatatacagacccctacttccttgcaggtttcagccgaagccaatatcgatgaactgacctatgagcggcagcatgtgggagacatcggtatgggagccacatggctgccgggcgataagggcgctacgcattatctgaatacatatttcagttatgacaaccgggaagtgatgactgccgacggcatactgacacagaagaacggaaaggacacgctggaagtgactacctcttttgaacacttcccgatgaagattgccaatgcttttgtgcccgaccaaatgatgtcctttaccggcgacctcgatggcgggatgtacatctacgggccgttggagaaacccaggatgcacggagatatcacgctggacagcgtatcggtatatgcccgtcaggcaggggcccgctactggtttgacgaccgtcccgtgcagattaaggataaccaactgatatttgataagtttgccatttatactaccagcaagaatccgtttaccattaacggcaaggtggacttccgcaatttggaacgtcctacggcggacttgaagttgctggcggagaactatacgctgctggatgcaccgcgcacccgcgaaagtcttatctacggcaagatatttgtcgatttgaacgctacggtacgagggcctttggatgccctgaccatgcgcggtaacatgaacctgctgggcaatacggatgttacctatgtactgacggactcaccgttgacggtggaagaccgccttgagggtttggtaacctttacttcttttgccgatacggcttcggtgggcactgatgaggctcccgccatgtctttgggcggtatggatatgattatgtccgtacatatcgacaatgccgtgcgcctgcgcgccgatttaagtcccgaccgcagtaaattcattgaattggaaggcggcggagatttgaacatgcagtatactccgcaaggcgatataagccttaccggacgttatacgctttcgggcggaattatgaagtattcgcttcctatcattccgttgaaggaattccagattaacaacggcagttatgtggactggcgaggcgacccgatgaacccgacgctgaacctgaaagcgacggagcgtatgcgcgcttcggtagccgatggtgatgacggtggttcgcgtgtggtgaatttcgatgtgtccatagctataaagaatcgtcttgacgctcccgaacttattttcgatataacggcgccggatgatgccaccattgagaatgagttgcaggctatgggagccgaggagcgcagcaaacaggccattgccatgctggcgaccggtgtttatatgaacagtggtgtcaaaggcggcggattgtctatgggcagtgctttgaacagtgttatccaaagtcagatcaactcattggcaggctcggctttccaaagcatcaacgcaagtttcactatgggtatggaagaccgtacgtcagccgaaacgggtgacaagcagacggattatagcttccgctattcgcagcgtcttttcaacgaccgtgtgcagattgtcatcggcggtaaggtgacaaccggtgccaatgccacgaatgatgcggaatcgtttatcgacaatatttcgcttgagtatcgccttgatacgtccggtacgcgctatgtccgtgtgttctatgacaagaactacgagagtgtgctcgacggggaaataacggaaaccggagtcggccttgtgcttcgtcgcaaaatggaccgcctgggcgaactttttatcttcaggaaaaagaagaagcaaactgtagaatgatatgaaacgactgatagtatatatggcgggcatactgttgctggcaggatgttccacaaccaagcatttgccggaaggtgaaattctgtatacgggacaaaaaaagatgattgtcgagaaccgcagtaccactccggtaggcgagactgccatggaagaggttgaagcggcgcttgccactgctccgaacaattctttgctgggtagttccactattcgtataccttttcctatggggttatggatttacaatggctttgtgaaatatgagaaaggctttggcaggtggatattcaaccgctttgcggcaaagcccgtactgatgtccactgtcaatcccgatatccggcagaaggcggccgccaatttattgcgcgattacggctactttaacggaacggtcagctataaaacattcatcgatccgaaggattctttgaaagcaaagctgcaatacacggtggatatgcgcaacccttattttatcgatacggtctattatcacggtttcagtgagcgtaccttgcgcattatgaatatgagccggcgccgttcgcttatcagtccgggagaacagttcaacgtgaccgacctcgacggagaacgtacccgtatcagtactttgttgcgcaatgtagggtgctattatttccgtcccgattatctgacttatcaggcggatacgaccttagtgcccggcggacatgttgccatgcgcatggttcctgctcccggcatgccttccgttgccgagaaaccgttttatgtaggcaagaaagctttttatctgtatggcaagcagggacagacccctaatgacagtatcgactacaaaggcctgcgcatctattatcacgacaagctgcgggtacgtcccaatatgatttacagatggctgaactatcaggcgtatcgtcagaaacgtcaggtgcaggacagtacgggtatttcccgcagacgctccatgcagcgcctttacagcctttatcgccagacccgcgtgcaggagcgcttgaacaatgtaggcatcttccgttatcttgagatgcagtataccccgcgtgatacgacattcgtgtgcgatacgctggatgtgaatattcatgcggcactcgacaagccttatgatgccgaactggacttcaacgtaaagatgaaaagcaataaccaaaccggaccgggagcttcgttcaccgtaacgaagaacaatgtgtttggcggcggtgaggcgtggaatgtaaagttggacggttcgtatgagtggcagacgggtaaagaccgttcttcgctgatgaacagttatgaagtggggttgtctacctcgcttatgtttccgcgcgtggtcttccctcgctttggcgacaaggagtatgactttccggccactacgactttcaaactgtacatcgaccagttgaaccgtgccaagtattataaactgctggcgtttggcggaaacgctacatacgatttccagccgaagcgtacgagcaagcatagttttacaccgttcaaactcacgttcaacgtacttcgcgaccctacggaagccttcaaggagttgcaggcggagaatcctgcactctacgtcagcctgcgcgaccagtttattccggtctttgagtatatgtacacctacgacaacgcatctttgccgggtgtgcgcaatcctatctggtggcagacgacagtgagctcggcaggtaaccttacttcgtgcatttatcgtattttcggaaagtcgttcaaggagaaggacaaaaagctgctgggtgttccttttgcacagttcctgaaggtaaacagcgaattccgctatcattataagatagacaagaaccagatgattgcctcgcgcattgccggcggtgtgatatggtcgtacggaaatgcgttggcggctccttataccgaacagttctatatcggcggcgccaacagtgtgcgtgctttttctgcacgtagcataggtccgggcagttatgctccggataaggaaaataagtattctttcatcaatcatgtgggtgatatacgtatggaagctaatgttgaataccgcttccgcattatcggagatttgcatggagctgtgttcttggatgccggtaatgtgtggctgatgcgtaaggatgagtcccgtccaggcggcgagttcactttaaagaactttgccagacagatagctttgggtacgggagccggtctgcgttatgatatggactttctggttttccgtctggattgtggagtgggattgcacgatccgtatgataccggtaagtcgggatactataatattcccaagttcaaggacagtcttgccttgcatttcgctatcggttatccgttctaaggcaaactgtgggtttggggctgacaataatgaagaattgtggctaataagcaaactaaaagtagaagtatctgccattgaggcggagttttgtacgattatggaaaagaatggactgaaatcttcctttttctgatataaattttactacttttgtgcctgttatcaaccatgatacactaacctttttaaataataactaatatgaaaccaactttattcttattggcagccggcatgggcagccgctatggtggcctgaagcaattggacggactggggcctaatggcgaaactattatggattattctatttacgatgctatcaaggccggattcggtaagctcgtttttgttatccgtaaagattttgaacaagacttccgcgataaaatcatatccaaatacgaaggtcatatcccgtgcgaattggtgttccaggaactggatgcacttcccgaaggatttacgtgtccggccgaccgtaccaaaccttggggaaccaaccatgccgtaatgatgggtgccgatgtgataaaggaaccgtttgccgttatcaattgcgatgacttctacggtcgtgattctttccaggtaatgggcaagttcctgtctgagcttcccgaaggctccaagaatgtatattcgatggtaggattccgcatcggcaatacattgagtgaaagcggtacggtgtctcgcggcctttgcagcactgatgcaaataatctgctgacttctgtcgttgaacgtaccaaaattcagcgtatggacggtgaagtgagatatattgatgataatggtgagtggactgctactcccgatacaactccggtcagtatgaatttctggggctttactcccgattacttcgcttacagtcaggaattcttcaagacgttcctcagcgattcgaagaatatggagaacctgaagagtgaattctttattcctttgatggtggataaactgattaatgacggtactgctacggttgaagtgcttgatacgaacagtaaatggttcggggtgacttatccggaagaccgtcagagcgtggtcgataagattaaggcattggtggatgcgggagaatatccggctaagctgttctaaaagaacgccaatctattctaaaggagcgcccaggcgattccctctataaaaatatcccctctttttctttctgttttccaaatcggttggacagaaagggaaagaggggatttattgaaatttaaatgaatgcagttgtatgctttgaatgcatgattgcgtgagaataaaaaataatatcgttacctttgcagtcttgaacgattaattcattgacactatgatatctgtagaaggactgaaggtggaatttaatgctactcctctgtttgaagacgtttcttacgttattaataagaaagaccgtatagcccttgtcggcaagaatggggcgggtaagtccaccatgctcaaaatactggcaggtattcagcaacccacttccggtgttgttgccgtcccccgcgaatgtactatcggttacttgccgcaggtaatggttctcagcgatgaacgtactgtgatgcaggaggctgaacttgcctttgagcatatctttgagatgcaggccgacatcgaacgtatgaaccagcaacttgccgaacgtaccgattatgacagcgaggattatcagaagctgatagaccgctttacccacgagaacgaacgctttctgatgatgggcggcactaattatcgtgccgaggtagagcgtactcttcaggggttgggcttttgccgagaagacttcgaccgccctacgagtgagttctccggcggctggcgtatgcgtatcgaacttgccaagttgttgttgcgccgtcctgacgtattgttgctcgatgaacctacgaaccacctcgacatagagagcatccagtggttggagaactttctctccacccgtgccaatgcagtggtacttgtcagccacgaccgtgctttcctgaataatgtcactacccgtactattgaaataacctgcggacgtatttatgattataaagtgaaatacgatgagtttgtgacgcttcgcaaggaacgccgtgaacagcagctccgcgcttatgaaaaccagcaaaaacagatacaggatacggaagagttcatcgagcgcttccgctacaaagctaccaaagccgtgcaggtgcagagccgtatcaagcaactggagaagatagagcgcattgaagtggacgaggaagacaactctgcgctgcggttgaagttcgtttgcagcagccgtagcggtaactatcctgttatttgtgaagatgtagccaaggcgtatggcaaccatgtcatattccacgatgtaaatctcaccataaaccgtggtgagaaggtggcttttgtaggtaagaacggtgagggtaagtctacacttgtaaagtgtatcatggacgagattacggattataccggaaaacttactttgggacacaacgtgcagattggctattttgctcagaatcaggcgcagttgctggatgaaaatcttacggtattcgataccatcgaccgtgtggcggtaggggatatccggctgaagatacgtgatatattgggagcattcatgtttggtggcgaggcttcggacaagaaggtgaaagtgctttccggcggagagcgtacccgtcttgccatgattaagctgttgctggaaccggtgaatttcctgattctcgatgaacctacgaatcatctcgacatgcgctcgaaggatgtgttgaaggaagctatccgcgattttgacggtacggtgataattgtcagtcacgaccgtgactttttggacggtcttgcgactaaggtatatgagttcggtggcggattggtgaaggagcacctcggaggtatctacgatttcctgcagaagaagcagatagagagcctgaatgatttgcagaaatcgccttctttgtcttcctcaccgtctgcggaaaaaacggttgctggcggcaatgccggggcaacggttgcacagccttccgctgcaaaactttcttatgaggaacagaaagaactcaataaacggcttaagaaactggaacgccgtgtagcggattgtgaagcagagatagagcagacggaagcggccatttccattctcgaagctaaaatggctacgccggagggcgcttcggatatggcgctctacgaacagcatcagaaactgaaagcccaactggacagtgtgatggaagagtgggatgcagtttcctgcgagctggaagaggcaaggaaataataacatttattttatataagtatgagagtatttcattttttacccattgcagcattctgtctgatgacaggcgcttgcagcaccggcaagaagcaggctgagctcacagccggtattcagtttgccaacctcgacacaacggccttgcccggaacggatttctaccaatacgcttgcggcggttggatgaagaacaatcccattcctgccgagtattcacagtatggttcttttaccatccttgcggaaaataaccgtaagcagattcagggactcatcgaggagctggctgccacgcagcacgaagccggcagcgtagctcagaaagttggtgatttgtataaaatcgtaatggacagcgtgaagctgaacaaagacggtgtggctcccattaaagcagaacttgaccgcctcggtgcattgaaggaccggaaagaggtttatgcattactgggggagatgcagaagaaaggaattgtggcttacaatgtcttgtacgtaggcgctgatgaaatgaacagcagcatgaatgccgtacagtcttatcaggccggcttgagcatgggcgagcgcgaatattatttggagaacgatgaggctactgccaagatacgcaatgcttttcgtgcacatgtacagaagatgtatcaattggcagggtttgatgaggctgctgccaagaaaggcgtagaagtggtgatggatgtggaaacacgtcttgccaaagctttccgttcgcgtacggagttgcgtaatccgcatgccaattacaacaagatgagtttggaagaactgaagaagaattatcctacttttgattgggatgcttatctgtcagctttggatttaaaagatgtgcaagaagttatcgtaggtcagcccgcttctctgaaggctgctgcagaaattctggatactcttcctcttgagcaacaaggtctctatttgcaatggaaactgattgatgctgccgcaggtactctgaatgatgctatggccgaacagaacttcgatttttatcaacgtaccatgagcggtacgcaggaaatgcaacctcgttggaagagagcggtcagcactgtaagttctgctttgggtgaagcggtaggccagatgtatgtagagaaatatttcccggccgcagccaaagaacgtatggtgactttggtgaagaacctgcaggaaagcttgggtgaacgcatcaaaaaccttgcttggatgggcgattctaccaaagtgaaagctttggagaaactggctactttccatgtgaaaataggttatcctgatacatggaaagattattctacattggaaatcaaggatgattcgtattgggcgaatatggagcgtgccaacgaatggagccatgcagagatggtggctaaagccggcaagccggtagataaagacgaatggctgatgactccgcaaaccgtaaacgcttattataatcctacaacgaatgaaatctgcttcccagccggtattttgcaatatccgttctttgacatgaatgcggacgatgccttcaactatggtgctatcggagtggtaatcggtcatgaaatgacgcacggctttgacgaccagggacgccaatacgataaggacggtaatttaaaagactggtggactgaggaagatgccaaacgttttgatgagcgtgcacaggtgatggtgaatgtgttcgacagtatcgaggttgctccgggtgtatatggtaacggccgtatgactttgggtgagaatattgctgatcatggtggcttgcaggttgcttatcaggcatttaagaaagctacggctgccaacccgctgcctgtaatgaatggtcttactcccgaacagcgtttcttccttgcttatgcaggcgtatggggaaacaatatccgtccggaagaagtgctgaaccgtaccaagagcgatgttcactcattgggtaagtggcgtgttaacggtgctttgccgcaaatcggcgcttggtatgaggctttcaatataacagagaacgacccgatgtttgtgccggtggacaaacgggtttctatctggtaacagagcggttgttataaaagatttcagtcccgttggaaaggtgtggataccttttcaacgggactttttctgcatcattgtacaaaggtatcggaattaataatgagttccttttttaattatacctaatttattgtgtatgaatgtatgtgtgaataaacaaaattagtaactttgcattccgaatagtaaaatgtacgcattactttaatacgcaaatccatgtctgaaactaaaagaatcaaaacagctctggtatccgtttaccacaaagaaggtttggacgaaatcattaccaaactgcatgaagaaggtgtagagttcctttcaaccggcggaactcgtcaatttatagaatctttgggttatccctgcaaggcagtggaagaccttaccacatatccttccattctgggtggacgcgttaagactttgcatccgaagatattcggaggtatcctttgccgccgcggattggaacaagacatgcaacagatagagaaatatgagattcccgaaatagaccttgttatcgttgacctgtatccgtttgaagccaccgttgccagcggtgccgaagaaccggctattattgagaaaattgatataggcggcatttctttgatacgtgccgctgccaagaattacaatgatgtggttatcgttgcttcacaggctcaataccagcctcttcgcgatatgctgatggagcacggagctaccacttcactcgaagaacgccgttggtttgccaaagaggcgtttgccgtatcttctcattacgattcggctatcttcaattatttcgatggcgaagaagggtctgctttccgtcagtccgccaacaatcaaaagactttgcggtatggtgagaacccgcatcagaaaggttatttctatggtaacatagatgctatgttcgaccagatacacggtaaggaaatctcttataacaacctgctcgatatcaacgctgccgttgacttgattgatgaattcacagatactactttcgccatactgaagcataataatgcctgtggtctggcttcacgtcccacagtattggaagcttggacagacgcgcttgccggcgatccggtatccgcattcggcggtgtgctcatcacaaatgccgtgatagacaaggctgctgccgaggaaatcaacaaaatattctttgaagttatcatagctcccgattatgatgtggatgcactggaaattctcggtcagaagaagaaccgcatcattctggtgcgcaagcaggctgctctgcccaagaagcagttccgctctttgctgaacggtgtgctggtgcaagaccgtgacctgaaggtggaaactcccgaagatttgaaaaccgtaacgaccaaggctccgactgcggaggaagttgaagatatgcttttcgcaaacaagattgtgaagaacagcaagtccaatgctatcgtactggctaaaggcaagcaactgctggcaagcggtgtgggacagaccagccgtgtagacgctttgaagcaggctattgagaaagccaagaactttggctttgacctgaacggtgccgtaatggcaagtgatgctttcttccccttccctgactgcgtggagattgcaggtaatgaaggcattacggccgttatccaaccgggcggaagcattaaggacgagctctctttcaattattgcaatgaacatggcatcgcaatggtgataacagggttccgtcactttaaacactgattaaattgagaattgagaattgaaaattgaggaatgatgctttctcctgctttttagttctcagttcctgatatgagtgatattttttaatttttaattctcaatttttaatttacatgggattattctcttttacacaagaaatagcgatggaccttggcactgccaatactatcattaccacaaatggcaagatagtagtggacgagccttcggtggtggcgttggaccgtcgtacagacaagatgattgccgtgggtgaaaaagcaaagctgatgcacgaaaagacccatgagaacatacgtactatccgccctcttcgcgacggtgtgattgccgacttctatgcctgcgagcagatgatacgcggacttatcaagatggtgaacaatcgaaaccgtctgttttccccttcgctccgtatggtaataggcgttccttcgggcagtacggaagtagagttgcgtgccgtgcgcgactctgccgagcatgctggcggacgtgacgtttacctgatattcgagccgatggctgccgctatcggtatcggcatcgatgtggaagcgccggagggtaatatgattgttgatataggcggcggttctacggaaattgccgttatttcgctgggtggtatcgtttccaacaactccatccgtattgccggtgatgacctcactgccgatattcaggagtatatgagccgccagcacaatgtgaaggtcagcgagcgtatggcagaacgtatcaagattaacgtaggtgcagccctgaccgaactgggcgaggatgctcccgaagattatatcgttcatggtccgaaccgtattacggcgcttcctatggaggttcccgtatgctatcaggaagtggcacactgtctggagaagtccatttctaagattgagactgctattctaagtgcattggagaatacgccgcccgaattgtatgccgatatcgtgcacaacggtatctatctggcaggtggcggtgctttgcttcgcggactggataagcgtctgaccgataaaatcaacataccgttccacattgcggaagatcctttgcatgccgttgccaaaggtacaggcgttgcactgaagaatgtcgaccgcttctcattcctgatgagataggtatgcggaatctactgaactttcttattaaatacaattactggttcctctttcttctgttagaggttaccagttttgttttattgttccgtttcaaccattatcagcagagcgtgtattttacttcggcaaacggagtagccgggaaagtttatgagatttcgggcggcatcagttcttacttccatttgaaatcggtcaatgaggacttgctcgaccggaatatgtggctggaacaacgggtagcttttctggaaaaaagcctgcaggagcagggcctggattccgtaaaactatatagtatggcgcgccttgctccggatgattaccgcatattcaaggcaaatgttataaagaacagtctgaataaggcagataattatataacattggaccgtggctcgtcagatggtattcgtccggaaatgggggtagtggatgcaaatggagtggtaggtatcgtatataagacttctccccgctattcgctggttattccgttgctgaacagcaagtcgagtatcagctgcaagattgtgggcagtgagtacttcggctatttgaagtgggaaggtggagattcgcgttttgcttatctgaaggacttgccccgtcatgcggaatttaatctgggtgatacggtggtgaccagcggctattccacagtatttcctgaaggagttatggtaggaacggtcgatgatatgtccgattcccatgacggactttcatatctgttgaagataaagttagctacggatttcggtaaggtgagcaatgtgcgtgtcatttcgcgcagcggacaggaggaacagaatatgctggaaaaagaaggagagaaatgataatcaattatttgcataagatagggtggtttgtcggtctggtattattgcaggtgctgatactgaacaatgtgcatattgtaggatatgccactccgtttttatatatatatctgatattgaagtttgagtcggatgtaccccgtaatgcattgatgctatgggctttttttcttgggctggcggttgatatcctttccgatactccgggaatgaatgcggcggctacggtgcttttagcctttttgcgccctacattcttacgcttgttcgtgcctcgcgatacgctggatacattggttccggcaatccgtacaatgggaatctctccttttttgaaatacttggttgccagtgtcttggtacatcacgggatgctgcttactcttgaattcttttcttttgtccacataggtgcgttattgctgagaattgtaacaagcactttgctgactgtagcttgtataatggcagtagagggcatacggaagaagtaaaaagaggttgcaagttatgttacttgtatttataactcatatgttgtgattgaatgaaggattatacgctggagaaacgaaaatatgtgataggcatggcggctgtcgtcattgtccttatctacgtgattcgcctgttcgacttgcaaatcatgacggatgattacaagaagaatgcggacagcaatgcctttttgaataagattcaatatccttcgcgtggagctatctatgaccgtaacggtaaactgctggtctttaaccagccggcatacgatatcacgtttgtgcctcgtgaagtgacgcagctcgatacgttggatttatgccgtgcgttgaacatcacgttcgagcagttccagaagcggatgaaggatgtaaagaaccgttggatgaatcccggttattccaaatatacgcatcaggtgtttatgacgcaactctcggcagaagagtgcggtgtgtttcaggagaaactattcaagtttcccggtttctacatccagcggcgtactatccggcaatatacttacgatgctgccggacatgcgttgggggatataggtgaagtgtcaaagaaagatattgaggcggataattattatatccgcggagattacataggcaagcaaggtattgagaaatcttatgaaaagtatcttcgtggcgaaaaaggggtggagattctgcttcgtgatgcgcatggacgtattcaggggcattatatggatgggaagctcgaccgtccctctgtgcccggtaagaacctgactttaggtatcgatattgagttgcagaggttaggtgagcgtttgttgcagcataaaatcggagctatcgtagccattgaaccggctacgggagagatactctgtatggtttcttctcctactttcgatcctcacttgatgattggacgccagcgtggaaagaatcaccggatgttgcaaagagacaagcggaaacctctcctgaaccgcgcaatcatgggtgcgtatccgccgggctctactttcaagactgcgcaggcattgacatttttgcaggaaggaataatccatgaagattatcctactttcccttgtgcacacggtttcaattatggaagtttgcatgtaggctgtcatgggcacggttctcctttgcctttggttccggcaatagccacttcgtgcaactcttatttttgttgggggctgttccgtatgttcagcgacaagaagtacggttctccgcaaaatgccattaccgtatggaaagaccatatggtgtcgcagggattcggctatcgccttggtaccgaccttcccggagagcagcgcggcttgattcctaacgccaagttttatgataaagcatatcggggctcttggaacggacttacggtaatcagtatcgctatcggacagggagaaattcttgcgaccccgttgcagatagccaatttgggtgcaaccattgccaaccgggggcatttcattactccgcatgttgtaaaggagatacaggataatgaattggacagtatctaccgtaccccccgtgtcacgtcaatcgaccgggaatattacgatgaagttgtggaggggatgcgtgccgctgttacaggtagtacgggtagtgcaacctgccgtatggtcggcacaatcctgccgggtgtagaggcatgcggcaaaaccggtacggcacaaaatcgcggtaaagaccattcggtgttcatgggattcgctccgatgaatgatcctaagattgctattgcggtgtatgtggaaaatggcggttttggtgcaacctacggcgtccctatcggtgcgatgatgatggatcagtacttgcatggcaagttatcgccggagaatgagatacgtgcggaggaattcagcaaccgcgtaattctgtacggagacgaagaaaggtaataaacagtcaaacagtagcagtataaatggtaagaagagacagtatatggaaatcattggattgggtgacgattataatctacctgatgttgattgtattcggctggttcagtatttgcggggcaagttacgactatggtgaccgtgattttcttgatttctctacccgtgccggcaagcagttcatgtggattgtctgctcattcgggttgggatttattctgctgatgctggaagacacgctttatgatatgttctcttacattatatatataggactcattctcttgttggttgtcaccatttttattgctcctgataccaaaggctcacggtcttggctgattttggggcctgtcagtctacaaccggctgaatttgccaagtttgccacggcattggcgttggccaagtatatgagcgcctattcgttcactataaaaagctggaagagcgcgttgatgctggctttccttattcttctgccgatgacgctgattattcttcagcgggaaacggggtctgcattggtttatatggcttttttcctgatgctttatcgtgaaggtatgcccggagtagtgcttttctccggtatttgcgctgtggtatattttgtggtgggtatccgttttgatcaagtctttattgcagatactccaacacctatcggagagtttgtggtactgtcgatgattttgctctttgccggtggaatggtatgggtatataagaagaaatgggagccggttcggaatatcatcgtcggttcttttatcgtattgcttgtcgcttatctggtttcggaatatataaccccttttaatctggtatgggtgcaatggggattgtgtgtggttgtaacatgttatttattcttccttgctttgagtgaacgccattggagttattttcttattggtttgtttgccataggttcgataggttttctctactccagcgactattttttcaataaagtattggaacctcaccagcagattcgcattaaggttctgttgggcatggaagaggacttggcaggagcgggatataacgtaaatcaatcgaagattgctatcggttcgggcggcttgactgggaaaggctttttgaacggtacacagaccaaacttaaatatgttcccgaacaggacacggatttcatattctgtaccgtaggcgaagaagaaggctttatcggttcgacggctgtattactcttgttcctggctttgatacttcgtctgatagcgttggcagagcggcagcagtccgcatttggcagggtatacgggtattcggtgctgagtatttttctgtttcatcttttcataaacatcgggatggtactcggattgacgcctgttatcggtattccgttgcctttcttcagctatggggggtcttcgttatggggctttacgatactgctgtttatattcctgcgtattgatgcggggagaaatagaaggttggtataatattatcgttgtaatttgattcccacatcattgatgccgggcaggaggctgtcgggtaatgtataagctactttgaaaaggtagtcaccgggtttccctatcttgatgtttcctgcgggaaatgcagactgatataaaccgccccagccatctcctttccatatgccttctttatcggctaagacggctgtcagtgtatctgtctgtagctttttcaattccggactgtcatagcagacggataagttgatgttttggtaagggtaagtgctgcggtttctaatttctactatcagtttgtagtaagtttgcgaatcgggtacagcgacattaaaaaggagtgtgtcctgtcgtttccaaccctcttgcggaatggattggaatgcatgatatacagtctgtttatcgcaagcgcctaatgcgcttacgataaacagcagtatgatatatctcagagtctttgtcttattcttgagcaggcttgtcattttgagcaggtttatctccctgaggtttgggcttgttgttgtgaggacgtttacggttgttgctattccgttgtgaacgtctttcatttccttgcggccgtttttcgtctccctgctgtctgggctgctcttgttgttgcggagcggcagactgttctccgccttgcggtcggttattgggagtctttttcttctttttattccggttgccgccgttatttccattaccgtttccattgttgccgtctccgccgttcttgttcttgcggttacggtcgaagcgggtcaggctttcctgttccagcaggtctaccggtttcttgggttcggtgcgatgtgtctcttccaacaggctctccggtttgatgccccttttattcagaccgataacttcaaaggcgcgtcttccgctgatagtaaccagattggcagggatactcttgtcggtggagtaagttatctggttgctgagaatgtcggctttgaagaaatagaatacgccgtctttggtttccaattcgatttctttggaaggcaggcgtttttgtgcttctacgtaacagtccacttcgtagttgaggcagcatttcagtttggcgcattgtccggcaagcttttgcggattcagtgaaatatcctggtagcgggcggcgctggtcgaaacggaaacaaacgatgtcatccaggtagcgcaacacaactcacggccgcaaggtccgataccgccgatacggccggcttcctgacgtgcaccgatctgcttcatttcgatgcgtacatggaaagcgtcggcaagcaccttaatcagttggcggaagtctacgcgttcatcggcaatgtagtagaagattgctttgttgccgtctccctgatattccacatccccgattttcatattgaggttgaggtcaagagcgatctggcgggcacgtatcatcgtgctgtgttcacgcgctttcgcctcgttatacttgtccatatccaccggtttggctttgcggtagatgcgcttgatatccgcttccgacttgatatttgccttacgcatctgtagcggtacaagccgcccggtaagggttactacgcctatatcatgtccgggagtagcttccacggctactatatcgcctttttccaaaggaattttgttgctgttgcggaaataacccttgcgggtatttttgaactgaacttccaccatgtccgattcctctgcattgccgggaatgtcggcaagccagtcgtaagtgttcagttgcttgtcttgcctgccgcagcttttgcagcagagaccgccgcttccgttatgtagtttaaattccatcattctatctgttattttgatgatttactatgttatatgttagttgaaaaggattcttctattgttttaacagaacaatcattttcagtgaaaaatcaaagaataccatacgggcattcacattctgttcaatgtgcacttgcgcttcgctgagttcatccataatacccataacattccgttcgttgacaaacggggcaaaccgggtagcgaagttctgttcgggcagggtcatgtagttcatctctttccgatgcaggttatagatgaaattttcccgtatcatgcgctggcagtattccagaaaattcttttggcgttcgcgccccatagccgcgagttgttcgctccattgcttcatttcccgtattttccgttgataggagaggcgcatcaggctgacgaacagattgaaaaacaactcattctcttcattcaggtggattgtttccaacgccttgatgaagtttccgtttgccagatgggctatggtctggctgtccgccggttgcacgccgtacttttgttgcagcgcgtttgccatgcttgcctcatctattttgcggatgttgaaacgttgtgtacggctgagtatggtagacaatatcatttcgggtgcttcggaaaccaacaggaagatggtcttctcaggcggctcttccagcagtttcagcaatttattggcgcagacctcgtgcagcttttcaggcagccatacaatggttaccttgtatccgccttcgctggatttcaaactgagcttacgggtgatttcatcgctttcctttgcgtagataatcgcttgtccgttttccgctcccatttcattcagccaatgattcagtgagaaataggggttgcttagtacaagatgccgccagtcggctatgtagtcatcgcaaacttctttcttccccttggcgcttttcacgatggggaatacgaagtgtacgtccggatgcaccagtttattccatttcacacacgaaggacacgtgccgcaggcatcggtctccgtgcggttcgggcagcagatgtaacgggcataagccatagccagcggaagtttgcctactcctgccggtccgcagaacagttgcgcgtgaggaatacgtccttcccgcacctcttgtatcaattgttgtttggctgtatcctggcctattacatctttaaaaaacacggtgtcggtatttggttaataaatctgtttggctacttccttgatgctgtccactgcacctatggaatagaaatggatgctgggaatatggtgcttcatcagttccttgcattgctgcacgcaccattcgatacctacctgttgcgcttctgcatcattcttgcatttcaagatttcgtttgtcagctcttcgggcaggtctactttaaacgttttgggtatcatgctgagttgcgaaagcttcttgaacggcttgatgcccggtataatggggatggtaactccggctttgcgggcgcgttctacgaaatcgaagtatttccggttgtcatagaacaattgggtaacggcatattccgctccggcttccattttctttttcagccaataaatgtccgtatcgatgttgggcgcttcttcgtgtttctccggataacaggccactccgtatgagaaaggagtattggtgactttcatctcggagccgtctacaaagatgcccttattgaattggttaatctgttcctgcaattcaacggcatgatgataaccgttcttttcgggggtgaataccgactcgtgttttgccttgtctccgcgtaacaccaaaaggtctgtgatgttcaggaattgcaggtcgagcaatacatattcggtatcctcacggctgaaaccgctgcaaagaatatgcggcaccaccgttatgttgtatttattctggatggctgcggctacggatacggttcccggacggcgacggagacggttgcgctggaacagcccgttgccgaggtccttgtacacgtactcgctgcggtgtgtggtgatattgatgtatttagggtcgaactcccgtaatgtatctattgtttcatacaacttttcgatgcctgtacctttcagagggggcaatatttcaaaagaaaaagctgttttttcgttactgtttatcagatcgattactctcatttcttttccgttgtctttgtctaattggcaaaatcctgcacaatcctgcacattgggaacaaaaatacgaaaaagaaatgagaaatgcttttttggcaggctattcttttatgcaacggatggaaaacgcattataataatctttgccttccggtttgacggcgttctttaaggcgatgtcgttattgctgttcgcaaacattacgactttgtccaattgcttttgtgtgccgtcatatagccaataggcggtcgatgagtttgcgtttaccaaggccgtcttgttttccctttccaacagcagccctgcgggttgaatgcagaatccggtttcattggttgcggaataaacatccgagctccaggtatctgcctttttcagtgcggaagcattctctcctatgtattctttcagtctgttccaatcgttttctgttggcaatctccaatccaacggagccaatttcccggtaaggacggcctcgccgttgtaaaaatgggagttggtgcccgcccatttgaggtagccctcgccatctcccaaagcttttctgagaggcatactcttgctgtcattataatgcgccgtctgtaaatcctctttcatccaatattgtgcgcctattttcacgatggggtaggtgtgcaatataccgttccgtatatctctgattacgtagctgctgacgttgatagccagtgctggtgcggcaggcttttccgttactatctttctgttttcgtctatgtagaatttttcgataggccgggagtggccgctaatgtaggtcagcgagttgtccgcttcattccaacttactttaccaccatgtgtcgtggcggttttgtccggtagttgtaaaacgattccatttgtcaagtccgtctgttcattgtcctgtacggaataggctacaatcgctttagtagcaacagcatcggcgggggcagtgtaaagatactcccggcatacttctgccacgggctttccttgatggtatatcctgtagatatcagacgtgctgaatgacagcgaggctgtgtgtacggcagtgatttcgtaccggttttcgctctctccttgttcgctgagctcccattccttgatgttggcgataactccggtgagggttgcacttgtgctttgcagtgcgttgatgcaaatctccagttccgtgtcctcctcaatggtggccgacgggagagggcaggtatagatttttccgttccattccagggtaaaagcctgtccgccgtcggagtgtgtttgcggaattacaatgaactccttaccggacagcgtattaccctctttcttccatgtgccgaaaggaatgatatccgtttcgctcgcatcgtcaaccgaggaaagcttgtccgattgcaggtcatatacggcttgtgtcctgaaaccggtagctatgattctggggttggccttgagcatctcgtccgtatcttcaccttcttggggtataagaactaactttattttggcaaaccggtgcttgtattccagctttacggttttctcgctgttgggtacgttcccgatgcgggcggtcatgaagttggataagctgtaattggcggtcttgttctggtctgcttgtactgtgacgtccagcagtgagcttcctttggacacgttttcttcctgatacggatagtagctgatgaagtccagcgtggcatctccttccggataatacacttctttcttggatatcagtttgctgttgtcgctgcattccagaagcaggttgtcgatgtatcgctgctggtccagggaattgcctgtcagcatggcaaagataccgcttctgtctcctatgtcgaaagtgtttttagttactttggtagcggctttacttgcttcaaaggaaaaggagatgaggatactgccctctttgatttcatcatttagcctgttgatacaagatgtacccgataaggcaaggagcaggcataacacataatttgcccttttgaaagcgtttctcatgatattcatgttatagtagttttataagacgaaaacatcttcgcctttggttcgtacttaaaaacttacgtgtcgatatatcagattgggcagaaccgtaaatgttatgagaaagtagtttacgctttcagatttctattagtcagttatcacgcttgatagcttggtgctttttcttctctttacatatatctaactaaaaacaaggatgtaaaagtatactaaatctttggaa

SEQ ID NO: 4076 - DNA, 26131 bp, Unknown
  gut microbiota DNA sequence
acagaaactgcaggaagaattgaaggacttcatttagagtctgtccggtttctgcccggcattctttcgggagttcttggggctgtttctctaaggagcatagcggattgtgtgacggataaaaagaggaaaacagcggtgaggtgaaagaaaatgtgtgaagagaaagagtccgcaaaagacagggtgcgatacgggcagtctaaagtagaactttagaatcgccaagtagtactttagacttctaaagtgccactttggatgtctcaagtcaaacgttgcgtcccttgttcctcaatttcttatttcccaatttaccaaatgatataaaacatatctttcaagtgaatatttatgggattattttgactatatgtcagaataatcctttatatttgtatatatcaagttaaccgagtgaacaaatagctaattacctattacaatgaaaaaagaaatcaaattcagtcttgtttaccgagatatgtggcagtcgtccggtaaataccagccgcgagtggaccagttggtacgcatcgcaccgttgataatcgaaatggggtgttttgcccgggtcgagaccaacggcggagctttcgagcaagtgaaccttctctatggcgagaaccccaacaaggcagtacgcgcctttaccaaaccctttaatgatgcaggcatacagacccacatgctcgaccgcggactgaatgcgctgcgtatgtaccccgttcccgccgatgtacgccgcctgatgtataaggtaaagcatgcacaaggtgtggacatcacccgtattttctgcggactgaacgaaacgcgcaacatcatcccttctatccgctatgcgctcgaggcaggcatgataccgcaggcaacgctctgcatcactcattcgcccgtgcatacggtagagtactatgcacacattgccgaccagctcattgaggcgggagcacccgaaatctgtttgaaggatatggcaggcatcggccgtccgggtatgctgggcgagctgacaaaggctatcaaggagaagcatcccgatgtattgatacagtatcacggacatagcggtccgggactttcaatggcatccatccttgaagtatgcgagaacggcgccgatataatagatgtggctatggagcccatgtcatggggaaaggtgcatccggacgttatttccgtacaggccatgctgcgcgataaaggcttccaggtgcccgacatcaacatgaaagcctatatgaaagcacgtgccatgacgcaggaattcatagacgacttcctcggttactttatggaccccaccaacaagcatatgtcgtccctgctcctgaagtgcggacttccgggcggtatgatgggttccatgatggcagacctgaaaggcgtgcactccggtatcaacatgatactgaaaagcaagaaccagcccgaactcagcatagacgacctgctggtaatgctttttgatgaagtggaatatgtatggcccaagctgggttatccgcctttggtgactccgttcagccagtacgtcaagaacgtggcgctgatgaacgtgatgcaactggtgaaaggcgaggaacgctggacgatgattgacaaccatacgtgggatatgattctgggcaagagcggacgcctgccgggtaagctggctcccgaaatcgtggagcttgccaaatccaaaggttacgaatttgttgacacagacccgcagtccaactatccggatgctttggacgaataccgcaaggagatggacgaaaacggatgggagtatggcgaggacgatgaggagctcttcgagctggctatgcacgaccggcagtaccgtgactataagtcgggcgttgccaagaagcgtttccgcgacgagctggagcgcgtaaaggacgcttccatggcaaagagcggatattcggaagaggagataaagaagctgaaacgcgccaaagccgatcctatcatagccccgtccaaagggcaggtgctttgggaggtttccgtggaaggtccgtcctcagcgccgtttatcgggcgtaagtatcagcacgatgaggtgttctgctatgtctctacaccgtggggcgagtacgaaaaggtaatgaccggttttacgggccgtgttgtggaggtatgtgcccagcaaggcgccaacgtcaataagggagacgtcatagcgtatatccagcggagcgatatctttgcataatgattggtaaaggtgtgtcaaggcctatccggggcttgacacacctgtttgtttcaggtatttatttatcagttctttcaatatctcctgcgtatagggctttatcaggaaatcattgcatcctgcatcgagagccgcttgtctgtcatgttcgtaggcataggcggtaagagctatgatgggtatcccgggcgaaagctcgcggatgatttttgttgcgtccagtccgttgaggttgggcattttcatatccatcagaattaaatccggatgcagctcctcgaacatggttacggcttccatgccgtccttggcgcgttccaggtggtacgactttcctaatattgctttggcaaggatgtagttgctgtccgtatcttcggctatcaggatagtgggctgccgggtgtccagggatgctccggttgtttgtgtcgcttggtgttcgtgcgtttcttcattaaggtcgtaagtattgttgcctgtttctgcattgccgggagtgttgaagctggtttcggatacagagttctgttcctccgctgtttcccttttgtcttttgccagaggcagggtaaaggtaaaagtcgttcctttccccacttccgaacagacggagatggttccgcccaatcgttcgataatggttttgcagatagacagtcccaatcccgtaccttgcgcaaaggtattcacctttacaaagcgttcaaagacctttgccagtttgtcagtttggatgccgatgccggtgtcgctgacgtaaaattctatttcgtttcctttgcggcggtatccgtagccgacgctgcctcttgtggtgaatttgaaggcgtttccgatgaggttcgatattacctggaagatgcggttcttgtcgccttcaacggtaatctcctcgtccgaggcttcgtaaacaagctccacaccttcgggacagcggaatttcagtgcgtcgtgtatttccttgcagagcgggtgcaggcgcaccggggtaatggtgaattctacgatgcctgcttcaatcttggagaggtccaggatttcgtttatcagttgcagaagtctttcgttgttggcttccacgatgtcgtagtagttttgccgctcttcggcatcggtgctctcggcaatgattctggaaaagcctacgatggcgttgagcggggtacgtatctcgtggctcatattggcaaggaaagccgatttcaactggtcggaagtctccgctttctctttggccacgagcagttcccgtttcatccgttccatttcggtgatgtcccattcgatactcaataggatgggtgggaagtcgttgctttcaatacgcatcttccgtttgtccagaaagatggatttaccgttctggtcgtgctcttcggtaatccagtgcttctcgattccggtccgggctatttcaacatcctgctttctcttctcttgtgccagctcgggaggatagaagtcgaaatcgtctttgcccaatgcctctttaagggggatgttgcggttgtacgattctcggttgcggtacaggtatttaaagccgctttggatgtccttgacaacgataccggcaggcaggttttcaatggttttgtccagaatctggctgaaccgtttgatttgctgctcgttcctgatgcgttgggtgatgtcccggctgaatccccataggatggcctcgcctttgtcgcttgtcacccaataggcacttccttccattgccagcacttcggggtgttcgggcaggggatggtaaaggatgaagccgttacgtttttctccctttctgagtgatttgattaatctttgccaggaattctcgtcttgtgcatttgcgtttatccggtagatgttcagtgtgctgacgtcgtccgttatgctgatgttgtgatgctcccggaaacggcggttggcaaagacgagcgtaccgtcttcacgggcggcaaatatgtcttcggtggagttattgatggcgtgtgtcagcagggtgatgtcattgcgccgttgctggatgtcggtgatgttctgtatgtagccttccagaatgccggttccgtcggggagtgtttcgtgcgagaaggttttcaggcggatatagaatatccgtttcttgaaaaggatgcggtagtctatgctgttttctgtatttccctgaaggttctgtgccagccacttgccgaatatttccctatcctcgggcaggatgtacatagtatagtcctggagcggaatttcctgttcctctgcagtgcacattacaccggagtgaccggtgtagtagaagcattgcctgccggagttgtatttccatcttccgatgagggcggctttctgtatttcattaagttcgtggtttttcttttccagttcccgtttgcgctggctacgttcggtgatgtcgcggtattggcagagcaccatatcttcgtaggggcgcatgatgcacttaaagaagtaggtctcgctgccgatagtcagttcgtagttccgggcggaaacttccttgtacgcaagtactttcttgaattcggggtaaacctgccggtaggtaacagacggtagcagttggagtatgttcctgcccagtaactgattttctttcaaaaaccacaagtctgcgttatgtactgcgatgtccacgcagatgccgtttctgtccaataaaatcatggtgtccgatgtcagctccagcagcttttcggcattctccgcgtttttcaggatgtttttcatagttctcttgttttatgccctccgtgctttttcccatgcgccgccggcctgcccccgccgtttgcgcaggtagttgaagccgcggacaacattaatgttcatgaaaagaaaataataaggaacaaagagtattttattcttgatacgttttgctgacaggtaatgcccccagcttgccatgaagtagaacagtgcttgcagcaaccaaatgacggcatagagcagaggggtgtttgacgtaaaaatgagaatcgtattgagggggaacagcaggaacaacagtacgggcgtaagcgaccatctcagtacgcggtgggatatgtattgaaaacaaaacacaccatagcgcagcggattgagcaatgcacgcagacgccagacggactgcaagccgccggcagcgatacgcactttgcgtttttcttcttcgtgcatgtctgccgaaccgttttctacggcataggcatcggcgcaataagcgatggtatatccgcgcatcacaatgtgcagggagaggatgaagtcgtccagcagtgtgtcggcaggcatctcctcgtacagttcgcgacggatggcaaacaactctccggctgcccctacggcagagtagaggcgggagtccagttgcttgagggcggactcgtatttccagtaaaggccttcgccgccggatgcagcgttggctttgtcctgtatggcgatgcgcttttctccggccacacagcccactttgggattggcgaatgcgcgtacaatctcgcgcaatgcttcacggttgaggtgtgtattggcatcggtgaataccacaagcggggtggtgacgaaccggatgccgcggttcagtgcggcggtctttccctctctttggggttgataaagcacggtggcttgcggccagtgcgagagacgttcgttggtgcggtcgttgctgccgtccgttatccagagtatgtgcagcttgtctgccggatagtccagggaaaggctgttgcgcatcttatcgtctacgacatcttcttcattataggcagtaatgaatagcgtcagttcgggaagcatgcagtctgccggcaggggcgggggaggtgtttgacgaaaacattcctttagtctgaccaggacataaaggagcattccatagcctatatatgtatagaatataacgagtaaacttatccaaaagacagtttcgcaaattttcatccgtatcagattcttatatttctatttcgggagcagggggattaatgcccaaaaatatggataatcttttggcggtgcaagaaaaaggaagaatttattagtgattggcaggtaaatggtagatgattgctgacgggcaggctgtcttattatgccgcatggcgctaacggctgcccgtcagttatttaaaatgcttccgtcatattgaaatagaacagcgtctggtcgtttacggtatttttgcctaagtccagacgcacgttcatacggggttggacttcgatgcgcagacctacaccgtagttgggcaatacgccttcaatcttgcccatggtgggacccatgaaaccgcatccggtccacgccacgaaaccgatgtgatgcagcaggcgttttatccagttgctgcggtcggtgtttatcatctggcggtattcggccatgacaacgtgcgaggatttgtcgcgatactgccccatgtagtagccgcgcaggtcgaaaggcgttccggtcagggagtattgggtgagggggacgttgccgaatacgttcttgctttgcgcggtccaggcgaataccttgcggtggcctacggacttgtactggcggtagtccagttccagacggtagaagttgttgtcactgccgaaagccttgctgtacatcatgccccggaaatccaggtatatacccttgtaggcgttggcgggaatgtcgcggctgtcgtaagtgaggaggaagccgagaccggcgttgaagttcttgtagccgttggccgtaccgccggctgccacgtagtcgggctcttcgatgagatgcttggcagggtcgcttatcttgtcgtagttgatgtctacctgcgggccggcaaagacgttgctttctcccaggcggaacaggaaccacgggttgatttgtatgccgctgtaacggtatttgctggtactgtcgcttcggacgtaatctttgttcgtgccgtaaccgatgccgtagaagttgtcttccgtattcttgtagacaaactttccgaagatgcggaagcggtcgcctttaaagaagagctgcggctttaccatcaggttgacgccgcctttgaacatataggctatggacatgggcagcaccgaacgcaactgtgtggtgtcgcttggattcatacggaaagtcatcagcgcgcttccgcctatcagtgcgccgaaatcgggcgtatagctggggccgcccaatatgttataatggaaatttctgcgggctaccctttgtttgcgcaattcctttttggtcagtgcgggagtggtgtcgttggtagctgtaacggtctgctcttgtgctgaaacagtcgtcagtatcagtatcagagtaaatatactcagtatgtattttctcatatcgtacgaatatggctgcaaagaaaactattttatttgaattggttttgaatagaatagataataaatctaaagagggcactaaaattatcaaaaaagacattacatttgctttgtcaaggcttttagatggggaatgcaaagttcatagacataagagaatactctgtatgctttgtctgctttgtggtgaaagtatctgtttatcatcttatttaatatcgaacatacataacaaataatgaaatgaacaaacgtattttatctgtaattgttttcggcgccgcactgctttcggtgcaggcgcaggacggcaagggcgggataagccctgccatgctcggccagattcaacagagttatcaaggtacgccttccgacaaggcgttgcgcaatgccatcggcaacaacgacatccgcaagctggcgctcaaccaggagaatatgcaggatatggatacccatttttctatcaaggtggattccaaaggcatcaccgaccagaagtcttccggccgttgctggctgttcaccgggctaaatgtaatgcgtgccaaggtccttgcacgttatggtttcccggctttcgaattctcggagatatatcctttcttctgggaccagttggagaaatccaacctcttcctgcaaggcatcatcgacactgccgacaaaccgttggacgacaagacggtggaatggctgctgaaacatccgttgagcgacggcggcacattcaccggagtggcggacatcgtttccaaatacggccttgtgcccaaatctgccatgccggagacgaacagcagcgagaataccgcccgtatggctaatctcatctctttgaaactgaaagagtacgcccttcagctccgcaaccttgctgccgaaggcgccaagcctgccgctctggagaaagagaaaaccgccatgttgggcactgtctatcgcatgctggtgctgaacctgggtgttccgcctacggaattcgactatgtgcgtaccgatgcccaaggcaatccggtggagacggagcatcataccccgatgtctttccttgagaaatacggtgacaaacaactgctcaccaactacgtgatgctgatgaacgaccccagccgcgagtattacaaatgctatgagattgactacgaccgccaccgctacgacggtaagaactggacgtacgtaaacctgcccgtagaggatatcaagcaaatggctatcgcttcattgaaagacagtaccatgatgtatttctcctgcgacgtgggcaaattcctgaattcggaacgcggcttgctcgatgtgaaaaactatgactatgaatcgctcatgggcactaccttcggaatggacaagaaacaacgcatccaaaccttctccagcggctcttcccacgccatgacactgatggcggtagacctggacaaagacggaaaacccgtcaaatggatggtcgaaaacagctggggcgctgacagcggctacaaaggccacctcatcatgacagacgaatggttcgacgaatacatgttccgcctggtagtggaaaccaaatacgttcctgctaagataatggaactcttcaaacaaaagcccgtccgcctgccggcatgggacccgatgtttgcaaacgattagcggttagtggttagcgattagtggttagtgattagtgattagtgattagtaggctgcgctataactctgcaggatatccattcccaaccgttcatcgctaatcgctaatcactaaccgctaatccctaccctcgtgttcgttaacgaaaggaattacggaaatttctccgtaattcctttcttttttgctctttattcacattcttttttgctacttttgcgggcaaattaatgaaaccattattttatataaacgcatggcaaatgtaattaagttacgcaaaggccttgacatcaacctgaaaggcaaagctgccgaagagtttatgtctgtgaaagagccgggattctactcgttggttcccgatgattttacgggtatcactccgaaagtggtggtgaaggaacaggagtatgtgatggccgggggacccttgtttatcgacaagaatcatcctgaattgaaatttgtttcgcccgtaagcggcgtagtgacgagcgtggaacgcggtgcacgtcgtaaggtgctgaacatcgtggtagaggctgccactgagcaggactacgaggagttcggcaagatggacccgtccaagatgagcgcacaggaagtaaaggacgcattgctgcaagccggtatgttcgcctttatccgccaacgtccgtacgacgtaatcgccgacccgacggtgacgccgaaagcaatctttatctccgctttcgacagcaacccgctggctcccgacttcgagttcgtcctgaagggcgaggaagcaaacttccagacaggacttgatgctttgtcccgcatggcaaaaacctatctgagtatcagtgtaaaacaaaaagcagccgcactcgtgcaggcaaagaacgttacccttaccgcattcgacgggcctaatccggcaggtaacgtaggtgtacaaatcaatcacatctctcccatagtgaaaggcgagacggtatggaccatcggcgcggaagccgtaatctttatcggccgtttgatgaacaccggtcgcgtagacctcacccgcaccgtagccgtaacaggcagtgaagtgctgaaacccgcatactgcaagttgcgtgtaggcgcattgctcaccaatgttttcaaaggcaatgtaaccaccgacaaagacctgcgctacatcagcggtaatgtgctgacgggtaagaaagttgcccctaacggtttcctcggcgctttcgacagccagctctccgtaattcccgaaggagatgaaatccacgaaatgctgggttggattatgccgcgtttcaatcagttcagtgtcaaccgctcttatttcagttggctgatgggtaagaaagaatatgtaatcgacgcccgtatcaagggtggcgaacgccatatgattatgtccaacgaatacgaccgcgtgttccccatggacatctaccccgaatatctgctgaaggccatcatcgcgggagacatcgaccgcatggaagctctgggcatctacgaagtagctcccgaagactttgcgctctgcgaattcgtatgctcttccaaagtggaagtccagcgtattgttcgtgccggtctcgacatgctccgtgccgaaatggcttaggaaattaagaattaagaattaaaaattaaaaaatgacggttgaaacattgcgatataacctgccaagtgtatacggcgcagcctatttctcaattttcaattctcaattatcaatttaataaatgaaagcgttaagaaattatctcgacaagataaagccgaactttgaagagggcggcaaattccacgcatttcgttcggtgttcgacggcttcgagacattcctgttcgtgcccaacaccactgcgaaatcgggaacgcatattcacgactctatcgacagcaaacgcatcatgtcgatggtggttattgcgttgatgccggcgctgctgttcggtatgtataacgtaggttaccagcatttccacgccaccggtgctgccggcggtttctgggaaatgttcgcttacggtttcctggctgtattgcctaaaatcattgtatcttatgtagtgggtctgggcattgagtttgttgtggcccagtggaagaaggaagaaattcaggaaggtttcctggtttcgggtatcttgattccgatgattgtgccggtagactgtccgttgtggattctggcggtggccactgcattctctgtaatctttgccaaggaagtattcggcggtacgggtatgaacgtgttcaacgttgccctgattacgcgtgccttcctgttcttcgcctatcctacaaagatgtccggtgatgccgtttgggtatcgggcgacagcatcttcggtttgggacagacggtagacgggctcaccgttgccaccccgctgggagcagccgctactgcgggcgcttatccggagttctcgtgggacatggtgaccggtcttattccgggctccatcggtgaaaccagcgtcattgccatcgccctcggcgccatcctgctgctgtggacgggcatcgcaagctggaaaacgatgttctccgtgttcgtgggcggtgcattcatgggctgggtgttcaacaccatcggtccggacactgcaatggccaacatgccgtggtacgaacatctcgtgctgggcggtttctgcttcggcgccgtattcatggctaccgaccccgtaacttctgcccgtacggaaacaggtaagtacatcttcggattccttatcggcgcaatggctatcatcatccgcgtgctgaaccccggttatcccgaaggcatgatgcttgccatcctgctgatgaatatcttcgctccgctgattgactactgtgtggtacagggcaacatcagccgccgcgagaaacgtgcaaccgctaagtctaacaattaaaataccggaaaaagaaatgaataccaatagtaacagttatactatcatttatgcttcggtaatggttgttatcgttgcattcctgctggcattcgtaagttcttctctgcgtgccactcagaacaagaacgtggagctggatacgaagaagcaaattcttgccgccctcaacatcaagaatgtagaggatgccgatgcagaatataataagtacatcaagggcgatatgctgatgaacgaggacggtacgctgaccgagaacaccggcgcatttgccaccgcttacgagaaagaagccaaggaaaaccaccgtctgcacgtgtttgtggccgaagtggacggagagacgaaatatgtattccccgtttacggtgcaggtctttggggtgctatctgggggtatgtggccctgaacagcgacaaggataccgtttacggcgtttacttctctcatgccagcgaaaccccgggtctgggtgcggaaatcgcaacccctcagttccagggagaatttccgggcaagaagacactggagaacggtgaaattgccctcggcgttgtgaagaacggaaaagtagagaaaccggactatcaggtagacggcatctcaggcggtactatcacctctgtgggtgtggatgccatgctgaaaacctgtctgaacagctacaagaactttttaaccaataataatgaggagaaataagaatatgggagcattgttttcaaaaaagaataaagaagtattctctactccgcttggactgaacaaccccgttaccgtacaggtgctgggtatctgttctgccttggccgttaccgccaagctggaaccggctatcgtgatggggctttccgtaacggtgattacggcattctccaatgtagtgatttcattgttgcgcaagaccatccccaaccgtatccgtatcatcgtccagttggtggtagttgccgcattggtaacgattgtaagtgagattctgaaagcttttgcttacgatgtaagcgtgcagctttccgtatatgtaggtctgattatcacaaactgtatccttatgggacgtctggaagcatttgccatgcagaacggtccgtgggagtctttcctcgacggtgtgggcaacggtttgggatatgccaagattctggttatcgtggctttcttccgcgagttgctgggttcgggtacgttgctcggtttcaacatcctgaactacgagcctttgcagaaaatcggttatgtaaacaacggcttgatgctgatgccgcccatggcactgattctctgtgcctgcattatctggtatcaacgcgcacgccataaagaattgcaggaaaagtaatataaatgaagaatgaggaatgaggaatgaagattgtgccgtcactgtatggagattcttgattcttaattcttagttcttaattaaaagaattatggaacatttattaagtttattcgtccgctccatttttgtggacaatatgatatttgcattcttcctcggtatgtgctcttatctggccgtatcaaagaatgtaaagactgccgtaggactgggtatcgccgtaactttcgtgttggtggtgacgctgccggtcaactacttgttgcaaacgaaagtgctgggtcccgatgccatcattgaaggcgtcgacctcagcttcctgagttttattcttttcattgccgtgattgccgctatcgtgcagttggtggagatgattgtggaacgtttcagcccttcgctctacgcttcactgggtatcttcctgccgctgattgccgtgaactgtgccattatgggtgcgtcactcttcatgcagcagcgcatcaacgtgggcgagagcgatcctaaatttatcggtggcgttgccgatgccgtttcctatgcactgggttcgggtatcggctggttgctggccatcgtgggtctggctgccatccgcgagaagatggcttactctgatgtacctgctccgctgaaaggcctgggcattaccttcatcacagtaggtctgatggcaatggcattcatgtgtttctctggtttgaacatctaaaagaaaggaataagacaatggatatgaatttgatattagcaagcattggagtattcctcgtggttgttctgctgcttgtggttattctgttggtagccaagaatttcttggttccatccggtaatgtgaaattgactatcaacggcgaaaaggaactggaagtcgcttccggttcgacgctgctgaatacgctgtctgtcaacggcatcttcctttcctctgcttgcggtggcaagggctcttgcggacagtgcaaatgccaggttgtagagggcggcggcgagattctgccttccgaaatacctcacttcagccgtaagcaggttcaggaccactggcgtctgggctgccaggtgaaggtgaagggcgacatgggcatcaaaatcgacgagtccgtactcggcgtcaaagagtgggagtgcgaggttatctccaataagaacgtggctacgtttatcaaagagtttatcgtggcattgcccaagggcgagcacatggacttcatccccggttcttatgcgcagattaagattcctaaattctccatggattacgacaaggacatcgacaagtcccttatcggcgaggagtatctgcctgcatgggagaaattcggtctgctcggcctgaaatgccgtaacgatgaagaaaccatccgtgcctactccatggctaactatcctgcagagggcgaccgcatcatgctgacggtacgtatcgccactccgcctttcaagccgaaagaccagggcccgggcttcatggatgtgatgccgggtatcgcttcctcttacatcttcaccttgaaaccgggtgacaaggtaacgatgagcggcccttacggagatttccacccgattttcgactccaagaaggagatgatgtggattggcggtggtgctggtatggctccgttgcgtgcgcagattatgcacctcacgaagacgctgcacacaaccgaccgtgtgatgaactacttctacggcgcgcgtgccctcaacgaggtgttctacctggaagacttcctgcagatagaaaaggatttccccaacttcaagttccaccttgcactggaccgtcccgatccggcagccgatgcagcgggcgtgaagtacactccgggcttcgtacacaacgtaatctacgagacttacctgaaagaccacgaagcccccgaagacatcgaatactacatgtgcggtcccggcccgatgtccaaagccgttgagaagatgctcgacgacctcggcgttccggctcagaacctgatgttcgacaacttcggcggataaggaaacggtgttgtcaaagacacataatagtaaaatagtgaagaaactccggcagggctgcggctcttgccggagtttttttgtgggcataggatagaggcggttcgaaagaaatgagtatctttgctttatcgtaatctaaaaacagtggacggtatgagcaataaaatatatcctatcggaatacagaacttcgagaaaatccgcaaagacgggtatttctatattgataaaaccgcttgggtttatcagttggccaagaccggcagttactacttcctcagccgtccgcgccgcttcggcaaaagtcttctgatctccaccttagaggcctactttcgagggaaaaaggaattgttcaagggactggccatcgagaaactggagaaagactggacagaacatcccattttgcatctggacttgaacatcgaacggtatgatacgcccgaaagtctgggtaatatactggagaagaacctttccgaatgggaaaaactttatggcgccgatgtttccgaacgtacatactctttgcgctttgccggaatcatcaagcgtgcttgcgagcagacagggcagcgtgtggtaatccttgtggacgaatacgacaaaccgatgctccaggctatcggcaacggggaactgcaaaaggaatactgcaacacgctgaaacctttctacggtgtgcttaaaacgatggacggctgtatcaaactggctttccttaccggggtcactaaattcggcaagatcagcgtattcagtgacttgaataacctggatgatatttccatgcaggaaatgtatgtcggtctttgcggaataaccggacaggagattcacgataatcttgaagaagagcttcacgagttggcagacgctcagaaaatgacctacgaggaagcctgtgccgagttgaagcggagatatgacggctatcatttcgtagagaacaccgaaggtatctacaaccctttcagcttactgaatacttttaaatataagaaattcggcagttactggttcgagacgggaacacccacctacctgatagaactgttgaaacgctaccattacgacctggaacacatggcgcatgccgaaacgtatgccgatgtgctgaacagtatttatggggatgaggaaccgttgcccgtaattttccagagcggttatctcacgataaaggggtatgatgaacgttttggaatttatcgtctcggctttcccaatcgtgaggtggaagaaggttttgttagattcctcataccttactatacacgtttcaacaagattgaagcaccgtttgaaatacaaaagtttgtacaggaaatagagagaggagagcccgatgctttcttccgccgcctgcaaagtttctttgccgatactccctacgaattggtgaaagaactggagctgcactatcagaatgtgctcttcatcgttttcaaactggtgggtttctatgtaaaagcggagtatcacacttcgcagggcaggatagaccttgtactgcaaaccgacaagtacgtttatgtaatggaattcaaactgaacggcactgcggaagaggctttgcagcagattaacgacaagcagtacgcactgccttttgcagcagacagccgcgaggtattcaagataggggtgaatttcagtaatactacgcgcaatatcgagcgttgggtggtagaggaactttaagtcagccatattgctgccattgttttttctccgcctgtaccggctctttttctacacatgtgttttttctttagtacatactgattgtttttccagtgggtactctttgtttatccctgttaaactcaaagtttatcctcaataaacttgaagtttaaccgggataaatcgggagtttgaccgggataaattgtaatatacttcatgcagaacgaagtgatatataaaccatcacctcgttttccgccaatcttttcgtatctttgctccattaaaccaaagtactttatggaacaatctgacatacttcgtaacttacggatagagcaactcaccccgatgcaggaagcagcgcgggatgcctatcaatcggataaggacctcgtcctgttgtcgcccacggggtcgggcaagacactggcattcctgctgccgctggtgcaatcgctcaaagccgatgtgcagggcgtacaggcggtggtgctcgtaccgtcgcgcgagcttgccttgcagatagaaaacgtattcaagtcgatgaacgtccctttcaaggcgatgagctgctacggcggacgtccggcaatggacgagcaccgtacgatgaggggcattaaccctgccgttatcatcggcactcccggacgtatgaacgaccatttgcggaagcagaacttcgatacccgctttgtaaccacattggtgatagatgaattcgacaaatgccttgaattcggttttcacgacgagatggcggaaattatcggacagttgcctgccttgaagaaacgggtattgctgtcggcaacggatgcagaggaaatcccgcagttcaccggagtgggcgggggggagtcatcaccgcaggttgtcaagctgaattttctttcgggcgaaaccgtatccggacgattggacttgcagaaggtaatctctcccgaaaaagacaagctggagacattgtaccggctgctttgtacgctgggcgaccgttctacactggtattcgtgaactatcgcgagagcgtggagcgtacggtatcctatctgaagtcgaagaaattcccttgcgatgcttttcatggcggtatggaacaggacgaccgcgagcgggcgctctataagttccgcaacggcagttgtcccgtcctggtatcgaccgaccttgccgcacgcggattggatattccgagcatcgacaacgtggtgcactatcacatgcccgtcaacgaagaagcctttacgcaccgtaacggacgcacggcacgctgggaagcgcgcggctcttctttcctgcttctgcatgccgaagagcgtctgcccgattatctcccggaggagctctccgtattcgaattgccggagcagacgccgaaacctgccaaaccccgctggactaccttatatataggcaaaggcaagaaagacaaactgaacaaggtggacattgtgggcttcctgtataagaaaggcggactggtgggcgaagatgtaggacaggtggatgtgaaggagcactatgctttcgtggcagtccgccgcggcaaagtaaagcaattgcttacactgctgcgcggggaaaaaatcaaggggatgaagactttgatagaagaagctcgttgacagtatgttatgaagcatatccggtgatgttattaagcatgggaaaatagtttgtttttgataatcatgcacttttttttcagtttttattcccggtagaaagttttttcagcttctatctttcagtttactttttaatactttccttgttaagtatacataacagtttggcgtatatttcttgtatataccaataaaaagtaaggcaaatacgcgataaagaagaaaatttataaggaaagatttgcaatgcagaaataattccgtaatttcgccatgtcgaaagacataaacgaacgaaattgtataaccaaaacaaacttcaaatgaaaaagcataatttcaacgcaggaccttccattcttccgcgtgaggtgatagaggatacggcgaaggctattttagatttcaacggatccggtctgtctcttatggagattagccaccgcgccaaggacttccagcccgtagtggacgaagccgtagcactgttcaaagaactacttaacattcccgaaggctattcggtgctgttcctggggggtggtgcaagtctggaattctgcatgatacctttcaacttcctcgaaaagaaggccgcttacctcaatacgggtgtgtgggcaaagaaagccatgaaggaagccaagggatttggcgaggttgtagaggttgcctcttctgctgaagccacttatacttacattccgaaagattatacggtaccggccgatgcggactatttccatatcaccaccaacaatactatctatggcacggaattgaaggaagacctgaacgtaaacgttcctatgattgccgacatgtcgtccgatattttctcccgtcctattgatgtgtccaaatacatctgtatctatggcggtgcacagaagaatctggctcctgcgggcgtaacattcgtcatcgtgaagaatgatgcggtaggcaaggtatcccgttacatcccgaccatgctgaactatcagactcacatcgacggcggttcaatgttcaatactcctcccgttgttcctatctatgcggcattgcagacattgcgctggataaaggctcagggcggtgtgaaggaaatggaacgtcgcgccatcgaaaaggcggatatgctgtatgccgagatagaccgcaacaagatgttcgtgggtactgccgccaaagaagaccgttcacgcatgaacatctgcttcgtgatggctcccgaatacaaggaactggaagccgacttcctgaaattcgctaccgaaaagggtatggtaggtatcaagggacaccgttccgtaggcggtttccgtgcatcttgctacaatgccatgccgaaggaaagcgtacaggctttgatagactgcatgcaggaatttgagaaacttcattaataatatttgttcaccacagagggcacagagtcccacagagatgaaatgaaaaggaaaactctgtgaaacttcgtgcggttctgtggtgaatctttttttaataccattgaatcatgaaagtattagttgcaacagacaagccgtttgcaaaagttgcagtagacggtattcgcaaagaaattgaagcagcaggctatgaacttgccttgctggagaaatatggcgataaggcaaaattgctggaagccgtgaaagatgccaatgccattattatccgtagcgacattattgatgccgaggttttggatgccgccaaagagctgaaaatcgtagtgcgtgccggtgcgggatatgacaatgtggacttggatgccgcaaccgcccacaatgtatgtgtgatgaacactccggggcagaactccaacgctgtggccgaactggctttcgggcttatggtaatggctgtccgcaatctgtacaacggtacttccggtacggagttgaaaggcaagaagctgggcattcatgcttacggtaacgtaggccgcaatgtagcccgcatagccaaaggcttcggcatggacatttacgcattcgacgctttctgcccgaaagaggtcatcgagaaagacggtgtaaaggctgtggcttcggccgaggaactttattctgcctgcgacatcgtttcgctgcacattcccgcaacggcggaaaccaagaactccattaactatgctttggtgggcaggatgccgaaaggcggtttgctggtgaacaccgcccgcaaggaagttatcaacgaagccgagctgatacaactgatggaagaacgtgccgacttgaagtacatgaccgacattatgcccgcagccaatgatacatttgccgccaagtttgccggccgttacttctccacaccgaagaagatgggcgcgcagacggccgaagccaatatcaatgccggcattgccgctgccagacagattgtgggcttcctgaaagacggctgcgaaaagttccgcgtaaataagtaatggatttatactcagacaaccatggcaacaataaaaccttttaaagggattcgtccccctcaggatttggtagagcaggtggcatcccgtccgtacgacgtcctgaattccgccgaagcgcgtgaagaagcggcaggaaacgaaaaatccctgtatcacatcatcaagcccgaaatagattttccggtaggtacggacgagcacgatgaacgtgtgtaccggaaagcggccgagaacttccggatgttccaggacaaaggctggctggtgcaggacgataaggagaactattacatatatgcccagaccatgaacggtaagacgcaatatggtttggtggtgggcgcatacgtgcccgattacatgaacggcgttatcaagaagcatgagcttactcgccgcgacaaggaagaagaccgcatgaagcatgtccgtgtgaacaatgccaacatcgagcccgtattcttcgcttatcccgacaatgcagtgctggatgcggtcattgcccgttacacggcacagaagcctgtttatgactttgtggctccggacgacggtttcggccatacattctggattatcgaccggcaggaagatattgaggtcataaccaaagaattcgccaagatgccggcactttacattgccgacgggcaccaccgcagtgcagcagcagccctggtgggtgcggagaaagccggacagaatcccaatcatcgcggagacgaggagtacaactacttcatggcagtctgtttccccgccaaccagttgactatcatcgactacaaccgcgtggtgaaggacctgaacgggttgactcccggagaattcctggctgccgtaggcaagaacttcacggtagaagagaaaggaacggaaatctacaagccggcaggcctgcataacttctccctttacctggacggcaagtggtacagccttacggcaaagccgggcacttacaacgacaacgaccctatcggcgtgctggatgttaccatttcgtccaacctgatactggatgaaatcctcggcatcaaagacctccgttccgacaagcgtatcgactttgtcggcggtatccgcgggctgggcgaattgaagaagcgggtggacagtggtgagatgaaagtggctttggcgctttatcctgtgtccatgaagcagttgatggacattgccgataccggcaatatcatgccgcccaagaccacttggttcgaaccgaagctgcgttcgggactggtaattcataaactggactgattcagatataatttcaaagaatgaatgagaagaaggtgcatggaaacttggcaggttttgatgcaccttcgctattttatattgccattcccttttccggtatacggaaaatgccgacctttgccgtcaaaataagataccgttattcggcattagttattaaaaccaaaagaacgatatgggtaaaaaggaagaatacaaactgaagaacgaacagttcctgcaaaatctgcgtaccgaagaaggcgtaaaggagttggctgccggcgtgctttaccgtattctggaaagcgggcagggcagtagcgctactcctcgcccgaacagtattgtgtcggtgcattacaagggaacgctcatcaacggcagggagtttgacaattcctggaagcgcaactgtccggaagctttccggctgaacgaagtaatcgacggctggcagatagccttgcagcagatgcgtgtaggcgaccactggatggtttacatcccgtacaccgtgggatacggcacacgcaccagcgggcctattccggctttctccacactgatattcgaagtgaagttgttgggcattgcctgagagggtgtgaacaatcatgttacggaacggagaccttacccggggtggcataacgggtacgttgttgcgtttcaccctgcctatgatggcgggttcgttgctgcaacagtgctataacatagccgatacgctgattgtagggcagtgcatcggtgcggatgcactggcggcggtagggtcggcgtatacgctgatggtcttccttatctccatccttctcggtttgtctatcggcagcggcacggtattctcgctgcattacggtgcgggaaaccattccgccctgcgccgcagcattttcgtgtcgttcgtactgataggggcggttacatgcgtgctgaatatggcggtattcgtatggctggaccctattctccgtttgctgcaagtgccgcaggacatttacggcatgatgcgcggttacctgtggataatcttttgcggcattgtctttacgtttatctataatttctatgcggcgatgctgcgtgcggtgggagattcggtaactcctctctggtttctggcactctctgtggcactgaatatcgttctcgacctgtttttcatcctgcaactggactggggcatcgagggggctgcgatagccacggtcatggcacagggagtcgcttctgcgggaatagtgctctatacctggaggaagcgtccggaactgcggctgcatatcggagacatgcgcttcgaccgtggcagcctgaaagagatagtctctttctccacactgacctgtgtgcagcagtcggtcatgaatttcggcatcctgatgatacaggggctggtcaacagcttcggcacggcagtcatggccgcctttgccgctgccgtcaagatagactcctttgcatacatgcccgtgcaggagttcgggaacgccttttccactttcatcgcgcagaacttcggggcgaaacgttacgggcgtatccgccggggtgtccgcagcgccttgcttactacggttatcttttcgattatcgtctccgtgctcgtgttcgtctttgcagaaccgctgatgctgattttcgtccatccgggcgaaacggaaatccttgctaccggagtggagtacctgcgcatagagggtgcgttttactgcggcatcggcattctgttcctgctttacggctattaccgggctgtccggaagccggggatgtcggtagtgctcacggtgatttcgctgggcactcgcgtggcgctttcctacctactggcggctattccttctgtcggggtaacgggcatctggtggtctattcccatcggttggctgctggcagacgcggtgggtatgctgtattataaaatgaagaacggggcatgaacaattcccttgcggcatgcttgcgttgtgcaggattctttttagttcttcatggagccaagtatcaataaaagcggtatctttgcgcccgatttttcagaaagagatactgtcatgaccaataatcgtcttaaaggatttacttacggagccgttgccgctgccagttacggcatgaacccgttgtttgcattgcccttgtacggggcgggaatgagtgtggactccgtcctcttttaccgttactttttcgccgttgtgatgctgggcatcctgatgaaagtgaagaaacagtcctttgcgctgaagaagacggatatacttccgctggcggtaatggggctgctgttctctttttcctcgttctttctcttcgagagctataactacatggatgcgggcattgcgtccaccatcctgtttgtctatccggtgctggttgccatcatcatggcggtgtttttccacgagaaggtctccttcatcacgatgttctccatagcgctggcgtttacgggcatctccctgctgtacgagggtggggacgggaagacgttgagcatgctgggcgtactgttcgttattctctcctcgctgacctacgccatatacatcgtcggcgtgaaccgctcttcactcaaggagctgcctacggcgaaactcactttctatgctttgctcttcggcatcagcatctatgtggtgcgtctggacttttgcacggctttgcagcccgtcccttcgccggtgctgtgggcaaatgtcctttcgctggctttgtttcccactatcatttcgttggtgctgatgacgctctccatccacctcatcggctccacgccggctgccatattgggggcgctggaaccggtgacggcgctgttcttcggcgtagtggtgtttggcgagcagctcactccgcgcatcatgctcggcgtactgatgatacttactgccgtgacactgataattgcggcgaaaccgttgctgcaactggtgaggaggcgcatcggctgaaaagcggctctttcttctgccgcgataaagttttttttgccggctatcaaaaggcggatagcaaaaagtgtagtatctttgcggcatgagcgaagatacgtataaaaccatagccgtcccgtccgagggaatttataccgagaagcgcagcaagtttatcgctattgccttgccggtgcgtacggttgaagaagtaaaggcgcatctggaaacttatcagaagaaatactacgatgctcgccacgtgtgttatgcctatatgttggggcacgagcgcaaggatttccgtgccaatgacaacggcgaaccgtccggtacggcgggaaagcctatcttggggcagataaactcgaacggactgacggacatcctgattgtcgtggttcgttatttcggcggcataaagctgggaaccagcggactgatagtggcttataaggctgccgctgccgaggccatcgctgccgccaccgtcattgaaaagacggtggacgaaacggtgaccgtccttttcgagtatcctttcatgaacgatgtgatgcgcattgtcaaggaagaggagccggagatgctggagcagtcgtacgacatggactgccgcatgacgctccgcatccgcaagtcggcaatgcccaagttgagggcgcgtctggagaaggtggagactttgcgttttgaggaagcgtaaagtctccg

SEQ ID NO: 4077 - DNA, 96042 bp, Unknown
  gut microbiota DNA sequence
ggtagccgttgttgtccataagatttctgagttagttttatgcaaagataggatttttacaaatattacccctcaggtttttacattgacccataagttctatccatctgataaatactgtaaggctcagcatacttactgttattcagttgttgctgctgtcaaaaccaaatctctgttattgaataactcatttaatttggtcatagtatgataaacttctccatttaccgtataatgcagttccacattgtctatataccaatcgaaattatattccttgcgcaaacgtaactcataccggccatcctcccgaatggtcatgacaccaatacggctgccgttcacctcacgttcaaaagatacaaaagctcccttaggcacaggtttagtctccccgttagcagtatagcggatggttccggtaatggattcattggttactttaaatgtcttttcaaagaataccacctgcctattattcgaactgacgacaatatccccggcacttaccgctgatttggttttgaaaggaagctttttccgttctcccctttgacttcctgcaccagcagcatcgtccttttgcaaggcttcacctactccataccgtctttcatcctcccgattagcctctaccgtataaataaagcgtccttctgtgctcggatcggctttcagcttgtttttatctaagttgaattccttcaggcgtgcatcatctatttccagcataggcgcatcaatatagatttcgaactcttctccaaacggatcgacagactttccatctgaaccggtaaaactggttacatcaaagctaatatccacttcctgttcaggttcataagtccatgtcagcggtgtttcctcctcctccgcattgcccgaagcatcagtacctatatcatccacccgtgcggcaaagcggaaaggatggtaattggcaagctcaaaggtaacggagcgataggtatttcccgtatactcggcttcattattcgacggtaatcctgagggagagccatgctggttggatgccatacgtactacttccgcactccgtgcaacattagtcttcatgtaaatggagtaacgtcctgtttcttccggatttccggcatcaatcggcttaaacatatatacacgtcctcctgagccccattcactcttgtctacttcataaaaagtacaatcaaaagttactccatcaggttcttctccgtcctttatatgatccaaatattgggaataaagtaaaaactcatccttattacctgcatttatagccattgcaccatctttcaacagcatatcaaactgtactaaggctcctttcttctgcggcaccaaacggtaaaggattttctcatcatccgcaaagtctcctccaccttctgctccattatactctcccagtcccactactgttatcgacttttgtgaagagcctgcaaaagtaaagacacgatgcatggtgttgaagtgttcggcttcgatactgatatccttggttgccccatcttcctcattcagaatattcctgaaataaacacgctgtacaccaggttccgtcacagtatacacatatttatatttccattccggcatctccgttccataaccttcttcaccttcacgcaccagcggcaataccatacccgattcatggcgcacatccaaagcctctactgcaagcagtaccctgagcggaaagagctctgtcggacaatcttccggaatagtaaacattatagtagcgtgcgcaccgccatcatccatattgccataaatttccgtagatgcccatgccggcgtaaaattctgcttcttcaccataatcaccttgattttacgttgcaggcggtcttttttcaccaacaatgtaccttccagtttctggttattattcattggcaggagattaatgataatctttccttcaccttccccgttactgtttatggtaaaagcttccgttatcgtattggctgccacggtatttccgtcaagccatgttacaaccggcttgtctgcttcggtaattacagtgccgttcttgcccgacagtgtatatttcagttcggcagtcttacccgctctttcatcattatacacgacactcgtttggtccacggccaatatatagttgttatcttccaccgactcaacttcgtccgatatggaaagccacacattgtttgtggcagccgctgtaagtgctgcttcaaaggtaggctgtccataagaaagcgctcctgcaatatggaatgtataatgatggttccttcgtatcaattcctgctcaccgttctctttaatcagcatcacccgataataaagttcttcgctctcaccgggcagatgtccgcgaatgatgacactgaccgggtcttccgagctgttttcgcattcgaacacatataattccggattttggctgatatcctgtacatcctgaatatcgctcaacttggcatcattggcaggcaatgtaacaaaaggctcaacgtctgcattcgaagaccatacccaccctttcgtaggatgataaggagccacagtaccaaaagcattcgtattataggctgtaaaaccggtaactaccagataaccgtttcctgtcggattgtctattgtaattttagcctggttacgaatcattattatattaggatttttagccaattgttggtcaatcgattcttcgttgttagcatcgcatgcaaaacgagcccaataaatcatcataccggacgaaccttccagcagagctatcacatctgcctccgatttatttctgaattcatcttcctggaaatcagtcatattctgattggcaataaaatgaatacggcgtgtattggcaggtatggttgctgtaaattctccagactcttccccgtaggaagtgattgttgccggcgtagttgttataaacaatccgtagctgtcgaaacaaaacagctgcatactatttacccctttaccatccgggtctacagagcgggtggtcaccaccggcatagccggtatttccgtttcgaaatgtatattaacataaccttcgggagcttctttttcttgaaaagcagtccactcatccgtctggcaggcggtgaatgagaccaacagtcccaacacaacaagtactgtatgctttattgcttttgccatatctttctgtttttttattcttctctatttctgggtatcaaaggcatcacggatgcagcggactcctgttccattcatatttgattttgagttttccaccctaccatttgcactataatagtatttggcattcagcagatagtcaatagcatctgcatcttcatcttcttttccttgaaaattcatgataatctccagttccgcccttgtcggcaaacgccaatcgtcataaattgttccatcatgcgtaacttccacatagttggcgcagtgttcacgggcaaccctcaaactgttcgcactgttatccaatgtcaagtttccggcacccaacatgaacccgcctaatgaagatgcaatcataaatgacggggacacaagttccgcattgtctgtacccggatctgtaacgagaagaccagtcgtttcgtcgcgaatctgtctcggattgcctatagtgtatttgtcagatgtagaagtaatcgtaatatgatacaaacgaccgttatactctcctgattcactggtgctaagaactcctctgctattccagtagtaatgtaaaatggttgatttgccagcaactatcttggtaacgactttggatctgaaaaaaccattacttgcatcttcgaaccaaccgaagccgctggacacttcgtaatcataattcccattccaattggatatacttcttgtagcaagacttattccgtataccctgtctcccatataatcataagtggtaggtcgggaatcatttattttaaagtcatcgcgataagaataccaactctggatattgacgatatactccaacggatattgggcaaccgttactttacgagcctctactccatcctcattggttatttccaattctatgtaccgtatcgtattgttggtaggcaacgggctgtgtatattgatatttccgttcaatcctttatccggtactacattaatacccatcctggcaatctccctttcactggttgtagcctgtgtttgcccaaatttatcaatgtaataaacccgcgtcaccttaaccgagacctccgatgaagaagcaaattccagcgttgtgttatcatccgagatattatacatttccatttcttcctcatttaccgttaaatatttcggccggtcggtttctcctccaacattaattattgtctcgtcccatgcttgcacggtataattgacaggttcgagttcttcgggttttaaaatttctgttgcacccggcgcatttacctctaccgttacttcgtaataagtattccgttccagaaccttctctttgctgataggaatctgataataattatctccgcgcaaatccgtttctgtcttataatagagcggaatattcaccaccagacgcgtttctctttccaaaggcttatccttccaattataactgtaagcataagccgtaacagttatttcattttccgtccatgcaaaatatttactcgcagaacgatcgggcgtccacaattttacattatcattcgcatctggatttggaataagggttgtgctataaggcatgtttcgcagataataacccgctctataggcttccggtgaattatcaaagataacatcttcccctttctttatcttcacaacaattttggcagcagcgcgtcgcaatgtaacggccaattccgttttatccgaaagattgccattgttaagcactacttttccaggcgtttccggttcgtctgttccagcgggataggctatgccgtccataagaaaaatcatcggtatttcagggtcagtaccggcgccggtcatgtgtatattacgctgttcttccatcaacccgcgtaattttcccaaatcggctacctcttgaaatttgtcttctcccaatgtactattggctatcagatatacccaatatgattcattaactgtaaaatcattccgctgtgcttttgccaatgtaattttaccgttcttctgactgtcggctaccacctgcacccgttcataatgtgccaagcttttgttatccgtatcatcaaatatcaatacatcaacataacttaccgtcacttccgcacccgttgcgcctgcacgggtcaccggcgttgttgcagacgaaatgtcaagcacaatactattattgtccgcttccgtttttacaaaatccgcttcattgctacaggcagcgcaacctaacactgccaaccaacaagccatatggtagaatatccgtttcatctgttcatcatttttgaatttctgatacttgtctaattgtaatcacatctgctctgtcgccacttcccggccatgcaatgtcaccttgtgttccattaatcattaacagactgggacttcccgaatcccagataggagaataagtaataccaaaattaacagtctgccctacagcatcgggattccgtgcaatcaccttgattgtaaacggattgggagaagctcgataaggagcatctaccaactttccattttgataaaccttacagacaaaatttccgacaccagtaagcagagtgggagcccattcttgattttccggtgcagtcatctcaaacagaacagaaaaagctccatcttcctctgtggacgaaccctcatcgcctgtgtagcaaaccacgggaggagtattcggcttatcgccgtcaagcggcaataccggattgctatatgtaggatattcaaaagtcaagtcattccacgcatcggcatcgtcccagtcggccaccatataatccaccgttatcacatcgtccggaccgatacggttaagcaccacacaatatttgttgcgcttcacttgcggcaaataaatatctttcaccgattgattcccgttaatactgtaagtaaccctgaccacaaaacctttatgttccgtatctgccgttccccaactattcggattaccggaaccataatagttttcaaacatataaaccggaacggaaaaaaagtcattaaaccccttctttatactttccggatctgttttatcaagcaactcataatcagcatctgtcattacctttgtcaccggagaagaggtggtcagtaattcgaatggactgttcaaagaaggaacttctctccacactgcatcttccggatggaacagataattatattgaagcactcccaaaaaatcaatgcgttcgatacttaagttcatgccagcttctttagcggcaaaatacatgcccagcttacctacaacccgttccagttcaaattccactgttccattccacatcagatgtccgttatgcgaaccgcctgccgtactttctttcagattattcgggtctattttctgagactgcttgaccgccatcggaaccgcaccataaccacgagcattgatttctccaaaataaaacttttccaattcatcgcgtgtcatatcctcccgaagagttgcagatggtctcagcattgcatcctcattcgccaccaggtagaaccatacatcctgtacaagtgcagaataaggcggtaattccaaatccatccaaaaagagattttacctcctgcatccggatttaaaccggtagttccacgataatacccaatttgtttctgtccgataaaagcatatacgcgcaagctctttacggcattctccatttcagcctgtatgtcggaaccgccacgggcatttacattcattttcacactgatattcccgccttctcccgtaccggacactttttcctcgacacatcccgcaagtgccagcacacatgcagccaacatcagccatagatatattgtatttaatgtcttcatcgttttctctttttaaaattccggtttcacgtctactatgtaccagtcgggaactgtgaccaccgcacctatagacttaaactcaatgcggataggtatcagcgcttcatgtctggtcaagtctactacagggttggcagccaggaaatcggccagatttacatgagcgaggttcactccattagcgtcagtgaggtctaaattcacattttcatgattagtatgcctcattatattaaaacgtgccagcatggtatgcttttccgcattattttcagtttcagggtaataggtaacaatattgccgcatgccttattgtcgaaaccggtcatagaagacaatccgctcatgctcagcaacggccataccggagtgcgggtagcggactctacaggtcccgttcctactacttccacatggactttgtagtgcgaactggcaaaatccatctgttcttttatctgttgtgcatcaccggggatgctgatttctttgtaagcataatacagagagtcatttccgacaatccgttcgccacttatacagtttttatcacagaattgggcagttgccagactttgcccgttgctgacctccgtatgataggtgttgcccactgtcacaatccggtagtttcctataggcagcttcaactctgtggctcttgtttttatatcagcttcgcttatcggatgagaagacagcaacgcaccgtcactatcaaaaacatacatgtccactttatgaatcttatcttgaaagatttgggttgtaccgtcgcctacataactgaactccagcaggcagttgcccggacagtcactcatatcttctttgatgcacccgttgagcgaagctaaaaacatcaaggatagtatgtatttggtgtatttcatattttatgtatgtttcttagaattagttgaaagagagagatggaaaggatgtatcaaaaccgggaacagttcctgtctcagtaccttgttttgatacaatccctccggttaaaaaattagtagagattatttgccatattcaggttctaccggtacaatttcccagtcctttacagttacagtagcggtaacacagatagtaggttctcccggatccaaatcggtcaagtgttcttctgtaaattccaggtctgtaatctgatagattttaccggcttccatggttactttaccatcttccgctgttttcagacctgtaatctttaagtaggcaggatcataaacgataaatccttcggctacagggctcttgaattctgtatcgaacttaagaagcatttctttaggctgacccagtacattatagccataaccagccaataaagccgtttcagcagtagtagtgatttctggaccggatgtttcatcataaaaacatgcaggtacacttaccgggtatcctccttggtttgtcttatcatataattcatcaccaaccggttctccacccaatgtaaactgttgatgtactccattaagaccgatgtgggtcaatgctaacttgctatatgcactattacccaagttggtacatgtaagattaccgctcaactcaatacgggaaagcatggtcgccagttcaactgttgccgtatacatcgtattgccatctgttgcatcagtaccattaggaaccaaatcagctactttgcttgctaaaggtgctgtggatgcagctccatatttgttcatattcaaagttgcttttaaaatatcattctcccagtttccttcaacaggaagtggggtatcctcgttaaaattggcaacagccgcaattttagtaacttcaggacttacattgtgatagacattgtcactaccgacctgtgcatcttttacctcaacaatattaccatctgctttcaacaggtaaagtttgatattctgaggattaatagctttatcagcatcctctgtccacccgcttccggcttttgtctgtccatagcttccggcagaaatcgtcacggaaatctgcttggtacctttcgtcaagatatcattaccttcatcttcgttgctacatgctgcgaaagccaatcctgccaatcctgccaatcccagcataaaatacttgtttaacttcataagttgatagattaattaaataaaatagtattaataactcgttctatttgtgtattctgttatatgttgctacaaacatgtatcctgtggtatactataaatcagctaccactcccgccaactgctccagatttttttgtgcctccatgcttcccgccttcaaggcacgctccagtatttctttcgccttgtcatattgtttgtccctggcacaggcaacacccagcgcattcagaaccgaagcatcatccttcacctcacaaccctccagcaggtctattgcacctttcacgtcaccctgctccatcttcacacaagcaccgttcaccacagcagcggcattggccggatatgtgcaggcagcagtcagcatagcctcatcatattccgcactgcccttcccatacgaatctgccaccatatagatttcctcgacgctcagcaggtcgggacgggttttcaatagcttctttgcctcttccagattaaagtttctcacattatattctatgcggtactcattacggcgtaacgggccatacatttcattcagcaaacgctggtaaatttcaggaggcacaagatcgcggatacgttgttcacaaaggtccttatcgccatcacactcatcgataatcctcagcacgtcgtcaatcttcagtaactgcggatgtttctccacttccttgcgcaagccttcccagtcctcacccacaccggtcacatgccacagcgaagcatccacttccgtatctttctgcgcatacgcagccaatgcttccgcacgattcttcgacagcttcaggttatactccaccgtaccctccggagaagcatatccggtaatataaattccggttatggtcaaatcgggatttgtctttaccacctcgacagagctgcttaccgtggcaagttccgattcattgttcttgaacttcgggtctatgttgtaactgtcctgacggaactgcaaacgtgccacacgcacctcgttgcgcaccttcacagtctctttcccgggctgcacaaaagctgtggcatactgcggccggaacaattgcaggaacgtattttttaccggcgtttcctccatgccggaccgtgcacactccagacatcccgtcacctgctcgcgcagcaccaggcggctctgagccatccaaggctcatagggcagagtcactgcatattccacctgctgcgcctctccgtttttacgacgcaacgctatataagcgccatcggtctttgcagatccggtcagcgccttgtcacggcggtgtactttatcgcggacacgaccgtccaacaccacagaaggaagctccagactcttaccaccctctttcgccaccaccaccggataaagacgcacgctctcctgacgcttcacatgcatctcctctatatcaagtacaaagttcacatgaacctcacggccgttcttctttatttcatcattgactacgcgtacgcctgaaagatgccccgtctgcgcggaagcaggaagacacgttccaagcaagaacaacgcactgcatatcagtttgccatatatccattcttttctcataatgtacttcctcctttatttaataacatatatcaatgataccgcggctttggtgacgctgaagtaccctttgtcattcttctctttccactcaccgcatttgggacagtcatacttatcgtaatggttctgtacataacctacaccgatgctcgcttccaggctccagcggttgcccaatatccactgatagccgtaggacaagccggcgccgtaataatatccctcataccgatagtccttggtagtaggataaatgcccagagggaatttcacgttgcccacgttaaattgccctccaagcaggtgcaaaccaaagaagtgtccgttaaacgcctcacacagccaataccgtgcttcgggctgtgccatccagtgtttccacttcttactgtctgaaaatgtaaaaggattatagttcgcggaaacatccagcgtccatttcggagccagccggaattcggcaccaaggttgaaagtagtactgatgtcatacagaagattcgtcttcaacgaaatgtcctgtgctgacaaagaaatgccgataaacaggaaaataatgcaaaggctctttttcatgctctccatttttattaagatataacttatctgtctatatattttatcaggttaacatttccgttactttgtaggtaacgggaaaacaggaacaaacacactgcaagagacatcttgcatcaacataattaactgttgcggattattggagagagcgaaaaaatacgagcagattttctgtgttaatttaatataatacagacatgaaagtattatgcattttccaccaaaggaaaacactgtcattcaagtcagtccgtcttgtaagcatatcaaaggacggctttacttattttttggaaaaaaatcttttcttttcttgtttaatacaaatcttttgttgatatttgttgcaatatataactctccgttacctacaaagtaacggataacatttgtagtattatcaaaacattaatagacttaatgttttttattcaggcaaatacaaatcattgtttatcaaatatataagataatatttccttattcatatcccatattttatcatccgagtgccttctaaagtaagtttctgtcactttaacggaggaatgtcccattgcattactaataagttcttgttgataattccgataattggcaatggtagcccaactatgccttgcggtataacttgtcagtcctgcaacgccttttatacattctcctaatttctttaaatgataattgaaactacgcagagcattctgatattgccggtactcatcctttcccggatgatgaatgagagggaataaatagggagaagtcttatcggtatttctgagattgcgtataatcttcattgcctcagcttctacgcgtacagtaagccatgcacccgtctttttacgacggtacactatcacgttgccatgcaaatcacaatgccgcagaaaagcaatatctacaaacggcattccacgaagcataaaaagtaataaaaaaagcaagcgcgtaaactccaggctctcatccgccacaggtgcattgagctgccggaacacatcttcatccacagcacgtttcacagttacctttgttcccgtatatactcccttgaacagcctgggctgataaggagccagcccatcgtctacggcacggaaataagtggcacgcaacatcctcatatacgtggaaattgtattccaatgaagctgacgctccagcagatactcttgaaatgctttcaaccacactggggtgacctcttcaaaactgatggagtcctgctccataaaatccttgatacgattcaacgtactttgatacacatgcgccgtacccatgcgctgttcttctttcaactgagagacagtcatagccatataggctgacaaatttgttttattcatatagtttctactttaaaagtgagccatataaatgcctaaagaacaaattagttcaaacgactattctgttaaaaaagtacacagattacaaactttaatacatatccggaagcttcccgtttttccgaaataccggaatttatcaaaaattcgcaacagcaagcgtcagcacgctgatacgtacgccttctacgtcccgaaacacatcggcgcacgtagtaatggtagctccggtagtcagtacgtcgtccaccaacaagatatgctttccgacaaaacgttcgggatagcgaagatgaaagatgccgttcacattcttccaccgttcataggcagatttgcttgtctgcgtttccgtatgtttcttgcgcactacggaagcagcatccaaaggaatacccgtaaccgccgcaacccctttggccacacattcgctctggttatatccgcgcatccgctgcttgcggggatgcaaaggaacgggaactatgacatccacatcgcaaaagaactccgaaacagtcaattccgctgccataaaacgccccattgtctctcccaagtccttacggccgccatatttcaattgatgcagtatccggcggaaatcactgcccttatgataaaagaagtaagaggtagcgcgttccaaaggaatttttccccagaacatacgttccaccggattatccgcacaaagatgataatccgtacggggcaaatccatattgcatttcagacaaatagcctcctccccttcctgcagaggtgtgccgcacacaacacactgccggggaaagaataaatgaagaaaagataaaagccaggctttaagcgtattttccataaatttggttttcatgcccaaaggtagggacaaatcacctataaaaaagtctctcttccgatatcaaggtttcaaatagaccaccgttttgccgctaccatacttacgtatcatcccctccgcaaggtatcggttcaggtcggacactgcccgatgcttcaccaaacccgttatcgattcataatccgcccgtgtgatgcatccatatttatccaaatgcagcaatagtttttctttcctttcctcctcgcccatcaaggaacgggatacgtacggtgacgctttgcgttccagctccatcgtattgaaacggttacggaatttgctcccgagacgcaggttcacattctgaaaatgtaccgacggcgaacggatttctttcttgtcggtaacctgacggtcgcatttcagcgatacggagaaatagcccaactcgcccacttccaccgtccagccctcggacagccaactgtatagttcgtccgtaacagcctgcaaagttccgtcgagaatggcgggactgaaaccggtggccttagccaccaactcacggaatttatcggcggagattgttccccgtggcaggatacgggcatgcagacggggctcgttgcggttctcgcccaaagggtcgggagtctgatacaaatcatagtaagcactcatatgtaataaggtattagattggcactatcagccaatacgttcataaatagcaagataccgcaccgccaaccgtaatccgtcagacagatgtcacccttgcgttaaacagatgttgccctttcgttacacagttgtctgacgaaagggcaacggctgtttaacgcattagcattcgcagtcaaagataatgataaatccacaagaaacgaataaatcctgcaattcttctgcctgatacctaaaaatcacctgttgccgtttatcttacttttactgtacgcaaagtaaaaaacctgaggcaaaacagtaaacgaaagcacaaaacatatcaggatgccgcctacaatcatcactgccaacggcttttgcacttccgaacccattcctgtggagagagcggcaggaagcaatccggcagaacccattaatgaaatcatcagcacagcacgaagacggatgcgtacggcctcatctattgcaaaacctatattgcggctttgctgcaaaagcgatttcatcagtgccgtgagcaaaatagaattgatagacactattccaaacaagatgataaacccaatacccgccgaaataccgaacggaatgcctgccacccaaagcgaaataaatcccccgataaaagcatagggcatagtgcttgcggcaatcagcgtatctttgactgtgccgaagttcatatacaataaaaagagaatcagaagcaaaacggccggaacaactaccgcaagacgtttggtggctcgctgctggctttcaaattcgcctgcccattgtatcttgctgccttcaggcaaatgcaccaacctttcaactttggcttgcgcctcatctatggtcgacccgaggtccctgtcccgaatggaaaaacctatccccacataccggctgcttccttcacgataaataaacgcaggtcctgtcacaaacttaatgtccgcaatttccttgaggggaacctgcttgccatccattgtcggaataagaatatcacctattttctgctcatcgttgcggaactgctgttcaaaacggagcatcacgtcaaaggtacgctcattttcgtaaaacacagttgcagctttcccaccgatagccatttcgataaccgcctgggcatctgccatagacacggcatattgggccattttcgactcaaggggtttaatctgcaattccggcagaccgattgagcggaatacatttacatcctccacccctcggacacctttaatgactccggcaacactatcggcagcagcctccaatgtatacagatcattaccgaagattttaatgaccaacgcactttttactccggcaacatactcttctacattgtcctgaataggctgcgaaaaagcaaaaataattcccggataaacagccaaagaatcttgcatctgctcaatcagcttctctttggacatcttgcgcttccactcggattcgggtttgagctcggcgtgaaactcaatgttgaaaaagcccgttgcatctgttccatcattgggacgccctgtctgtgtaagaataaaatccacttcctcaaaactttgcagtttggctttcatctctttggttagccgcacgctctcttcgagattgacactgttaggcaaagtggcgcgaacataaaccgctccctcgttcatactcggaataaattccgtgccccaaaacataaaccgaaacagggagataccgaataaaagtacgaatgcggcaacggttgctttcctatgacgcttagtgaagtaataaaacgaaatgagccatccctccaatgcctttgcagccttgttgttcctctctcttatcggtcttgagaacaacaccttgcacataacagggacataagtaagcgacaatagcaaagagccgagaagagcatacccaagcgtaaaagccagcggagaaaacatctttccttccactttctgaaacgagaaaatagggaacagcgccaccaccagaataatctgggcaaagaaaatatgagaagcaaccgaaccggcactcttctttataagcccgcttttggcataacggccgaaatactttcccctctcctgcgatttttgcaggagcgcaacgaaaaccacctctgttatcaccaacgtaccctccagcaacagcccgaaatccaaagcccccatcgaaatcagattggcgggcagcccttgtatccgaagcatcgtaattgcaaaaagaaacgacagagggatgactgaagccacaataaccgtggtacgccagttgaacagaaacaagaacacgataaatgacacaagcagaaccccctccagcatatttccgattacagtgtgcacagtagcatcgacaagccgagttctgtccataaagggcactatctttatatcctcaggcaaaattctgtcgttaagttctgtgattttatccttaagacgcgcgatgacttcgctcgggttctcaccacggagcattatcacgatgccttgtaccacatcatcatcgtaattgagcccaacctgcccttggcgcggttttgcagatacggataccgtggcaacttctttaacccgaatcggcgaactgcctttggtggtaatcaataggttttcaatatcctcaacgctttccaatagtcccaaaccacggaccacataggcttgcgcccccttctgtattacatcgccgcccacattgatattgcttctccctacagcctcataaacatcaagaggagaaatatcgtaattggcaagttccaccggatttacacgaatttcgtacattttctcctcgccgccgaaagtagcaatcgttgcaatgcccggcacagccaaaagctcccgttgcactacccagtcgttaacggccgaaacctcgcggatgggcaggtcactcttaagtatgtatctgaagatttccccggtggctccacttggcggttcaattgaaagttccacgccatccggcaggctcaactcctgtatacggttcgaagcatactgctgagcataaaaatcatctacaccgtcctcaaatagtacattgacaaccgccagcccgaataaggatgtggagcgcacatccgttttccgaggaatggtattaagctgttgcattatgggaagcgtaacgaacttctctacctcttcggcactgcgtccgggccattgggcaatgattttcgcccgcgtattggtcacatcgggataagcctcaatgggagtattctggtagcaggcaattcccgccacaaacagaactcccgtcataaaaaggataaacacatgattcttaagggaaaatcctatgatgttttctatgaacttatgcatcgttacttcccttttatttcgttatacatcagcagttggttctttataacgacctcttcacccgccttaattccttcggtaatataggtaaagtcattatgccgggcgaaaggggtgatcttccgaatcccgaaagtcttatcgccaacaactacatagtaaccgttattgtcgaaaatcaccgcactgctcggaaccgctaccagttccaaattcgaatcattgaacaattttaccaccacaggcatttccggtttaagcttcaatgccgggttaggcaatgtgattcgcaccttcaatgctttgtcctcggagtcgaaaacctgtgagaggaaatctatcttacccttgaaaacctctgctggataggccacggatgtaatttcaacgcattgcccctcgtgtacaaattgcaaatttccggcatagacattcgctacaacccacactgtcgataaatcggccatcgaaaacagcggtccgccactttccgggaaagaggttcccggattgcagtatttcccgattacatagccgctcatcggggcttttacggaaaagacgccgttatcctgattttcgccataaagaacaaaatctgactgcaacttcccgactgtcgaacgagcttcgacaagctctttatcggttgccatcccgctctcgtgcaaggactccacacctttaagattctgtcgggccacggcaagttccgattgcaaagaactcaattcgaccgaacgtatatctaccatccttttacctttttctgcataatcgccaagtgaaaagtagcttttcacgactacaccgcttactaaaggtgaatagcttatcgtacggtcggaatcaacaactacttttccggcaagggtaaactccttctgcaaccgcttcaactcggcttttgctgtcagcacttcctgcaaaaaaacgtccgaaacggtttcccgggtcggcagactgctccggctgttctctccgcagcttgccagcaacggtagtaaaagataaattattctcttcatcattcgttattttatagtttgtcctattgcaaattgtaagcgttcaaattgaagcctcagctctttccggctccgcaacaacacctctttcgaagcatgatagctatccatgaaatccatatactcaaccatcgatatatttttcatcaacagattctttgtatacacatccggcatcttgtccatctcgctttgtatggaacgattcacaccgttctcctcaagaaaagagtaaacggctttgtaattttccaggcattcaataatttcattccgtatattattccgttcctgcaacaccaaaatttcattctgcctaagtctgaaccgtgcactccttatagctcctttattacgattgaaaaccggtaattgcactcctattcccacaccgaagaagttatcccacacgcctccggcacggtcatactttactcccaagctaatgtcgggtatcgccaatgccttttgataaacgatatctttacggtgatattcagcccgcagtactgccgcagccaaatcgggacgggatgccaaagccgtttccataagcatggcaggatccaatgtaagaggagatggaaagtcaacctgctcctcggcaacgatcaccacgaccgaaggttccaaagcaagcaaattctttatgttcttttgatgtgcattatactcggtccgtacctcgttcatttctccgtttactgcaaacagcgccgtttgcagcctcaacagttcatttccggttacattccccgtttgatactgcgcccgatatccggcaacaaccttttcgagaagagtctgccgactctcgataaccttaagcagattttgtagatatacaagctcggctatcgagatatgaagttccattttcagacttcgcaacagctcttcaaactgccttacggttatctccttatctattttttcaacttccgccaactttatcctgcgcgccgaaagcgaaaccatctgagagagttcgagcgaaaactgcttgggactggcaaccgcgcctccgtactcatcagtcccccgcctcttccaaaagttgatatcaccgacggataattccggattgtcccaaactgttgcttcggcaatggcagcatcggctatcgaaacattcatccgttcggcaataagtgccaagttctgtttcagaaacatagcctctatctggtcggaagacaatctaatttgccgagccggtacagatacaccaataaaagagataaaaactatgagcagcaaacgtatcataaacattgttttttgcgggcaaaaatagccataagcatagtcttacatcattagaaaacacttataaatcaattagaaaatcattagaaacccatctcttacaaaaaaatcatctacctttgcaacatatggctaaaatacttgttatagaagatgaaaaccgtatggccgaattgctcaaacgcggtttggaagagtccggacacacggttggcacggcaaccaatgtatcggaagggttgagaatgtttgcctacgaaaaacaggatatcatcatttcagacataatgctgcccgacggcagtgggtttgatttatgccgcgatatccgacggcaaaacgaaactgtgcctatactgatacttaccgcactcggtacgacagacgacaaactcgaaggattcgattcgggagcggatgactatatggtcaaaccttttgacttccgagaactgaatgcacgcatatcaatcctactgaagcgctgccaaatacccacagtagagtgcatagagtatgcagacctcaaggtatatctcaggacaaagtccgtttcgcgaaacggacagtccattatacttacaccgaaagaatacaacttactcctcttttttgtccaaaacccggaaagaattctaacccgtaccgaaatagccgaaaaggtatgggacacccattttgataccggaacaaacttcatcgatgtttatataaactatttgcgaaaaaagatagacaaaaatttcaacaccaaactaatccataccaaaccgggaatgggattcatattcagctatgaaaatccgtactaaactaacgctccgatatctgtttgttacggcattacttgtaatcgccgtcttctttgtgctcgaagaattgctctttccacaagcaggctacgatatgctccatattctaaatacacgcctgcttgcggtatgggcggtttcattcgggttgttgtttgtcatcggctatttcatggcacgcagcgtactaaaaccagtatcggaaattgtaaaacaagttgaagccatcaccgcttccaatctcagcaagcgtgtggaagtagaagaccacaaagacgaaataggagaacttgcccgaacgttcaacaaaacgctggaccgccttgaagaatcatttgaagcccaaaagatgtttatcagtaatgtttcgcacgaactgcggactccaatggctgcactgattgccgaactcgaactttctctttacaaagagcgctcaagcgaagattataaaaaagtggttgaaaatgcgctttccgatgcccgtaatattgagaaactatccaacggactaatggatttggcaaaggcaagctacaatacagaacaaataagcatgtcggcaatacgtcttgacgaagtgctattggatgccagtgccatggtgatgaaagcccacagcggctataatgttgacttaaggtttgaagacgataccgaagatgacggaatggtcactattcgtggtaacgactatctgcttcggacagcatttgtaaaccttatcgaaaataattgcaagttctcatctgaccaaagttcaacggtacagatttcgttttccaaacataaggtacttatccgtttctccgataccggcatcggcattcccgaagaagatatggagcatctgttcgaacctttttacagaggcaggaaccgggatttctcacaaggaaacggtattggaatggcattggtagagagaataatcaaacttcacaaaggtgcaatttccgtttattcacaccatgacaaaggtacggtattcacccttattttcgattatcttcagtctgactgaatctgtatttgcactgcatgatattaataatgtcccagcatatatcatttatgttcaaaaatgcaggaataggtatattttgtccgtcaaaaggcaagacagataataatttttgccttacatttacaatgggttaaacacggttatccccaccggaacggatggaagaacaactacttattaatataccaaacaaaaaaacatgaaaaaaagtatcctatttatcacgagttttttcctctgtgttttctgtctgaaaagtaatgcgcaacaaagcaggccagaggttacctgggagaatatggaaggcgtcacagtacccattccgccacaagtacacccccggctttatgtacgctccgccgatttgcccggtttaaagaaacgcatggaacacccgcatgtcaaggaagttctggctaccctgaacaaattgggcaaagaccgtactcccgaagaagaagcaaaagtcaaggacagaggattccgctactactttgaaatgcgtggcgtgaccagccgcgtacaggtgcaggcactcgactatctggtgtatggcgacaagaaacaggccagaagcgccattaccgccatgctggacacgcttcagaacgtcaattacggaacaaaaggcgatttgtcgcgtgccagcggtgtgatgctcacctgcggtgcaatggtatatgactggtgctacgaccagatgaaagaatccgaaaagaaagcttacatagaatctttcacccgcatagccaaaacaatggaatgcggctatcccccacgcaacaacgaaccgattgccgggcattccagcgaatggatgatactgcgggacatgctttctgccggcattgccatctacgatgaatatccggacatgtacaaccatgtaataaagatgatgttcaaggattatctgcctgtgcgaaactacatctactccgggcataactaccatcagggaacgagctacgtaaatgtacgtttcagcaacgacctcttctcgctctggattctgcaacgcatgggcgcaggagccatatacaacccggcgcagcagtttgtcctgtacgacttcctctaccgccgccgtcccgacgggcaggtgatgccggccggcgatacgaatcccatcagaaaaaacatgccgtcctactcactgcctgccatgctggcttccagcttctacaaagacagctatctggcatacgagtacgaacgcaaacccaacatcgaacgccactgcctcatcttcgacattctgtggagagacttggatttgaaggccaaagctcccgatgacctgccgctgacacgctattcgggaagtcctttcggctggatgatagcccgcacggcatgggacgaaaacagcgtgattgccgaaatgaagataaacgaacagtttgtcggcaaccaccagcacttggacggcggctctttccagctctattacaaaggtccccttgccatcgacgcgggagcctatcagggaagttccggcggatacaacagcccgcacaacaagaatttcttcaaacgtaccatcgcacataattcgctgctggtatataaccccgatgaaaaattcgcctgctggaactatggcggaggcggcaagaccgaatttgcaaccaatgacggcggacaacgcatgcccggcgaccgctgggaaacctgccgctcgttcgagcaattgctaagcaaagactacacaaccggcaaagccctggcgcacggattcgggcctgatgcctgcaaacccgactactcctatctgaaaggcgacatcacgcaagcctacacggataaagtaaaagaggcgaaacgctctttcgtcttcctgaacctgcacactgccgaagtgcccgccgcacttatcgtatttgacaaagttgtgtcttccgaccccacattcaagaaattctggctgctgcacagcattgaagaacctacgatagaaggcaaccgtttcattgtccggcgcaccaaaaacggtgataccggaatgttgcagaaccatgtattattgcccgaagccggaaatgcacagatagaaaaggtgggcggcaaaggaaaagaattctgggtattcggaaccaactacccgaacgacgcactgcccaaccgccccgatgatgccaacgaacggggagcatggcgtgtggaagtgtcgcctgccgcacctgccaccgaagactgcttcctgaacgtaatgcaggttgcggacaacacctgcaaacggatgcacgacgtaaaacgcattgatgcggagaaagtggtaggcgtacagatagccgaccgggtcgttaccttcagcagagacagccagcctctgtccggcaaagtcgatatgaaagtagacggaaacgctgccatgaaatttgttatcaccgacctcattccgggaacatggcaaataaagaaagacgggaaggtatatatccccgccatggaagtacgttcggacgacggcatcctttcttttgaaggcactgccggtcattacgaatttctgcgctaaacggatattctaaataatctgcctggctatccaggcacaggcttctgcatcggccagcgcatggtgatgttgctctaaccggtaaccgcaccatgccgctaccgtatgcagctgataatcgggcagtcccttaatggcacggcgtgatgcctgcaaagtacaacggaaatcataatcgggataatccatgccgtacatgcggaataccgctttcaggcaactctcatcgaacgctttattatgcgccactaacgtcagtccctcgatgcgtggtgctatttcctgccatacggccggaaagacaggcgaccgggacgtatccgccagggtcagaccgtgcacacgggtattccaataagtataatactccggttcgggacgaatcagactgtaatagctgtctgcaatttctccattccgcacaatgactacaccgacactgcatacactggtgcgctgttcattggccgtttcaaaatctatagcggcaaaattctccatgaagcgattcttttacgatatttccaaaatattttaaaaaagtttcaatcaactgtaaaccaaaatattaaatagccgtttatagggttttccgagcacagggaaagtaccgaaagcgcttttaaagcacccgtccgttccggcatgttgtaacttcgcactgtgatcacaaagatatatgatttcgaagtaacaaccatctaaaacaaaaaagattatggcattccgttatgtagttaaaaagagagttttcggtttcgatgaaagtaagtcggaaaagtatgtagccgcttcgttctccattggagaaatcagctacgacagattgtgcgaccaggttacgaaggagggtatggctccacgcggcgttgtaaaaatggttatggacggactgattgatgcgctcagcacttacgtcagtctcggagcgaccgtgaaattaggagatttcggcactatccgcccgggactgaactgcaaaagccagagcgaggcaaaagatgtaaccgccgacagcatctaccggcagaaactgatcctcactccgggaaaaaggctgaaagatatggtaaagagcgctggaataacgcgtatctcgaccaacggcgaggagattgctacaagtggcggcaataacggcggcagtggcaatggcggagaggaagaaaatccgctgggataaaacctgcaggctgacttaaaaaacaacctgtctataactgaggctgcatcgtatgaacagagtatcatacggtgcagcctttttatatgaatagattttactatctttcctctaaaaaacaaataagaccacctccctctctttcggcttgacagaggtatcattctttttggcatgtgttgttatgggagactactctgtttagtctcctgttttatattactttcctcttcgaactcgaagttcagactggctttcaattctttattgatttctcagacagtttgcaaaacggagtttactctaccacaaagatacggtccttttcatcaataaagtttaagtttatgctgcttgtattcttcttttatattctggattgaaagcctctttttttgataacatattccaaatcagaacaagtaacttccttgcaactgcaattagtgctttttgtttgctttttcctcgtgccaataatcgttgatacattttcatgaacctactgtcttttgttctagccgcactccaagctgcttccaccaatattttacgaaggtatttattcccatgggtgatttttcgggatttaatttttcctgcactctggtcattacgcggtttaaggcctgcccaacctacaattgcggatgcggttaggaacatcttcatatccactccgatttcagcaatgatattggcagcactctcttcctttatacccggaagagtttgaagcaattccaattcttcgcaataatgcgcttcgcaaatagcctgcatcttggctttattttcacttttgtgttgttccatctgcatacgttcgtcacgatactgacggagtatatcacggtccgtatcagatacaaaaccattgagagaatcttcgacaacctgtcgcccgtgcttgttcaaggtacgtttatgaattaaagttaccaatactttcggattactctctcccgatataatggcgttgacaaccttttgataacctttacaggagatgcaggagacatagttgctaatacggatattacagcgttgaagaatcatatccatacgttgttccgcatgaacgatgtttttggagagttcatgattgcgacgctcatattggcgcaaacattgaatcatacgatccggaacgtaactaccacgaatcaaacctttctgcagaactgtagctatccactcagcatccttgacgtcacttttacgaccgggaagctgtttgatgaaataaggattgacaagtttcagactaaagtcaacagacaaaatattccaaattggaatccaatagatacttgtactctcaagagcaacttcacaaacatgatgagaaacaagcaaatcacgtaacttatccagctcaggagtcaatacaccaaaaacagattcgatttttgaaccgttttcatacaagatacacatataaatgctatctttgtgaacatcaagaccacatactcgtctcataataagccaatttataggttaataactggagacctaaagataacaaaaaattgtgtaccaagagtacgaataaggcgaaagagagggaggtggtcttgttttttattggactggcataaaaatccaaggtttttatgtaagtttgcctactgcaaccattaaagctttaaaatatggaacatcctctttctcaattcagatattgtccgaaatgcggttcggagcatttcgaaattcataatgaaaaatcaaaacaatgcaaggattgcggttttgtctactatttcaactcctccgccgctaccgtcgccctgatattgaacggacggaacgaattattggtgtgccgccgcgccaaagaaccggccaaagggacactcgatttaccgggcggcttcatagacatggcggaaaccggtgaagaaggcgttgcgcgcgaagtgaaagaagaaacgggaatgacagtgacacaagccgaatacctgttttcattaccgaacatctatatctattcgggatttcccgtgcatacgctggacctgtttttccgctgtacggtagccgataccctgcatttcgaagcaatggacgatgcggcggaagtcttcttccttccgctgaaagacatccacccggaagatttcgggctgggctccatccgtaaaggcctgcaaatgttcctggcgggtatatcctaaaaaagccaaacaagtggaacatattcaaaccaaaacccgtatttttgtaaaaaagccctattctataaccaccgaagatgaaacataaaatttatcgcatagtatgcaccgcgctttgctgcgcacctttgctcgccacggcacagacgggcgggaaaatcacttcgccgcaacagctgtatgaggaaggagaaagtctgttccggcaaaaggcatttgccgcagccatgcctcccctacaggcttttataaaacaaaccgatgcggaaggcgccccggtatccgctgccggcaacaaagaagaagccgaatacatgctggtatgcgccgaatatgaactaagaacccccaatagcatagagttgttgcgggagtatctcgatacgtatcccgacactccccacgccaaccgtatctgcgccctcatagcgtccgcctatttcttcgagggaaaatatgacgatgcactcgccatgttcaattcatcccggctcgacctcctgagcaatgaagaacgggatgacatgacctaccgcctggcaacctgttacctgaaaaccggaaatgtgaaagaagccgccatctggttcgagacattgcgaagcaccggttccagatatacagcagactgtacgtactaccttgcatatatccgctactcacagcaacggtacgacgatgccctcaacggcttcctcagcctgcaggagaatgcaaaatacgaggcgctcgtaccttattacatcgcggaaatatatctgattaaaaagaattatgacaaagcggaaattgttgcgcaaaactatctctcggcttaccccaaccagaaatatacgggagagatgtaccgcatacaaggtacagccgattatcatttcggcgagtaccatgaagcaataaaagctttcggcagctatctgaaagacaacgcggagcctgccccaagaagagatgcgctttatatgctgggaatgtcctactaccggacgggtgtctactcgcaagttccggttaccctgggcgaggtgactgcaaacaaagatgcgcttacacaaaacgcatatctgcacatgggattggcttacttgcagcttgccgacaagaacaaggcgcgtatggcatttgaacaggccgccgcatccgatgccgatttgaaaataaaggaacaggcatcctacaataacgctctctgcattcacgaaacatcctactctgctttcggcgagtcggttacggtattcgagaacttcctgaatgagtttcccaactccgcatacgccgataaagtaagcagctacctgatagaggtgtatatgaacacgcgcagctacgatgccgcactcaagtccattgaacgcattacgcatcccggcagagccattttggaagccaagcagaagattctgttccagttgggtacccaatcctttgccaatacccagtttgagcaggcaatcggctgcttcaaccaaagcattgccttaggcgggtataacctgcaaacaaaggccgatgccctttattggcgaggtgaatcctattaccggctgaaccgcatgcaggaagccgcccgtaattttaacgattatctgtcccttaccccacagaagaatacggaaatgtatgcccttgcctactacaatctggcatacatagctttccataagaaagattatgcaacggcgcaagaccgtttcctgaaattcatccaactgagaaaggccggagacgcaaccgttcttgccgatgcgtacaaccgtgtcggcgactgctacatgcaggtccgccgcttcgacgaagccaaacagtactatacccgggcagaaaatctgggtacgcccgccggtgactactcctactatcaactggctctggtgtcgggtctgcaaaaagactacgatggaaagattacgctgctgaaccggctggccgacaaatatccgaattcgccctatgccgtcagtgcactttacgaaaaaggccgttcgtatgtgcagggccgcaataacagtcaggccatcgtaaccttccgggaactgctgaacaaatatcccgaaagccccgtcagtcgtaaggctgccgccgaaatcggactgctgtactatcagaatgatgattacaaccgcgccatcgaagcctataaatacgttatcacccaatatccgggcagcgaagaagcacgtcttgccatgcgcgatttgaaatccatttatgtggaagccaaccgcgtggatgagtttgctgcgcttgccgcccaaatgccgggtgctatccgctttgaacccaatgagcaggattcgctgacctatattgccgcggaaaaggtgtatatgaaaggggaaatcatccctgcaagggaaagcttcacccgttacctgcaaagctatccgaacggagctttcagcctgaacgcacattactatctgagcctcatcggaaaagaacagaaagatgaaaccggtgtattggagcataccggcaaactgttggagtatccggacagcccgtattcggaagaggccctgctgatgcacggagaaatcctgttcaaccgcaaggagtacaaacaggctctggcagactacaagcaactgcaaacccgcgccacaaccgccgaacgccggcagctgggcgtcaccggcgtattgcgatgcggtgtgctcttgaaggatgacatagaagtgattcaggccgcaaccgctttattggccgaagccaaactgactcccgaactgcaaaatgaagccttatactaccgcgtcaaagcctatctgaaccagaaagcggtgaaaaaggcggcagacgacctcaaacttctggcaaaagacacccgtacattatacggtgcggaagccaaatatctgtcggcacagttgatgtacaatgccggtgagtatgccgcagccgaaaaggaaatactgaacttcatcgaccagagcaccccgcacgcctactggctggcacgcagctttatccttctgtccgatgtatatgtcgctatggataagaaactggatgcacgccaatatctgctgagcttgcaacaaaactatcatgccgatgatgatatcgaacgtatgattcaagaaagactggaaaagctgaaataaaagaatgcaatgaatatgagaaaaatacaatatatcctcagcggaataacgctgataaccctacctttgggcatccatgcccagcaacaggccaaagactccaccgtaaaccgtacggttgttgtggaacaggaatatacccccgatattccggatgcgtccaaaataaacgtgctcccccaagtggaagcaccgactgccaataaaaaggctgtggaatacgatgtaactctcgtgcctgccaacaccatacctgcaactgtcatgcaggcatataccggcaaggagacgcaagccgaaacacatcccggatatatccgtttgggttatggcaactacggcaatctggacgcacgcgccggctatctgttcacattgtccggccgcgaccgcctcaacctgaatttccggatgaacggcatggacggcaaactcgatttacccgacaatgacggcaaatggaattcctactactatcgcactcatgccaatatggattatgtgcaccgcttcaggaaagcagacctgaacgttgcgggcaacttcggattgagcaacttcaatttcctgcccgatgcagccgtcagaaaacagaagttcatttccggtgacattcatttcggagtgaaatccacggatacggaactgcccctccggttcagtgccgaaacaaacctgatgctttacgaacgtcaatacgattccggtttcttgaacagccgggaatacatcgtccgcaccaaagcactggtcacaggcggcatatcagacgaacagaccgtaggcatcggctttgcaatggacaatgtgctgtacaagaacaatcattttgagaactacacctctctcggtctgaacccgcattaccgcttggaaaacgatgattggaaaatacgtatcggcgccctggtggacatgaccttcggtttcggaaagaaattccgggcagcccccgatgtagcagtggaatacaacttctcggacagttatatcctctatgcacaggccaaaggcgggagactgcaaaatgacttccgccgtttagaaacattctgcccatacggacaggtttcttcacaaccggatgccacttatgaacaaataaatgccgccatcggcttcaaagccagtccggcaatcggcttatggctgaatctgtacggcggatatcagaacttaaaggatgatttgtttttccaaccggcagatttcgaatccgctgccaatgagtacagtccgatgctttccatcggccaatggaacacaagcaacatctacgccggcgccgagatacgctacagctataagaacatattttcattctccgctaccggagtttaccgcaattgggatgcaaaggacgacagccagtccaatgccggcgcctatgccctcgtttacaaaccggcctttgaagctgatttgcacatagatgtgcatctcgtatccgctttactgcttaacctcggctacaggcatatttcgcgcgagaaggtggaaggaaacaaagtcgatgcggtcaacaacctctatgccggcggcagctacgaattctttaaaggcatatccgtttacgcccgcataaacaatttattaaaccaggattatcaatattattggggataccccaccgaaggcatcaactttaccggaggtgtaagttttaaattctaatagccaaaatcaaagatataaccaacaaaataggtcatttttgctaaattctccttatattataaggtggaaagtttgttttttcctacttttgcgggcaaattagtggctggagtcactataaaacagaaatttatgcagaaaaaccttgtcattgtcgagtctccggcaaaagctaagactatcgagaaattcctcgggaaagactataaagtcctttccagttacgggcatatacgcgatttgaagaaaaaagagttcagtattgatattgataaagatttcaaaccgcattatgaaattcctggagataagaaaaaggttgtagaagagttgaaagccgaagccaaggaagcggaaaccgtatggttggcatccgatgaggaccgcgagggagaagcgattgcatggcatttatacgaagtgctgaaactgcaaccggagcataccaagcgtatcgttttccacgaaatcacccaaagcgccattctgaaagccatcgagcaaccgcgcaatatcgacatcaatctggtagatgcccaacaggcgcgccgtattctggaccgtatcgtaggttttgaactttcacccgtattgtggaaaaaagtgaaacccgcactctctgccgggcgtgtgcaatcggtagcagtccgccttatcgtagaacgcgagcgcgagatacaggctttccaatcggaagcatcgtatcgggtgaccgccgtattcctcgtgcccgatgccgacggcaaaccggtggaaatgaaagccgagctgtcgcgccgtatcaagaccaaagccgaagctcaaaaatttctggaaagctgccggtcagcctctttcaccatccatgacatttctacccggccactgaaaaaaagccctgccgctcctttcactacatctactttgcagcaggaagctgcccgcaaattaggatttacagtagcacagaccatgatggtagcccagcggttgtacgaatcgggaaagataacctatatgcgtaccgactccgtcaacctgtccgaactggcggtcaacagcagcaaagcggtcattgccgacatgatgggagagcgctatgtatatccgcgtcatttcgccaccaaaaccaaaggcgctcaagaggctcacgaagccattcgccctacgtatatggaaaatgccaagatagaaggtactccgcaggaaagaaaactgtacgacctgatatggaagcgcacgatagcctctcaaatggcagatgcggaagttgagaaaacgaccgtaagcatcggcatcagcaacgaagcggatacgttcaatgcaaccggagagattgtaaaattcgacggtttcctccacgtgtatcgcgagtccatcgacgaagacacggagcaggaggatgaaacccgtctgctgccccctttgaagaaaggacaagtcttacaccaccaaagcattattgctacggaacgcttcacgcaacatccgccccgttacaccgaagccagccttgtacgcaaattggaagaactgggtatcggccgtccttccacatacgcccctaccatttcaaccatacagcaacgcggctatgtggagaaaggcgaaaagagcggggaagagcgctcttacaacatactttcattgcaggacagcaagattacggacgttacgcaaacagaaattacaggagccgaaaaagccaaattgatgcctaccgatacaggtacggtagtcaatgatttcctgatggaatatttccccaacatcctcgactataactttactgccagcgttgaaaagcagttcgatgagatagccgaaggagaaaagaagtggaccgccatcctgaaggatttctataaagatttccacccgtccgtggaaaacacgcttgccaccaagaatgcccacaaggccggcgaacgtatcttaggcgaagaaccgggcagcggcaaacaggtatccgtaaaaatcggccgtttcggtcccgttgtacaaatcggtactgccggagacaacgaaaagccacgctttgcccaactcaagaaagatatgtccattgagacaataacactggaagaggctttggaactgttcaagcttccccgcaccttgggcgaatatgaaggcaagacagtaaccataggaaccggacgctacgggccttatgtacacaacaacggaatgtatacttcgcttccgaagacaatagatccgctggaaataacattggcagaagctattcagctcatccgggaaaagaaagatgccgaagcccagaaacatatcaagaaatttgaagaagaaccggagctggaaatattgaacggccgttacggaccgtatatttcttataaaggcagcaactacaaaatcccgaaggacattatcccgcaggatttaaacctggatgcatgcagggaaatcatcaaactgcagagcgaccccgatgcaccgaaagccaaacgcggcaaatacgccaagaagaaaaagtaaagaagccataaaaaaagaaagccctctccgcaaattgcaaagagggctttttcatatgataaaatatctcgattacattctgtcgggaacctcaatgccaagcaatcccattcccaaacgtaccaccttggctacattctcggacaaggcaagacggaatatcttcacagcctcattctcctcacgcaatatgctgaagtcatgatagaactggttgtattccttcacgaggtcgtaagtatagttagcaatcaaagaagggctataatcctcacccgcctgcttcacaatagcggcaaagtctgcaaccatctgtatcaggccttcctctttctcactcaattcaataccggccggaagttgtgcaggaacggaaatacctgcttctttcgctttacggagaaccgactggatacgggcatacgtgtactggatgaaaggtcctgtattaccattgaaatcgatggattccttcggattgaacgtcatattcttgcgggcatccaccttcaatatgaaatatttcaatgcgcctaaaccgacaatgcgtgcaatattatcagcctcctcttgggtcagaccatccagcttgcccaattctccggaagtttccttagcggtattaatcatttcagccattaagtcatcggcatccacaaccgtaccctcacggctcttcatcttaccttcgggcagttccaccataccgtaagagaagtgaaccaaccctttgccccattcgaagcccagcttatcaagcagaatggaaagcacctggaaatggtagttctgctcgttgcctaccacatagaccatcttgttaatggggaaatcggcaaagcgcaatttggccgtacctatatcctgggtcatataaacagaagtgccgtcggcacggagaagcaatttgtggtcgagcccctctccggtcaggtcggcccatacggaaccgtcttctttgcggtagaagaagcctttctccaaaccttccataaccttctccttgccctccagataagtttccgactcgtagtaaatcttgtcgaacgtaacgcccatcatacggtaggtctcatcgaagcctgcatatacccaatcattcatcttcttccacagagtacggacctcagggtcgccggcttcccacttcaccagcatctcacgcgcttctttcatcaagggagattccgcttcggcttttgccttggcctcttcttcgctcatgccttcactctggaacttcgccatcagctcttttacctcagccttataatgcttgtcgaaagccacataatagtcacctatcaaatggtcgcctttcttgccggacgattcgggagtttcaccgttaccgtacttctgccaagccaacattgacttacagatatgaataccgcggtcgttcactatatttgtcttaaccaccctgttgccattggccgagatgatattcgccaacgcattgcccaacagattattacggacatgtcccaaatggagcggcttattcgtattgggcgaagaatactcaatcatcaccagcggagcgttatcggttgcagcaacaatgccgtactttgcatccgcatgaattccattcagcaactcaatccatgccgaagaagcgattgtcaggttcaaaaagcccttgataacattgaatgccgataccgacggctcgtttgcctgcagatattcgccaatctcctgtgcggtctgctccggtccttttttagacatacggagaaaagggaaaacgaccagggtaaggtgtccctcaaattctttcttggttttctgcaactgtatctgtgcagccggaacatcctgaccgtacagcgctttcagtccgctcattacggacgctaccaacttctgttctatattcatgattcaaatgtattttctgcgtacaaagatacgaactatttttaattccataaaaaaggagacgttgtatgcgcctccttttctcaagttttatttatgattgattttattcgatagtcaattccgaacccggtttgaacttagcgacttttttcgcctcaatctgaataggtttctttgttgccggattgatgccaatgcgtccggctctctccattacagaaaaagtgccaaagccaaccaatgcgactttatcacctgcctttaatgcttttgttaccgatgcaataaatgcatccaatgctctttttgaatcggcctttgacaaaccgccttccgctgccattgcgctaataagttctgacttattcataatacgaatgattaattaattgttacacaaaagaaaaattccaatgctacttcctacaaaaatagagcaaaaattctgaatatcaaataaaaacattaaaaaaagggcggaaaacagagaaaaagaaagaataggagttcctttttctgttatagaacagaatttattcgtatttttgccaaataaagcgaaaaaaacagattatgaatactataccgacagtaaccaaaaaccttttaatcatcaatgtactgatgtttctcggcacaattgtggcacagagttacggcattgatttaaacaactacctgggactgcactttttccttgccggagatttcaatgcagcacagttgattacttatatgttcatgcacggcggatttacccatctgttcttcaacatgtttgccgtttggatgttcggccgtatactcgagcaggtctgggggccgaaacgcttcctgttctactacctcgcatgcggcatcggtgcagggcttatccaggagcttgtacaatacatccattacgaaacggtgctttccgcatacgacagtgtcaataccgggtattccatcatccccatggaagaatatctcaacatgatgactaccgtcggagcctccggggccgtatatgccatcttgctgggattcggcatgctgtttcccaaccaaccgatgttcgtctttccgctaccgtttcccatcaaagccaagtatttcgttatcggatatgccttgatagaattattctcgggacttgccaacaatccgggcgacaatgtggcgcactttgcacatttgggcggtatgatattcggattcattctaataatgtactggagaaaaaaggacagaggaaatggctactattataactgatttaaaggaatcgttccgtagaggaaacatctacatccaactgatttatatcaatgtaggagtatttatcttcactacactgacaggagtcatattgcagctcttcaaccggagcctcggcggagtgttcgaatggctggaactgcccgcttcactgccccgcttcatcatccagccctggtctgtcctgacgtatatgtttatgcacgcaggagtcctgcatattcttttcaatatgctttggctgtattggttcggtgccttattcctgaactttttctctgccagacacttacggggagtatacatcttaggcggaatctgcggcggactgctttatatgaccgcctacaacatcttcccttatttccgtccgatgacggaatactctttcatgctgggagcatcggcatccgtactcgctatcgtggcggctaccgcctatcgggaacctgactacccgatacgtcttttcctttttggaaccgtacgcctgaaatatctggcattggttgttatcgtaacagacctgttattcatcacctccagcaatgccggcggacatatcgcccatttaggcggagcgttggcaggtctgtggtttgcagccagccttagcaaaggcgcggatatcactgcatggattaacaagtctctggacgctgtcactgccttgttcagtttcaagccccgcaagcccaagatgaaggtccattatggaaccgaaagacagaaagattataactataacgcccgaaaaaaagctcaatccgatgaaatagaccgtatcctcgacaaattgaagaagtccggatatgaaagtctcacaacggaagaaaagaagagcttgttcgatgcaagtaaacgataatgtatgtatgaagcatttcggtaattttatcgccctgctgattgtagcggtcaatgctttattcacgggtcttttgctgttggtggcatacagtccttacatccaaccggcaacgcatccggtacaatcctgtctcggactgacctttccggtctttgcacttatcaacggcggctttctgattttctggctggttatacaacgatacaagacagctttgctgccgttaaccggccttctgttatgctactcgcagctacggacctatctgccccttaattttcacaccaccgagcttcccgaaggcagcataaagctcctgtcttacaacattatgggttttgacggtgcttacaaaaaagacgggaagaatccgatactcacctatctgaaagagagcaatgccgacatcctatgcctgcaggaatatgcatccgacgaatctccccgccacctcacgcagaaagacatcgaacgggagttgaaagattatccctaccgccgtatcaacgtcgtaggcagcggcagcggctataccaacaggatagcatgttattccagatttcccattctatccgcacgtgtcctggactatgcaagcagctacaacggttccgtactgtatgaactcaaactgaatgaagatacgattacccttatcaacaaccatttggagtccaacaaactgacaaaggccgataaagacatttacgaagaaatattgaaagctcccgaaacggaaaaagtgaaaagcggcgcacggctgttgctgcataaactggcggaagcatccgccatccgcgccccgcaggcagacaccattgcacgggagataacatcttcccggcatccgtccgtcatcgtctgcggagatttcaacgacactcccatttcatacgcccaccgcgtcatagcgcaaaatctggatgacgctttcacccagtcgggacgcggactgggaatctcctacaaccagaacaaattctattttaggatagacaacatattaatcagcaagaacctgcggtcgtacaactgtacagtagaccgttccataagagagtccgatcactatccgatatggtgctacatagccaaacggcaatgacgttccctgccaagatgaaattatcaataaactactcattatctaatactctgactttatgtttaaaagaagtattctaattttagctgcaagttgtatgatgtactcctgtgccaaccaaacggaaagcaatccgttcctcaccgagtttcaaaccccgaacggtgttccgcctttcgacaaaatcaggctggaacactacgaaccggcattccttcagggaatagaagagcaaaatgccaatatccgggctattgtcgacaataccgaagcgccggattttgaaaatgtaatcgttgcttttgacaacagttcacccatactcaaccgggtaagcgccatcttcttcaacatgacggatgccgagaccagtgacgccctgaacgaactttccataaagctcgctccggtactgtccgaacatggagacaatatatcgcttaaccaggcgctattcaataaagtacaggccgtttaccagaaaaaggattcgttaaacctgaccaccgagcaacaaagacttctggacaaaacatacaaagatttcgtacgttccggcgccaatctttctgccgaaaagcaagcccgcctgcgcgagataaacaagcagctctccacgctgggcatcactttcagcaacaatatcctgaacgaaaacaatgagttcatgctctttgtagacaagcaggaagaccttgccggacttcccgaatggttccgccaaagcgctgccgaagaagcaaaagctgccggacaggaaggcaaatggctgtttacgctgcacaacgccagccgtctcccgttcctgcaatattcagccaaccgtccgttgcgcgagaaaatatacaaagcttacatcaaccgcggcaacaacaacgacaagaacgataacaagaaaatcattaccgacatcgtcagtctgcgtctcgaaaaagcccgcctgttaggcttcgactgctattccaacttcgtactggacaatacgatggcaaagaattcggccacagtaatggagttcctgaacaacctgtggaattatgccctgcctaaagccaaggccgaagctgccgaactccagaagctgatggacaaagaaggcaaaggcgagaagctggaagcctgggactggtggtattataccgagaagctccgcaaagaaaaatatgacctcgaagaggaccagatcaaaccctacttcaaattggagaacgtacgcgaaggcgcttttgccgttgccaacaaactctatggcattacgctgacaaaactcaacaatattcctgtctatcatcccgatgtagaagtcttcgaggtaaaagatgcagacggctcgcaactgggcatcttctacgtagactacttcccgcgtcccggcaagagcggcggagcatggatgagcaactaccgcgaacagaaaggcgacatccgtccgttggtgtgcaacgtagccagcttcaccaaacccgttggcgataccccctccctgctcacaatggatgaagtggaaacccttttccatgaattcggtcacggactgcacggactgctgaccaaatgcaactacctgggcgtttccggcacgaatgtagtgcgcgatttcgtagaacttccgtcacaaatcaacgaacattgggccactgaacccgaggtattgaagatgtacgccagacattaccagaccggcgaagtcatccccgacagcctcatcgaaaagatactgaaacaaaagactttcaaccagggtttcatgaccaccgagctgctggcagccgctattctcgacatgaacctgcacaacctgacggatacgaaaggtatcgatgtcgtagcctatgaaaaagaagctatggaccaactcggtttaatccccgaaatagctccccgctaccgcaccacctatttcaatcacatcataggcggttatgccgcaggctattacagctatctgtgggcaaacgtgctggacaacgatgcttttgaagcattcaaggaacacggcattttcgacaaggcaaccgccgaccttttccgccgcaatgtgctggaaaaaggagacagcgaagacccgatgacactctacaagaatttcagagggtcagaaccgcaattagagccgatgttaaaaaatcgcggtatgaagtaagaattgtgaaaaaaaagctatatttgcagccttatatacaatagaaatcaattaaaaagtaatcataataaactaaaagtaacatgcaaaacaaaggatttgtaagggtttttgcgatattgctcacactggtgtgtgtgttctatctctccttctcttttgtgacccgccattacgcccataaggctaaagagttcgcaaaaggcgatgtgaaagtagaacaggactacctcgattctctgtcaaacgagaaagtgtggttcggcaattggacgctgaaacaatgtcgtgaaatggagatcagtttaggtttggacttgaagggtggtatgaacgtcatcctggaagtgtcggtacccgatgtcatcaaggcattggcggacaacaagtctgacgaagcattcaaccaggcactggccactgcggcaaaacaggctactaccagccaggacgacgttatcacgttgttcatcagagagtatcacagaatcgctccggatgcttcactctcacaactgttcgctacccaacagctaaaggacaaggtaaaccagaaatcttccgatgcagaagttgaaaaagtattgcgcgaagaagtaaaggcagccgttgacaactcattcaacgtactccgtacccgtatcgaccgctttggtgtggttcagcccaacatccagagcctggaagacaaaatgggacgtatcatggtggaacttccgggtatcaaagagcctgaacgtgtaagaaaattgctacaaggttctgccaacctggaattctgggaaacatacaacgcaaaagacgttgcttcgtacctgcaatcggctgatgccaaattgcgtgcaatcctggctaccacagaagacgcagcagaagcaacagacagcgtagctgccgaagctcccgccgtagcgcaagctaccagcactaccgacagccttgccgcagcactgaaaggtgaaagcaaaacacaggctgccgaccttgagcaaatcaagaaagaacatccgctgctggcagttcttcaggtaaatcccagcggtcaaggccctgttgtaggttatgcaaactacaaggataccgctgatatcaacaaatacctctccatgccggaaattcaggctgaaatgccgaaagacctgcgcctgaagtggggtgtttctccttttgaatacgacccgaaagcacagactttcgaattgtacgccatcaagtctaccgaacgtaacggacgcgctccgctggaaggtgacgtagttgtaaacgccaaagacgaattcgaccactatggcaaacctgccgtaagcatgtctatgaatacggacggtgcacgccgttgggcacaactcaccaaacagaatgtaggtaaagccatcgccattgtactggacggctatgtatactccgcaccgaacgtaaatcaggaaatcaccggcggtaactcacaaatcaccggtcacttcactcccgaacaggcaaaagacttggcaaacgtattgaaatcaggtaagatgccggctcctgcccacatcgtacaggaagacatcgtaggtccgtctttgggacaggcatccatcaacgccggtatcatgtcattcgttgtggcattgattctgttgatgatttacatgtgctccatgtatggtttcatcccgggtatggttgccaacggcgctctgatattgaacttgttcttcacgctgggtatcctctcatccttccaggccgctctgacgatgtccggtattgccggtatggtactgtcgctcggtatggctgtggatgccaacgtattgatttacgaacgcaccaaagaagagttgcgtgcaggtaaaggtgtcaagaaagcacttgccgacggttactccaatgctttctccgcaatcttcgactctaacctgacatctatcatcacaggtatcatcctgttcaacttcggtaccggtcctatccgcggttttgccacgacactgattatcggtatcctgatttcattctttactgctgtgttcatgacacgtttgttctacgagcacttcatgaacaaagacaagttgctgaacctgacattctctacgggaatctccaagaacctgatggcgaatgtacacttcgacttcatgggcagaaacaaactctggatgacgctggcaggtgtagcagttgtagtttgcatcggcttcctcagcatccgcggtttgagccagagcatcgacttcaccggtggacgtaacttcaaggtacagtttgagaacaaggtagaacccgaacaggtacgcgaattgatttccagcaagttcggcgatgccaatgtcagtgtcatcgctatcggtgctgacggcaagaccgtacgtatcagtaccaactaccgtatcgaagaagaaggtaacaacatcgactccgaaatcgaagcatacctgtacgaaaccctgaagccgttgttgacccagaatatcacgctggaaaccttcatcgaccgtgagaaccatacgggcggcagtatcatcagctcacagaaagtaggtccgagtatcgcagacgatatcaaggtatccgctatctggtctgttgtgctggcactgattgctatcggtctgtacatcctgctccgtttccgcaacattgcctactctatcggttccgtatgtgcactggcctgcgacacgattatcattttgggcgcctactccatgttctggggcatcctgccgttctctttggaaatcgaccagacgtttatcggtgctatcctgacggctatcggttactcaatcaacgataaggtggtaatcttcgaccgtgtacgcgagttcttcggtctctatccgaaacgcaacaagaaagtattgttcaacgattcactgaacacgactctggcacgtaccatcaatacctcactgagtacgttgattgtattgctgtgtatcttcatcctcggtggtgattccatccgcagcttcgcgttcgccatgattctgggtgttgtattcggtacactgtcttctctgttcgttgcatctcctatcgcttacatgctgatgaagaacaaaaaagatacagaacaggcagtagctgttgaagaagcaaaataattcctattatataaataggataaaaataagagaaagaggaaatcccggtctgacggggtttcctctttctcttttctacagaattttacggatactcctctacagcagcaggaagttccgcacaaaaaaaaggacgtccgtatcataacagacatcctttcgtagctccgaggggaatcgaacccctatctaaagtttaggaaacttctattctatccgttgaactacagagcctttttgcatacattcggcatatagcgatgaaatgcgggtacaaagataatgtattctgctgattttccgaaaaaagttttgttaatccgattaactttacgaaatttgtctttgaacaaaataagtataagtttccttatataatacatataataattcgtaagttatggcaaacgacatgatggtcaaagaactggagcaagtggtagtccgcttctccggagactccggcgacggtatgcagctcgccggcaacatcttttcaacagtttcggctacggtaggtaatgacatcagtacattccccgattatccggcagacatccgcgccccgcaaggctcactgacgggcgtatccggttttcaggtacatatcggtgcaaacaaagtctatacccccggtgataaatgcgatgtactggtagcgatgaatgccgctgcgttaaaaacacagtataagtttgccaaatctaccgcatgtattatcatcgatacggacgcattccagaaatcggatttggaaaaggccgctttcaagacggacaaccccattgaagaaatgggcatcaaacaggatgtcattgccgctcctatctcccaaatggtgaaagactgccttgccgacacgggtatggacaacaaatccatgctgaagtgccgcaacatgtttgcagtgggactggtatgctggctgttcagccgcgacctgacgatagccgaagagtttatccgcgagaaattcgccaagaaacccgaaattgcagaagccaatatcaaggttatccgcgccggatacgactacgggcacaacacccacgcatccgcctctcacacttacaagattgaaagcaaagtaaagactcccggacgctatatggacattacgggcaacaaggccacggcctacggcttcatagccgctgccgagaaagcaggcctgaagctttacctgggttcttaccccatcacccccgcaaccgatgtgctgcacgaactttccaagcacaagtcactgggcgtaatgaccgtacagtgcgaagacgagatttccggttgcgcctccgccgtcggagcatcctttgccggagcattggcggttacctccacctccggaccgggtatctgcctgaaatcggaagccatgaacctggctgtcattatggaactgccgctggtggtgctcgatgtacagcgcggtggccctgcaacaggcctgcccaccaagtccgagcagaccgacttgctgcaagtactcttcggccgcaatggcgaaagccccatgcccgtacttgccgccacctcaccgacagactgctttgaatgcgcctatatggcatccaagatagcattggagcacatgacccccgtcgtactgcttaccgatgctttcgttgccaacggctcggcagcgtggaaactgcccaagcttgccgattatcccgctatcgttccgccttatgtacgccccgaaatgcagggttcatggacaccctaccagcgcgatgaaaagaccggcagccgctattgggccatccccggaacagagggcttcacccacatcctcggcggattggagaaagacaacaagacaggcgccatctctaccgaccctgagaaccacgacctgatgacccgcctgcgtgccgaaaagattgccaaaatcgaagtgcccgatgtagaagtggaaggcgacaaggacgatgccgaactgctgattgtcggcttcggcggcacttacggccatctgcacgccgctatggacgaactccgcgccacaggcaagaaagtggccctcgcccacttcaagttcatcaatccgctgcccaagaatacggcagaggtgatgaagcgctacaagaaagtagtggtggccgagcagaacatgggacagtttgccggatacctgcgcatgaaagtagacggtttcgttccctaccagttcaatcaggtgaaaggccagcccttcctggtgaacgagttagtacaagcatttgaggagattatcaagaactaaaaaagaaaagaactatgtgcgaatatacagcaaaagatttcaagaaagggcaaccccgctggtgtccgggttgcggtgaccattttttcctcgcgtccctgcataaggctatggccgaaatcggcgttccgccttacaaaacagcagtaatctcaggtatcggctgttccagccgtctgccccactatatgaatacctacggcatgaacaccattcacggacgtgccgctgccattgccaccggttgcaaggttgccaatccggaactcaccgtatggcaggtgagcggcgacggcgacggactcgccatcggcggcaaccacttcatccatgccaaccgccgcaacatcaacctgaacatgattctgctgaacaaccgtatctacggcctgacgaaaggacaatactccccgacgtctccccgcggtttcgtcagcaaatcatctccttacggtacggtagaagacccgttccatccggcagaactctgcttcggtgcacgcggccacttctttgcacgagccgttgccacggatgcagccggaacggtggaaatcctgaaagccgcctacaaccacaaaggagccagcgtctgcgagattctccagaactgcgtcatcttcaataacggcacgcacgatgccgttgccaagaaagaagaccgcgccaaacacgccatctatctggaacatggcaagcccatgctcttcggcgagaacaacgaatacggactgatgcaggaaggcttcgggctgaaagtggtgaagctcggcgagaacggcattacggaaaaggatattcttatccacgacgcccattgcgaggacaacaccctgcaactgaaactcgccctgatggaaggccctgacttcccgattgccctcggtgtaatccgcgatgtggaagctcccacctacgatgatgccgtacatgcacaaatcgaagaggtatccgccaagaaaaagtaccacaactttgaggaactgctgatgaccaatgatacctgggaagtgaaataacctccacggaacaggaattcagtttacacacattcccccttcaccctccacatccctttatccataagggacagcgggtgaagggggctttttatatcccggttggcagcaaagaaacaagcggcatcagctctccaaaggcagaggcaaaataccgatatgcctcagcataaaggtgacaatacactgtataaaaacccgttgtgcatctactaaaaccccgttttccaactgcgggccgtgcggttgccaattgcgggccggacagcccgcaaccggaaaacgaagaaatacataagggacaagcacattttacaaggtgcatcgggaagttttccactaggcattggcacattatacccgggagattgccccgctcacacgcggtataatcctattttccacacggtcttccggatgcaggcacaaagtataatccgccggaaaaccgccggaataagatgcaaacgccacaagtgtggaatagcaacctgcaagtgtggattttttccacaacattccacaacctgcatacacatattataagtatttataaaaaaacaatgaactgaatatcataggtataaatacttcgcatagtctacatatcttttttggcatactgcttgcttataacaaatacaaataaattccaacagatttaattgtacaaggaaataatcattgtggaaatatgaagtctatcaagaaaaaacggagtatggcttcgcacaggaagctgcattttcaaaaggtattaggtagtatgattgtggcattggcgcttctgtttgcaggaagtgccggtgcgcaggaaaccaaaacaatcaaaggtatggtaagggatgtgacgggagagccgcttatcggcgccagtgtcatagagaaaggaaccaacaacggtgtcattaccgatgtggacggaaactttacactgaccgtgcctgccgatgcaacgctgtccatagcctatatgggctatgccacccgcgaaatacatctggcaaaacgcaagaagcagggcgacctgagggtaacgctgagagaggactcgcaacagttgaaagaggtggttgtcacggctatgggtatcaagaaggataccaaacggctgggttacgcggtgagcactatcgaatcggacgagatagtgaaggcgggagcaaccaactttgcatccgccatgtacggtaaggcgccgggcatccgcatcacgcagacgcagggcggttccgccggagccgtgtctatcaatgtacgcggactcacgtccatcaccggaaacaaccagccgctcatcatcctggacggcgtgcccatccgcaacggcggaacgggcaagagtaccgactttgccgaattcggcaacgacgggcagatacgttccaacggtctggtggacatcaaccccgaagatattgaaagcgtaagtgtgctgaaaggtgcttcggctacggcactttacggttcggaagcggcaaacggcgcggtggttatcaccagcaaacgcgccaaaagcggcaaactgacggtggacttcaccgcgcaggtcaccgccaacctgcccgcctatctgccgaaagtacagaccgtatacggcccgggacgttacaacacggaatacagcgattacgaaaaacagacgggaggtttctaccaacgcaccatgaacggcgaaagctacagaagtctgtataatacgaccatgtctttcggtccgaagtacgacggcagcgacgtgctgtactgggacggcaagatgcgcccctacctgccggctacggacaatccgtggaaagagctgttccgcacgggctggaaccagacctacaacctcgccatctcgcagggtacggagaccagcagcaaccgcttctcctacaccttcatgggtgaaacgcccaactcgctgacgggcagcttcaccaaacataacttcaagctgacgggttcttacaaaccggcaaggacgctgaacatagaatactcgctgaactacatcgtgcaggacgtaaaggaccgtccgcaaacatcgctgaacctgtacggcagtttcagcaacatgttctcctccttcatggatattccctatctgaaacagagctacgtcaccagcctgggctaccgcaacacatacgcaggcggcgatgccacactgacaccggacgaagcctgggcatacgacccgggatacctgaacggcgtatcgaatatgctctggaacatgtatcaccaccacagcaaggagacagagaaccgcctcatcggtatgatacgccccacctggcagataaccaactggctgagtctgcgcgcccagctctctaccgacatcacggataccaaacagacgctggagtacgagacggaacgccccaactccctgtacgatcccagcggcagtttccagaacatcaaccgacgttatgacatcgtgtacggcgatgtgatgctgaacttcaactacaacatccgccgtttcgacattgccgccacactgggctggacgggacgttacgaaaacatgaacaacatgcgcgtctccaccaacggcggtctggttacggaaaactggttcgacctcaacgccagccgctacaccgccagcagcacgctgcaacgtatggaactgctgaaaacgggatacatgggtacgctgagcctgggttgggacaactacctgttcctcgaactcaccgggcgtcaggaacgttcgtccacactgaaagaccaaagtttcttctacccctccgccaacctcagtttcctgttctcgaacgccttccgcatgcctgcatggtggaatcacggcaaactccgcctctcctacggcgtcgtaggtaacgcaccggaaacgtatgccgccaacatcatctacgagcagggttcggacaacggcttcacatggaactacgttccttcttcgtggggaaatgccaatatccgccccgaaaagaagtacgaatacgaaataggttttgaaagcaagttcctcaacaaccggctgggcttcgacgtatcctactacaacaaccgcgtgaaagaccagatactctccacaccgcaaccctccacatcgggtgtgaagtacgtgctgatgaacgtgggagaggtggccaacgaaggctgggacatctccgtaagcgccactccggtactgaccaagaatttccgctgggacctgacggccaactacggcatctaccgcaacaaggtcgtgaagctcgccgacggcgtaccgtacctcgaaatatccaacataggcggtggcggagccaagatacaggccgtagagggacgcccgatgggtgacatctacgtgcaagtgccccagatgaacgaaaacggagagtatctcgtatcggacaagggactttacatgaatcagaccgaactgcaaagagtaggaaacatcaaccccgacggcgtaggcggtctgttcagctcgttctcctacaagaacatcttcctggatttcagtatcgacttccgcataggcggcgacgtcatcaacgagatgtaccagtattccaccgcatcgggtctgacaccggagtcgctgcaattccgcgatacggaacacggcggcctgtcctactactatccgggcaacaacaacgccagcggcgtgcccgtgcaggtagacccgtcactgggtgcagggcctaacggagaaaccgtttatcacgacggcgttatcctgccgggcgtagtggcctccaccggcgagaagaacacgcgcatcatccctgccggctactattacaaccagacctacaactggggtacccagcccgaacagcttacgtaccgccactcggtattcgacaacagctatgtgaagctgcgcgagctgaccatcggctaccagtttccggaaaagctgatttccaaactgggcatgacgcggctgagcgtttcagtgttcggacgcaacctgttctacttctacaaggcactgaagaattacgatgcggaatcttccgtaggaacatcctgggcaagccaggcggtagtgggcggctccactacggcaacacgtaatttcggtgtgtcgctgcgggcaagcttttaggaaatagagaattgaaaaataagactttagagtgaatgacaatggatatgaaaaagataaatataggagcgttcgttatagcgggagccatgctgatgacagcttccggctgtacggactccgacttcgacagcaaatacgaagacccctcaaaggttaaccaggttaccatcagcaacctcatggtgggagttttccagaaagtgaaagattatgacatatatgagtacggacgtttcttcggcttcgactcgcagtttgtgggcaagtacgcgcagaccttcggctacagctattcgggcggtatgtacagccccggatatgcgcctgccatagacgggcaatgggacaacctgtattcggcactgatgcaataccgcaagatggaatcgctgtacaatgaagagaacgatacgcagaaagcacaggacgaagcctttatgctggcagccaaagtgcaactgtacgacttctttgccgcaacggtggatattttcggcgacatgcctttcttcaaagcatgcaccctgccgctgaccaacgacgtaaacggttcttacgctccctacgacaaggcggaagatatttataagacaatccttgacgagctgaaagacatcgccccgcgtttccgttcggcaaccgtaccgaaaaacttcagtacccaggacttcatcaacctgggagatatggagaaatgggaacgctatgcaaactccctgcgcctgcgccttgccatgcgtgtagccacgcagggagctttgcaggcggaaggacgtgcggttatcaaggagatattggaaaaccccgccgactatccgctcgtagaggagcagggaaacaacatcttcatcgtcaaccagaagtccgggcaactgaacttcaccgccggccacggattgggcgactgggttacgaaccgtcttgcttcgggcgccatcatagaccgtatgctgggccacggcaactatgacatgaccagcagcgatccgctaagcggcgtctacgtcaaaggcgaagacgacccccgcatcctgctgaactacaatcccgtgagcatcaccaaccgcgaaaccggacagatggacgaacaccgttacctgggtacggacctcacggtagcagacgagctgacggagtattacagcgctcaggcacaagacgaagtgaacaccgccaacaaaggtttctcgcagattacccaaagaggctttttctgggaaaacgataaattcgatatgctgataatggcttcgccagagatacatttcctgaaagcggaagcctatgccatggggtatggtgtggcgcaggatatggcgaaggcggaagaggaattcaagacggctgtcagccaatccatcgccctgtattactattacgattcgataggctcgggagagaattgccgccgttacgacgctcctaccgatgaagagattgcagactttgccaatgccaaatggaacagtacggcatacgtggacaaactggatgccatcatcacgcagaaatggctgcacttcggtttcctcgtcagccgtgaggcatggagtgacatccgccgcacaggctatccttcgggactggtgttcccggaagtgtcgggtactatccccaatgtgccgaaccgctggagataccccagcacggaagtgaactacaatccgtactataaggatgtagccggtacagacacgtatacggaaaagctgttctgggccaagtgaacaatgagagcgaagcgggaatggatatcctgatgcagtagcttgcaaacataaaagagccgtatcattactcacaaacggagttgatacggctctctttatggttcaatgaacagtgccggggttcggattggacggccgcaaccgccctgctgattacagcttgtcgccgaatgccaagtctccggcatcgcccagccccggtactatatacgaatgctcgttcatatccgggtcgatagcgccgcaccacaaggaaacctcgtcgccggggaagagtttctgcaaatgctctactccctgccggctggcaatgacgcaggcaatctgcagtttggcaggcgtgcccttggtaaggaaagccttccaggcaagttccatgctttcgcccgtagcaagcatcgggtcaaccagtaacagagtcttgccggaaaggtcgggagtggcgatatactcgatgtgcacatccaccgtacggcactctttatccttataataacggtaagcggaaacgaaagcattgcccgcacggtcgaacacattcagaaaaccggtatgcaagggaagcccggcacggaagacggtggcaatcaccacatcatcatcgaaagtgctgacgggggctatccccaacggcgtttgtacctgcttttcggaataggtgagttccttactcatttcgtacgccatgatttcgccgatgcgttcgatgttccggcggaaacgcatacggtcggactgtacttgcacatcacgtatctccgccatgtattggttcaagactgagttagtctcggcaaagttgataactttcattatattatcagattaaaatatgtattggttattccgtatattgatagaacagaagtgcaaagtaaacgatttccactcaatttgcaacattcagtttgcagatattgttacggttctataaaagatttcctattacagaaaaatttctctaataggatgtttctttaaaaataaagtattacttttgtagtcgcaaaaacaagggccttactgaacaacgcggttttccacaaactcgcccccttgcaatgaagcatacgaatgcgaagagagattataaaccaaataccaattttaaaatcttaaaaagaaatggcaaatttagatttaagcaagtacggtatcaaagacgtgaaggaaatcatccacaacccgtcttatgatgtattgttcgctgaagagaccaaaccgggtctggaaggcttcgaaaaaggtcaagtaactgaacttggtgctgtgaacgtaatgactggtatctataccggacgttctcctaaagataaattctttgtaatgaacgaagccagcaaggattctgtatggtggacttcagaagaatacaaaaacgacaacaaaccctgctctgaagaagcatgggccgacctgaaggctaaagctgtaaaccagctgagcggcaagcgtctgttcgttgtcgatactttctgcggtgctaacgaagctacccgcatgaaagtgcgtttcatcatggaagtagcttggcaggctcacttcgtaactaacatgttcatccgcccgactgctgaggaacttgctaactacggcgaacctgattttgtatcattcaacgcttccaaagcaaaagttgacaactacaaggaactgggtctgaactctgaaacagctactgtattcaacttgaagaccaacgaacaggttatcctgaacacttggtacggcggtgaaatgaagaagggtatgttctctatcatgaactacaagaacccgcttcgcggtatcgcttccatgcactgttctgccaacaccaacatggaaggtacggactctgctatcttcttcggtctgtcaggtacaggtaagactactttgtctaccgacccgaaacgtctgctgatcggtgacgacgaacacggatgggatgacgaaggtgtattcaactacgaaggcggttgctacgctaaggttatcaacctcgacaaagaaagcgaacccgatatctacaacgccatcaaacgtgacgctctgctggagaacgtaactgttgacgctgacggcaagattgacttcgccgataagagcacaactgaaaacacgcgtgtttcttatcctatctatcacatcaacaacatcgttaagccggtatctaaaggtcctcacgctcatcaggtaatcttcctgtcggctgatgccttcggtgtattgcctccggtatctatcctgaaccccgaacaggctcagtactacttcctgtccggtttcaccgctaagctggccggtacggaacgcggtatcactgaaccgactccgacattctctgcttgcttcggtgctgctttcctgagcttgcatcctactaaatatgcagaagaactggttaagaagatgaacaaggtcggcgctaaggcatacttggttaacaccggttggaacggtagcggcaagcgtatctctatcaaagatacacgtggtatcatcgacgctatcctcgacggttctatcgacaaggctccgacaaaggttattccttacttcgactttgttgttccgacagaattgccgggtgttgatccgaagattcttgatcctcgcgacacttatgaatgtgcttgccaatgggaagaaaaagcaaaagacctggcaggacgtttcatcaagaacttcgctaagttcacaggtaacgaagccggtaaggctttggttgctgctggtccgaaactctaatagaaccagattatatattttaaggcggctttcgttctcggaagccgctttttttgttagatttgcgaagaaacaatttaatagacaacagagaatgaagagtgtaaaggttatgctgttaggcgcaagcctattgatgctgtccgcttgcgggccgcaggtacagaaagagagtgaagccacagttacggagaaaagcaattcggaagcgataatcgagacaatcctatcgcgccgcagcgtccgcaagtacaaaccggaagcagtgaaccgggacacgatgaaggtaatcttggagtgcggcatcaacgcccccaacggtcagaacaaacagtcctgggcggtacgcgtagtagacaacccggaattcctgaacggggtaagtgaaatcttcaagcagaagaacccgaaagcagcggaagaccccaatttcaagaatatgttccgcaatgcgcccacggtagtgttcatcggaaatgatacttcgtacgactgctcgcagatagactgcggactgctgggtgagaatatggtacttgccgcctggtctatgggcataggctcctgctgtctggcaagccccacacgctttatgaccgatacgcccgaagctgccgaatacctcaaaagactggaacttcccgaaggataccggctgctttactgcattgctttcggatatccggatgaaacgcctgccgccaagccgagagatgccgccaaagtgaaatacgtagactgaccgataaaataaaaacttcagaatccccccattgcaataaaagaaggagtgctccacctttacagcgaagcactccttcttatatataacaactaaaaagtaaaatcagttcttattggcacgcttgcgctctgtctcatccaagataaccttacgcatacgcatggacttgggagtaacctctacatactcgtctcccttgatatattccaacgcttcctccagagagaactgtaccggcggaatcagacgcgctttctcgtcggaaccggaagcacgcatgttggtcagcttctttgatttggtaacgttcaccacaaggtcgttatcgtgagagtgctcgcctacaacctgtccggcatacacttcttcctgcgggaagatgaagaacttaccgcgatcctgcaatttatcgatggcataggcaaaggctgtacccgactccatggcaatgatggaaccgttggtacggcgttcgatttcacccttatagggttggtattccttaaagcggtgcgccatgatagcttcaccggcagaggcagtcagcacattggtacgcaaaccgataataccgcgcgacggcatattgaactcaaggttcacacgctcgccggcgctttccattttcaccatttcacctttacgacgggttaccatatcgataatcttgctggcatactcttcgggaacgttgaccgtgagctcctcgataggctcgttcttcacaccgtctatctccttgaagataacctgcggctggcctacctgcaactcatatccctcgcggcgcatcgtttcaatcaacacggaaaggtgaagcacgccacgaccggaaaccacccactttccgtcttcctcgctcttgcgtacgcgaagcgcaaggttcttgtccagctccttcatcagacggtcatgtatatggcgggaagttacaaacttaccttctttgccgaagaacggagagtcgttgatagtaaacagcatactcatggtaggctcgtcaatggcgatgggcggcaatgcttcggggttctcgtagtcgcaaatcgtatctccgatttcaaacccttcgatacccactaaggcgcagatatcaccggaagatacctccgataccttcacacggcccataccttcaaacgtatgcagttctttaatcttcgacttgacgattgtaccatcgcgctttgccaaagacacgttcatgccttcccgcaaagtaccgcgatgtacacggcctacggcgatacggccggtataagaggagtagtccaatgaggtcaccagcatctgcggcgtaccttccaactgtgtaggagcgggaatgttctccagaatgcagtccagcagcggatagatattgtccgtcggcttctgccagtccgtgctcatccagttgttctttgccgaaccgtagataacggggaagtccaactgctcttccgtagcttccagactgaacatcaggtcgaacaccatttcatagacttcttcggggcgacagttgggcttgtccaccttgttgactacaacaataggtttcaaaccgatctgcaaagctttctgcaatacaaaacgggtctgcggcatcgggccttcaaaagcatccaccaacaggatacatccatcggccatattcaatacacgttccacttcgccaccgaagtcgctgtgtcccggagtatcgataatattaattttcgtgtctttatagctgatagaaacgtttttggaaaggattgttatccctcgctcacgctccaaatcattgttatccaacattaattcacctgtgctctggttgctgcggaaaaggtttcctgccagaagcatcttatctacaagcgtcgttttcccatgatcgacatgggcaataattgcaatgtttctaatattttgcatataatacctattatttgaccgcaaaggtacgaattttacagtatatacatcacagagaaaagatttttttgctgaatatcattgcaatataaaagataatatctatctttgcacgctcgaaagagaaaagaattatcaactttttaattaaacactatgtatttagacgctgctaaaaagcaagaaatcttcggcaaatacgggaagtctaacactgatactggctcagcagaggcccagatagctttgttttcataccgtattgctcatctgactgagcatatgaagctcaacagaaaggattatagtacagaaagagccttgacaatgttggtaggtaagcgccgcgcgctgttgaactacctgaaagaccgcgacatcaacagatatcgtgccattgttcaggaactcggcttgcgtaagtaatttacttgcggtaaacttattaaagcggcggtattttccaatgagaataccgccgttttacttttatcactgtcttccctgtacaggggttttaaaagcctattacaattgtaccttatagagtacgtgctctttcagcagatgcccgtcgggcactgcagggtgcataaaattcttttcaaattccatccctatcttctgcatcacccgttgcgaacgtttattggtcagcgaagtaaaagcccggaccatagaaaacggaagattctccttggcataagccagacatgacttcgctgcttcggtagcatatccccggccccaatattcctgccttaatcgccacagtatctcaatacccggagcaaagtccacatcaaacataaagttatgaaagcccgtaaaacccacaaaggctccatcggacttctgctcgatggcatatccgccatatccgtactgaagaaactcgttcctgacagtatcaaaaagattgcgcgactcttctccggacaaaggatgcagaaagaactccatgacagacggattcccgttcatctctgcaaaaggaacgaagtcttcttctttccaatcgcgcaatatcaaacggggagtttcaatatataccatacttaataatctttattctcatacaaaaatactgaatccgttttacttctcaaaaacattctctttatctttgttgatacctaaaaccaaacaacgatgaaaacagctaaattaattctattatgtttgtcgggaatgcttgccatgcagtccgcaacagcacaaagccggagtgaaaagaaagcacagaccgaacgtaacgtcagggaagcgataaatgccgatcactacaaaatcaacgtagactatatgcaacccatgaaaggtcgcagccgcgccctgacatccgactactccatcgaaatcaggaatgactccgtcttttcttacctgccctacttcggagtggcatacaatgtaccttacggcggcgggaagggattgatatttaatgccccgataaccggatacaggaaagaaagcctcaaaaaaggaaaaacccggattgatttcaaaaccggcaacgaggaagataaatatgaatacagccttactatctattccgacggttcggccaacatacatatccagccgatgaacagacaggccatttcatactccggagagttggatataaaagagtaaggaacctctatcaggcttcatgcaatcataaaccatacgtctgcgaatatcactcttgctctgagaaagccggaatagcgatggcatacagacaaaatctcctgtacacctgcaaagaccataagcaaacttttcgtcatagaatgttgcaccaagtaaaagaatatcttatttttgcaatttacagctattaatcataaccttttagactgaaaatactatcaaattatggatacaagtaagattgtaggagaaaaaatcaaatcactccgcgaaagccagtccatcagcatggaagagttggcgcaacgttcggggctcgccatcgaacaaatcgaacgcatcgaaaacaatatcgacctgccttcattggctccgctcatcaaaatagcccgcgtactgggcgtgcgtctcggcacattccttgacgaccaggacgagaacggtcctgtggtatgccgcaagtcggaagcaaaggacagcatcagcttctccaacaacgctatccactcgcgcaaacacatggagtaccactctctttccaaatcaaaagcagaccgccacatggagccgttcatcattgacgtagcccccacggacgacagcgatttcgttctttcctcacacgaaggcgaagaattcatcatggttatggaaggaaccatggaaatcagctacggcaagcacacctacctgctcgaagaaggagacagcatctactacgattccatcgtaccgcaccatgtacacgcctatgaaggacaggcagccaaaatactggcagtaatttatacaccaatctgataagtataaggcataagggagtgtgtcaaaatacacttgatgatttcttttaggcacggattacacggattctacggaaacacagattttctttgttctttttccgtgaaatccgtgtaatccgtgcctaaaaagaaacaaacggcaagcgaattttagttttgacataccctcttatatttcatacttcatacgttaattagcatcgttatgttatacgaaagaacgcttggccaatggctggagcattgggccacaactacacctgacaaagaatacattgtttactccgaccgtaatctgcgcttcacctggagccagttcaaccgcagagtggacgacatggcaaaaggacttatcgctatcggcgtggaacggggaacacacgtcggcatctgggcggcaaacgtaccggactggctgacattgcagtatgcctgcgccaaaataggcgccgtttatgtaacggtaaacaccaactataaacaagccgaactggagtacctgtgcgagaattcggatatgcacacgctctgtatcgtcaacggcgagaaagacagcgacttcgtacagatgacctacaccatgctgcctgaactgaaaacctgccagcgcggacatctgaaaagcgagcgcttcccttatatgaagaatgtaatctacgtagggcaggaaaagcacagaggaatgtacaacacttccgaaattctgcttttaggcgacaacgtggaagacacccgtctgaatgagctcaaaagccgggtaagttgccacgacgtagtaaacatgcagtacacttcgggcactaccggattcccgaaaggggtaatgcttacccactacaacatcaccaacaacggtttccttaccggcgagcatatgaaattcactgccgctgacaaactctgctgttgcgtccccctgttccactgcttcggcgtggtgcttgccacgatgaactgccttacccacggctgtacacaagtcatggtggaacgcttcaacccgttggtggtgcttgcatccatccacaaagaacgatgcaccgcactctacggcgtacccacgatgttcatagccgagctgcaccatccgatgttcgacctgttcgatatgtccagcctgcgcacgggtatcatggccggctctctctgccccgtcgagctgatgaagcaggtagaggaaaagatgtacatgaaagtaaccagcgtttacggcctgacggaagccgctcccggcatgaccgccacgcgaatagacgactcgttcgatgtacgttgcaacaccgtagggcgcgactttgagcataccgaagtgaaagtcatcgacccggaaaccggcgaagagtgtccggtaggcgttcagggtgaaatgtgcaaccgcggttacaacaccatgaaagggtattacaagaatccgcaggccacagccgaggtcatcgacaagaacggtttcctgcactctggagacttgggcgtgaaagacgaggacggcaactaccgcatcaccggacgtatcaaagacatgattatccgcggcggtgaaaatatctatccgcgcgaaatcgaagagtttctctatcaactggaaggcgtcaaggatgtgcaggtagccggcatcccttccaagaagtacggcgaagcggtcggcgcattcattatccggcacgagggggcagacctgcacgaatcggatgtacgcgacttctgcatcggcaagatttcccgttacaagattcccaaatatattttctttgtaaaagagttccccatgacaggaagcggcaagatacagaaattcaaactgaaagacatagggttgcaactttgcaaggagcaaggaatagaaatcatttaagcagttaggagtaaactaagtaaatatggggaattagcttatactatctgtcattcagagcatcgcaaagaagctctgaatgacagatactcttaacataaatgtatttttcaacattcattcaaccactcactccgctttctcggggtagttcatattctcttccgtcatctgttccagcacttcatgcaaatacttggcagactcccattttgccatgggcaggtcgtggagcaggtaattgccgcaatcctgcggagcagcaccgggaacttcgccctcatatccggcaacaaagcggaacgtatcctgcatcagcggtacgatgtcctgcggctgcaaatcgcctttcatcagcagataattgccggtaaggcagcccatggggccccaatagataatcttgtcctgccattgcggttcattgcgcaggtaggtggcagccagatgctcgatagtgtgcagggcgccttgtcccaatgccggttcacggttgggctctttcatacggatatcaaaagtcgtgatgacttctccgttcacttcatccttgcgcgatacgtaaataccgcgcagcaaacggatgtgatcgatggtaaagctgggtattttcttcataagttataagttgtgagttatgagttataagttgtcgggcagggtggaaaggaaagtccatgtcgtaaggaaagaacgttccgccatcgtaccccaaaaatcggcatattgcgaagagtggtcttccacgcccggcgtatcgctgatgatacggaagctgaggaaaggaacgccgtacagatagcaggtctgcgcaatggcagcggactccatatcgacagccagtccagccgggaagcagcgtttgatggcatccagctctgtgcggttggtgataaaccggtcgccggtacatatcagtccgctatgaatacggctttccaatccggtcttgttcagagacaaagcatgttccaaaagcggggcgcaccccttgtacactgcaggcaatccctgcacctgaccgtactcgttaccgtcaccgcaccatacatcgtggtacgccagagagtcgctcgccactacatccgtcaccttgaggcaagcgtcgatgccgcccgccacaccggtactcacaatgcagtccggggcaaaacggcgtatcagctccgtagctcccaccgccgcattcaccttaccgatgccgcattgcgtaagtatcacgcggttgctgccaagcataccttccacatagtgcagattcccgtaatccgctaccttcttctcctgcaaacgttccgccagttggcggtgttcgctatccattgcactgataacacctatcgtcatgcttaccgatttccaaatttcagatttatgaattatatgatttagggaaggcaaaggtacgatatttcagcagatttatctatccaactggtgcataaatcaatatttatgtataagtttgccgctgaaattcagattaggagtcaagggagtcgactcctcaccctttcggctccccacataaaccataacccagcaaagatgataaagaagattcttcccgacttaattgccatcctggcattcgtcctgatttctttcgcctacttttttccggcggatatagaaggacgtattctgttccagcacgacaccgccgccggagccggcgccggacaagaagccaaagagtattacgaacagacaggcgaacgcacccgctggaccaattcccttttcggcggaatgcctacctaccagatatccccgtcctacgactctaccgtaccgctgcaatggacacagaaaatataccagctcttcctgcccacctacgtcaacctgacgtttatcctgatgctgggcttctacatcctgctgcgggcattcggcataccggcatggctggcaggcttgggcggcatcatgtgggccttttcgtcctacttcttcattctgatttcggcgggacacatctggaagttcatcacccttgcctacatcccgcccacaatagcgggcatcgtgctcgcctaccggggcaagctgctggcaggcggcatactcacagccttcttcatcgccctgcaaatcatgtccaaccatgtgcagatgtcctactacttcctgttcgtcatcctgttcatcgcaggagcatactttgaagatgcgtggcgcaacaagacgcttccccggttcttcaaggcaagcgccgtactgctggttgccgcccttatcggtgtggccgccaacctttccaacctctaccacacctatacgtacagcaaggaaaccatgcgcggcaagagcgagctggtacagaccggtgatgccgccaagcaaaccagcagcggactggaccgcgactacatcacaaactggagctatggcatcggcgaaacctggacgctcctcgttcccaacttcaaaggcggttcctcctccgcccccctcagccagagcgaaaccgccatggaaaaggccaacccgatgtacgggagtctgtacaactcattcccgcagtacttcggcagccagccctggaccgccggccccgtctatgtgggcgccttcgtactgttcctcttcgtactgggctgcttcatcgtaaaaggccccttgaaatgggcgttgctgggagcaaccttcttctccatcgtcctggcatggggtaagaacttcatgccgctgacggatttcttcatcgattacgtcccgatgtacaataagttccgcgccgtatcatccatcctcgtcatagcggaattcaccattcccctgctggcaatctttgccttgaagcgcgtgttggaagaacccggaatatggaaagcgaacaaaaaagcgttcggcatcagccttgcgctgaccgccggtgtagccctgctgcttaccgtagcgccgggtagcctcggctccggcttcgtgcccgcacaagaagcgcagatgctgcaaaatgccgtcgaccagcagatgatacccgccaacgagctgtccggcatcctcgccaatctctcagagatgcggggtgcgcttgtcagcgccgacgcattgcggagcttcatcatcatctgcatcggatgcgcgctgctttggctccacgcggcaggcaagctgcgccggtcactgaccgttgcaggcatcacggttctctgccttgtagatatgtggagcgtaaacaaacgctacctgcacgacgagcagttcgtgccccgttccatccaaacggaaacgttcagcaaaaccaagaccgacgaactcatcctgcaggacaaaagcccggactaccgcgtactgaactttgcaaccgatgccttcaacgagaacaacacttcctactggcataagaatataggtggataccatgccgccaaactgcgtcgctaccaggaactgatagaacgccacatctctcccgaaatgcaggctgcctatcaagcgatagccgccgcaggcggagaaatggacagtgtggacgcctccaagttccgtgtactgaacatgctgaacacgaagtacttcatcctccccgccggacagcagggacagaccgttcccgtcctcaacccttatgccaacggcaacgcctggtttgtgaagaacgtgcaatatgtaaacaatgccaatgaggagattgatgcgctcaaaaccatccttcccaccgaaaccgccgttgtcgatgcccgtttcaaggatgtgctgaaagggatttcagaggctcataaagacagcctttcctccattcgcctgacaagttacgaacccaaccgtttggtttacgaaacggaaaacgcaggagacggcatcgccgtattctccgagatatactacccgaacggctggcaagtaaccattgacgggaaacctgccggactgggacgtgcggattatgtactgcgcgccttgtatatccctgccggcaagcataccgttgagatgcgcttcgaccccaaaagcctgcatgtaacggaaggcatcgcctacggagcattggcgctgctggttatcggagtggcagccgttgcgctgattgcacgcaaaaaagcgcaagaataggtagaatctacggggcaaccggattcatccacatccaatataacagagcaatacgtctttctctctatagcggtacgcttttcctcacagccttataacaaagacatacagaggaaaatcaggtattgctatagagagaattcttttttctcaggaagaacatcggctgttgactactgtcaacagcccggttgacaatagccggccgatccgttgacagcagtaaacagctctgttgacagtagtcaacacctgatgttcccagtgaccgaaacgaatgccctacggatgaaaatacaatcctgcaacgtcataaatcagattctcctacaaggaaaagaatgaaaaaaatagtataaatcaccggcagaacgatatatttcagtaactttgctcttcaaatcaaaaaaacgatagagtatggaaactaccagacagaacaaaatagcccgtttgctccaaaaggaattaagcgacatcttcctgttgcaaaccaaatcgatgcccggtatactgatttcggtcagcgccgtacgcatcagtcccgatatgagcgtggcacgcgcctacctcagcgttttcccctctgaacggagcgaagaaatcatcaagaacgtcaatgccaacatgaagtccatccgctttgaactgggaacccgcgtacgccaccaactgcgcatcattcccgagctgaagttcttcgtggacgactcgctggattatctggaaagaatcgatgaactactgaaatagtggttaatccccaaccatgaatcttcctttttttatagcccgccgttatctcttctctaagaagaagcataatgccattaatattatatccggcatctcggtgtgcggggtggcgttggctacattggcgttggtatgcacattgtccgtattcaacggatttcaggatatggtagcggggttcttcacggctttcgacccggagctgaaaatcaccgttctggaaggaaaggtgttcgacccgctcgaatcgcgcgtgcagcaagtacgcgccctgcccgaaatagatgtatggacggagacgctggaagaaaacgcaatggtgcagtacaaggatcgccaggcaatggcggttatcaaaggcgtggaggataacttcgagcaactgacatccatagacagcctgctgtacggtacggggaagttcattctgaacgattccgttgtggactacggctttatgggtgtggagctggtgtccgaactgggcacgggacttcagtttgtcgacccattgcgggtgtatgcacctaaaaggaatgtacgtgtcaacatcgccaatccgtcggcggctttcaaccaggattatctgttctcgccgggagcggtgtttgttgtcaaccagcagaaatacgactcacgctatatcctcacatcgttgggctttgcccggcggctgttcaattatgacacggaagtttccgccatcgaactgaaactgaaaccgggcagcaacaccgatgccgtgcagaagaaaatggaacgcatcctgggcgaccgcttcatcgtgcaaaaccgctacgagcagcaagcggatgtattccgcatcatggagattgagaaactcatctcctacctgttccttacctttatacttacaattgcctgcttcaatgttatcggttcgctgtccatgctgatactggataagcgcgaagatacggagacgctgcgcaatctgggcgccgacgaccggctgattgcccgtatcttcctttttgaagggcggctgatttcggtgttcggagcaattgccgggattgtattggggctgctgctgtgtttcctgcaacaacgcttcggacttatatcgctgggcggcggcaacggaagttttgtagtggacgcctatccggtgagcgtgcatgcaacggacattatactggtattcgtaacggttatcaccgtagggttcctctcggtgtggtatcctgtgcggtacttgagcaagcggttgcttaaaaaataaaagcatcctcccccttcacccgcagaatcccatgaacagtatgatgcaaaggaattgtgaagggtgaaggggggaggatgcaaactttttatttcttacgtataatcgtcagtccgtcgcgcaacggcagtataactttctccacccgattatctgcggcaaccagatcattgaaagcctttatcccgatggtctgcaagtccgtgcgatgcggttgctcttcaagaacgtgcccgtcccacaaggtattgtcggcaatgatataaccgccgtccgaaaggcgtgccaataccatctcgtaataatcgatgtaacggcgcttatcaccgtcgatgaaagcaaggtcgaaagtgatgtccagccggggaacaagttccaaagcattacctatatagaactttatcttattggcatagggtgagttctccagccacggacgggtaaagtcttcctgctcgtcattgatttcaaacgtatgcagcattccgttgtccggcaacccctctgccatgcaaagtgcggagtatccgctatatgtcccgatctccaacacctgacggggacgtatcatcctgacaaacatcttgagcatacgcccctgcaaatgtcccgaagccatgcggggataaagcaacttgaggtgcgtatcgcgataaagagccttcagatagtcgccctcttcatcgatgtgttgcaggatatattcgtctaaagtcatataatttgagaattgagaattaaaaaacaaatgcctgccagcggactgtcattttttaattctcaatttataattttacaagtatctgttactgttcggaagtacactgtcttcagcatgtttcagggcatcttccactacgttgatttcgaggaaggatgtttgcgtaccggctttaccgctactcaaatagcccaccatgtcggtaggttgcagacggccttcctgaagcaggcggcggagagcggcgaagtagtattcctgtccgttggcaagttcgggcatgtagatggcttctacaccgtatgaaagcgccaggtgacgcatggtcttttccttatagcagatggcgagcaccgggtatttgccgcggaatgcagcaaggttgcgggcagtgcggccgctgtaactgtcggtgatgatggcgcgaatcttcaacttcgtagtggcttttaccgcttgcttggcaaggaaagccgttacatcgttgctgttttcgtccaaaggaatacggatgtcgttatccgccagtttgtctttttccgcctgggcagcaactttcgtcattgtcttgacggcttcaaccggatatttgccgtaagccgtctcaccgctcagcatcaaagcatccgtacggtaatagatggcgttggcgatgtcggtaacttccgcacgggtaggacgcgggttggaaatcatggtatggagcatctgcgtggcaacgataaccggcttcttggcaaggatacatttgcgaatcagcaaacgctggatacccggaatacgttcctgcggaacttcgatacccaggtcaccacgggctatcataacgccgtcggccacttcgagaatctcgtcgatattgtccacaccttcctggttctcaatcttggcaatgattctgatgtcgctgttgtgggcatcgagaatagcctttatatccagaatatcctgtctgttgcgcacgaaagagtgagcgatgaagtcaatgtctttctcgatggcgtagaggatattgttgcggtctttttccgtcagtgaaggcaggttgatgcgtacacccggcacattgacactcttgcggctgctcaaggtagcttcattctgcacctcgcacagcaggtggtcggcattcttttccacaacaaccagttccaggtcaccatcgtcgataaggatatgaccgcccacattgaggtcgtgtacaaagttgggataagaaacggagatacattcgcgggtagtctgccggtcgggattgcctaccacttttacacgatcgcctgccttgaagggaataggctcgtcaaggacagtcgtacgcacttcgggacccttcgtatccatgaggatagcgatgcggttggaaaccgtacgcacattggctatcagcttctcgaaaccttcgcggcctgcatgagccgtattcatacgtactacgttcaaacctgcgtcgaacaactgttttataaaatcaacatcgcaacgctgatcggaaatcgttgcaacgatttttgtctgtttcaatagcataatcttgtacctattttatattaataattcctttaacgcttccaatgccagacggtaggagttcagcccaaagccgcaaataacaccccggcaggcacaagctatcatggatacgtggcgaaacgactcccgggcatgcacattggagatatgaacctcaatcaccggagcagtgaccgaccggatcgcatcttgcagggcaatggacgtatgggtataggcccccgcattcaggatgatgccgtccgcatcaaaacccacctgctgtatcttgtctatcaactctccttcgatgttggattggaaatagtctatctgtacatccgcatacttctcacggagtccggcaaggtagtcttcaaaagtaacactgccataaatggaaggttcgcgtttacccaacagatttatattggggccgttaataatctgtattctcataacacatttttttatacctttgtccacagagaacattctttcaaggtgcaaagataggaaaaagtaatgaaagtagaagagaaattgacgaataaggaaaaacgagcggtgataatcagaaagtatcagcaatatctcaagctggagaaagcgctttcgcccaatacgctcgatgcctatatgacggacctacagaaacttctgcactttctggaaggagagaatatagaaattccggacgtaacaccggatgatttgcaacgctttgccgcaggactccacgacatcggtatccatccccgttcccaagcccggatactctccggaatcaaatcgttcttccactttctggtgattgccgactatcaggaagccgacccgagcgagctgctggaaggtcccaaaatcgggttcaggctaccggaagtgctcaccgttgaagaaatcgacagaatcatttccaccgtagacatggagaagaaagagggacaacgcaaccgggctatcctggagacactgtacagctgcgggttacgcgtgtcggaactgtgtaacctgaaaatctccgacctctattttgaggaagggtttattaaggtagaaggcaaaggcggcaaacagcgtttagtacctatctcgcctcgtgcaatcaaggagataaagtattggtttgcagaccgaaacctggggaaaataaagaaaggatacgaggattacgtatttctggcacgatggggtaataatatctcccgcatcatggtgtttcacatgataaaagagctggtggaaaaagccggcatcaccaagaatatcagtccccatacgttccgccactccttcgccacccatctgctggaaggcggcgccaatctgcgggccatccagtgcatgctgggacatgaatccatcgccaccactgaaatctatacacatatcgaccggaacagactccgaagtgaaattatcgagcatcatccccgcaatattaaatacaggaaagagcacggcgtttattaaattataataaatgtgatagtattattaacaaattgccaagagaattaatatctttgcaaagctatatatataggaatatagcaactaattgtgaatggacaaatttcaattacaaacaattaatttatatctaaaatgactaaaaaattgtatctgcctttgttagtggcacttgttgctgttttgacatcatgcagcagcaaaatgggtgaactgtcttctgactatttcacagtgactccgcaagtattggaagccgtaggcggtaaggtacctgctacaattaacggtaaattccctgaaaagtatttcaagaaaaaagctgtagtggaagttactccggttttgagatgggaaggcggcgaagctaaaggtcagcctgccgtattccagggtgaaaaagtagaaggcaacgaccagactatctcttacaaggctggtggtagctacacaatgaagacttctttcgactatgttcccgaaatggctaagtctgaattgtacttggaattcaaagctaaagtcggaaagaaagaagttactatccctgctgtaaaagtagccgacggtgttatctctacttccgaactggttggccagactttgggcagcgctaatcctgctaatggtgacgacgctttccaacgcgtaatcaaagaaaaatatgatgcaaacatcatgttcctgatccaacaggctaacatccgttcaagcgagttgaaaactgccaaagcattcaacgaagaagttaagaacatcaacgaagctgccaacaagaagatcagcaacatcgaaatctctgcatacgcttctcccgatggtggcgttgagctgaatactggtctggctgaaaaccgtcagaacaacacagccaaagttatcaacaaggatttgaagaagagcaaaatcgaagcagctgtagatactaaatatactgcacaggactgggaaggtttccaggaactggtcagcaaatccaacatccaggacaaagagttgattctccgtgttttgtcaatgtactctgatcctgaacaaagagaacaggaaatcaagaatatctcttctgtatacagcactttggcagaagaaatccttccgcaactgcgtcgttctcgtctgactttgaactatgacgtaatcggtaagtctgacgaagaaatcgcatctttggctgacagcgatgctaagcaactgaacatcgaagaactgctgtatgcagctactctgactaacgatcctgccaagcaggaagctatcttcaccaaagctactcaaatctacccgaacgactaccgtgcatacaacaacctcggtaagttagcttaccaagccggtgatttggacaaggctgaaggctacctgaagaaatctctttctatcaaggattctgctgaagctaacatgaacatgggtctcgtagctttgagaaaaggcgacaaggcagctgctgaaacttacctgggcaaagcttccggtactaaggaactgaacgaagctctgggtaacctgtacatcgctcaaggtcaatatgacagagctgttaacgcatttggcgacactaagaccaacagtgcagctttggcacaaatcctggctaaggactacaacaaggctaagagcacattgtcaagcatcgctaaaccggacgcttacactgactacctgatggctgttgtaggtgcaagaaccaacaactcttctatggttatggacaacctgaagaaagctgttgccaaagattcttcactggctaagaaagctgcttctgacttggaattctccaaatacttcacgaatgcagacttcatgaatatcatcaaataataaaggttataagatgaaaagaagtgcccggcatagaaatatgtcgggcatttttttttattcacaccaaaaagaactactttcgcagcaacgtatcagaagaagaaagccgtatgaagaatatttatcttgcatatttcctgattatcatgctatccgcttgcggtggcaaaagctccgacacagtcagtctgagcggagaaatcaaaggtttgggaaatgacaccttatatatatacggtgcagacgaaatgtacgaccgcatggataccctgcccgttgagaacggcaaattctcgaaaacactctctccggataccttggtagctgcatggctgttgttcagcgacggcagccgataccctttcttcatggataaaggtgacaaaatacacataaaaggctctgctgccgaactaaacagcatggaaataaccggcaacccgcacaatgaagagttgaccgccttccggaaagaactgaaaggattgggcaaaccgtctgaaaaagtcctggaagagaaagccggcaaatttatcaatgaacatcattcctctttagcgagtatctacctgcttgacaagtacttcgcacaaaaagaaaagccggattataccctaatcaaacaactgaccgagcacatgacgggagaactgaaagaccgtccctatatcgacgggctgctcgaccgcatccaggaagaagaaaaggctgcgaccggaaagactgccgcctacttccgcctgcccaacgccgaagggaagcagataacccgttcgaacttcaaagaccaatacctgctaatacacttctgggcttcctgggataccgtgagccgcgacagcaatgctgtttaccgcagaatctacaggaaaggacaaaagaacaagaaattcgcgcttttaggaatttctttagacctcaacaaagacaattggaaaaaggctatcgaaacagataccctgaaatgggagcaagcatgcgacctttccggctgggagaccggagttgtaaagcaacttgccataagaaccctgcctgccaatgtactgctcagcccttccggaaggattgaaggaaagaacctgagcgaaacggctatcgaaaagaagctgaaagacatagaagaacaagagaagaaagaaaagaagagggagatagagaacgaaaggaaaaagaaacgataacttttctatcggtaatcataaaccctaatcactaaacactcaaattacatgctcatcaaagtttttggagcggctgttcaaggtattgatgcaaccctcatcactatcgaagtcaacagctccagaggctgtatgttctatctcgtcggcttgccggactctgctgtcaaggaaagccatcaacgcatcatttccgcactgcaagtaaacggttaccggatgcctaccagcaatatcgtcatcaacatggcaccggctgatatccgcaaagaaggcgccgcctacgacctgccgttggctatcggcatgttaggtgccagcgaagtaatcaaaccggacaagttgagccgctatctgttaatgggagagctaagtctcgacggcagcctgcaacccattaaaggcgcactgcccattgccataaaagccagagaactcggttttgaaggaatcatcatacccaggcagaatacacgggaagccgctgttgtaaataacctgaaagtttacggagcaaagaacctgaaagaggtcatcgagttctttaacgacaaacaggaactggagctggtacatgtcgatacccgtaaagagttctatacccgacagaatgactttgacctggatttctccgacgtgaaaggacaggaaaacgtaaaacgcgcgttagaggtagcggctgcaggcggacataatattctactgataggtgctcccggcagcggaaaatccatgcttgccaagcgacttccctctatcctccccccgttaacattgggcgaaagccttgaaaccaccaagatacactctgttgcaggaaagctggaacaggaaagcggacttatctccaaacgaccgttccgcgctcctcaccatacaatttccactatagccatgacaggaggcggcagtttcccgcaaccgggagaaatcagcctggcacacaacggagtcttattcctcgatgagctgccggagttcaatcgaaatgtacttgaagtactgcgccagccgctggaagaccgggaaatcagcatttcccgaattaaatgcaatgtcaaatacccggccagcctgattctcgcagcatccatgaacccctgcccttgcggatactacaaccatcctaccaaagcctgcgtatgcagcccggggcaagtacagaaatacctgaaccgcatttcgggacctttgctcgaccgtatcgacctgcaaatcgaagtcatccccgttccctttgagaagatgtcggatgcacgtcccggtgaatcgagcaccctcattcgggaacgcgtagtacgcgcacgtcagacccaatccgaaagatatgccgagattcccggtgtatattgcaatgcacagatgaacagcaaattacttgcccgttatgcccgtcccgatgacaaagggctggcactgctgaaaacggccatgaaccgcttcaacctctcggcacgcgcctacgaccgcatcttaaaagtttcacgcaccatcgccgatcttgagggctgcgaactgatacagccctcgcatttggcagaagcaatcggatacagaaacctggacagggaagattgggccggatagccccgtatcagtcttatatagccctctttttcagtttaaagactacctctctgtcatctttaccttcatacctgccgtttccacctttcggattcatctttatatccacagaatcggtctggtaaaccccggtaaggtcctcacagataatacggaagtcctgataaccggttatggtattctgataaagatactctccgttttctttggtataaaccgtatcggataaaacagcatagccatatgaaccgtcggcaggagaagctatatgctttaccagaattctggcatcgggcacaacctgccggctctctcccagtactttacctctgaattcatatttggcataagaagtacaattctcacttcctgcccccatactgttttcatcgcaatatgcgaaccccaataaaatcaatgcaccgaacatcacgccgttgaaaattctaagccattgttctttttctctcttcatagtgtgtttatagtctaagttatatcctataaacgcctatcccaacaaaatactgcacaacaacccgacttttaacgtataatcagttcttttctattctgatgcgggcatccactgctattacgtacttttccgtggccaacaacggattgatatccatttccttaatttccgtagcaaagcgcagcaaagtggacaagcggacaataatttcggcaaacctgtcctcattcacccctttctgcccgcgcgtgccttttattatcttataggcgcgcaacgaatgaatcatcgaataagcctcctcataagacaaaggagccagaccggaggatacgtctttcagcacctccacaaagataccgcccaagccgcaaagcactacatgcccgaatttctcctcatacttggctccgataaacagttccgttcctttcaacataggctgcaccatgatacccgttacttccggaatctgcatcatccgttcaaactccaacgccagatgctgttcactctttatattcagtaccacaccgcctacatcggatttatgcacaggccccaccacctttgccactaccgggaatccggcacgacgggcaaatgcaagcacctcttccttgtttgcagacacaaactcctccactacaggaataccggcagaatgcagcaaagcctgcacgtaatgcggttctatataaccgttttcggggatggaatcaatgatgcggcggatgcgcggaacatccacgccaaacagctctatttcattatttgccggtttcgaggcattcataatgcgcgataaagccgtacccaacgtcacttcatcggcaaagttcacgtgacctttggcaagaaaagcggccacttcggctcctgccgtattaatggacgggagaatagggaatatcggtttcctgcaagcctgcatcttctcatgcagcacatcgtacatttcgaacatggtgaccaatcccggtgtaccgaaaatagccattaccgcatccacattatcaaacttctcttcgcaatattccaaacaaagccgcagatgctcaggcgtacccgtagctaaaatatctattggattaccaacagcagctcccggaaaaagcttgcttttcagctcttcggcaagctcaccttccagcttcggcacattcagtccgcccttgctcaaggcatcggtcaacatcacccccggtccgccggcatgggtgataatggcaaaattctttcctttcagttccggcaaagtgaagatacatcctaccgtagtcagctcttcacgggagtagcaacgtacgatacctgctttacggaacaaagcctccaccgccgaatcggaactggcgatagctcccgtatgcgaggatgccgcacggctgccactctcactgcttcccgacttgatagccgcaatcttacatccttttcttatcagagaagaagcatggaacagcaatctgtcagggtcgcctatactttctatataaagcagttttatcctggaatcgttttcagcatcgaaatgctcgtccatatattgcagcacatcttccactccaatctgtttggcattgcccacagaccatacggaattgaactgcaagcctttagttaccgcgctctccagaataaacaccgcagtggccccggaactggaaatcaaatcaacaccctgcgggttcaaattgggaataggctggctgaacacgctatgatgccacgtattcatcagcccgatacaattgggacctatcaacgaagcgccgtacttattcactgtttccagaatacggtcttccaacaacgccccttcatgcgtttcctctccgaaacctgcagagagaatgatgaacgcacgtacctgcttttccgcagcaagcaattctaccgcatccggacaaaaagatgccggtatggcaagtattgccaagtccgtatccggaatatcctttacatcagcatacgctgtaacgccctgtacttctgcttctttcggattgacggcacgcagttctccggtataaccgccattaatcagatttctcaaaatagctccaccgggtttatgtacattgttggaagctcccaccaccacaatactggcaggacgcagcaattggtttgttatcatagtctgttcatattagtaaagtacgacaatcgcacaaatatacaatttatatacataatgacaagaagataaccttttaatattaccgtatccttgttcttccaaagacgaaatattccggacacgaagtatatagggctctttttgtaggtttaagagaaaaccgttatctttgcactgcttaaaagtgttcataacaaaagagatacatagatacaatggaaaagaaattcaagcgtaccaccgtgacatcggcgttgccctatgccaacggccccgttcatatcggacacttggcaggggtgtatgtacctgccgacatctacgtccgctacctgagactgaaaaaagaagacgtagtctttatcggcggctccgacgaacacggagtgcccatcaccatccgtgccaaaaaagaagggattacaccgcaagatgtagtagaccgctatcatacgcttatcaagaagtcttttgaggaattcggcatttcgtttgacgtatacagccgtactacttcaaaaacgcatcacgatacagcttccgaattcttccgcaaactgtacgataagggcgaattcattgaaaagaccagcatgcaatactacgacgaggaagccaagactttccttgccgaccgctacatcaccggtgagtgtccgcattgccacgcagagggcgcttacggcgaccaatgcgagaaatgcggtacaagcctcagccctaccgacctgattaatccgaaaagcgccatcagcggcagccagcccgtaatgcgcgaaaccaagcactggtatctgcccctcgacaaacatgaagcatggttgcgccagtggatattggaagaccataaagaatggcgtcccaacgtgtacggccaatgcaagagctggctcgacatgggcttgcagccgcgtgccgtgagccgcgacctggactggggcattcccgttccggtagaaggcgccgaaggtaaggtgctttatgtatggttcgatgctcccatcggttatatcagcaataccaaagaactgctgcccgactcttgggagaaatggtggaaagaccctgaaacacgtctggttcacttcatcggaaaagacaacatcgtattccactgcatcgtattccccgccatgctgaaggcggaaggcagctatatcctgcccgacaacgtgcccagcaacgagttcctgaatctggaaggagacaagatttccacttcacgcaactgggccgtatggttgcacgagtatctggaagacttccccggcaagcaggacgtgctgcgctatgtgctcactgccaacgctccggaaacaaaagacaacgacttcacttggaaagacttccaggcacgtaacaacaacgagctggtagcggtatacggcaacttcgtaaaccgtgccctgcaactcaccaaaaaatacttcgacggtgtagtgcccgctgccggcgaactgaacgactacgaccgcgaaacactgaaagagtttgccgacgtaaaagaagaagtggagaagctgctcgacgtattcaaattccgcgatgcgcagaaggaagccatgaacctggcacgtatcggtaataaatatctggcagacaccgaaccctggaagcttgccaagacggacatgccgcgtgtagccaccatcctgaatatctccctgcagctggttgccaaccttgccatcgctttcgaaccgttcctgccgttcagcagcgaaaagctccgcaagatgctgaacatggacagcttcgactgggcagagctcggccatacagacctgctccccgccggacaccaactggcaactcccgaactgctgttcgagaagattgaggatgatgttatccaggcacaggtagacaaactgctcgccaccaagaaagcaaacgaggcagccggctacaaagccaatcctgtcaagcccgttatctcattcgaggacttcgagaaactggatatccgcgtaggaaccgtattggaatgcgaagccgtacccaagatgaagaagctgttgaagttcaagatagccgacggactggaaaaccgtactatcgtcagcggtatcgcccagcactaccaaccggaagagctggtaggcaagcaggtactgttcatcgccaacctggctccccgccaattcaagaacggactggtgagcgaaggcatgatactttctgccgaaaactatgacggctcactggcagtaacctcactgttgcgtgaagtaaagcccggcagtgaagtgaaataaaccttatgagcgagtcttcactgaaacaaaaaacaataggagcattgctctggaacttgctggaccgtatgggccagcaagttctgttgtttattgtcggtatcctcgtagccaatatactctccgtcgaagactatgcgctggtagggatgcttgccattttcagcgccatagccaatatcatacaagatagcggattcagtgccgcactcattcagaagaaagagacgactgcagaagagttcagttccgtcttctggttcaatctgggaatgagtatcctgctgtatggagtgctgatgggctgttctccgctgatagcccgcttctttaaccagcccaggctggtggaactgtcggctgtcattttcctggcacttcccatcaatgcgctcactatcatacaaagcaccatactgaacaagcaaatccgcttcaaaccattgacgcaaataaacctatactctatgacggtttcgggcatagcttcgcttgccatggcactgaccggctgtggagtatggacattggccctgcaaccggtaatactggcaggagcgcgcgccaccctgctatggagtcgcgagaactggcgtccgcaacggactttccgcttcgcggtcatacggtcactgttcggattcgcttcaagcctgttattggcaagcctcatcaatacctgcttcctgaatatctattccgttatcatcggcaaactgtttccacaaaaacaattgggatattatacgcaaggaaacaaaatgtgcgatatgggtgtcagcctgatttacggaagtatacagaatgccacctttcccatattcagtaccatccagaacgaacgggaaaggctgataagggcttatcgcaagaccatccgttttacggcattcatcacactccccatcatggcaggtctgttcgttacggcaggtcccgttatccgtttgctgctgaaagaggaatggtggccttccattcctttcttccaactgctctgtcttggcggttgcttcaccatactgactgccatcaacaataatttcattaaagtaagcggacgttcggacggcatacttaaaatagaatattacaagatagccttcaccgtggcagtagtgctgcttacctatcgggaagatgtgctgacgatggtagcaggtcttgtagtcacccgcctgctggtatacattatcaatatgatttacaccgcccattacacgggataccgcttttccatgcaacttatggatttactgccatatgcaggactcagcattctgatgaccttattgctactgcccattggcggatggatagagaaccagttgctactgctcgtcacacaagcggcagccggcacggtcatttatataggtacggcctatatcaccggttcgaagatactgaaagactcgctggaattaatacgaaagaaaaaaggacatgaacaataataccggatttaaagtcagcgtcctgatgctcacctacaatcaggaacgttacatcaacgaggccatccgcagcgtaatgctgcaagagacaaacttcccctttgaactggtcatagggaacgatgccagtacggactgtacgggaacgatttgcgcggactggcaaaaaaagtacccggaacaaatcgtcctattcaaccggaagaaaaatctgggactgcaacagaacttcatacaaacctacgcccaatgtcggggacaatatatcgccatctgcgagggcgatgacttctggacagacaaacggaaactgcaaatccaggcagattttctggatacgcatcccgactattccacctgttttcaccgggttatcaactactacgaagaccgcggaaccaagagcctcagcaatggcgggcagaagcaggatacagacatatcagaccttgcacgcagcaattacatctccaacgtatccgctttgttccgccggggcttgttcggcgaactgcccgaatggtttgcccgtgtcagcacctacgactatgccatacatttgctgaatgcacaattcgggaagatacattatataaagcgtccgatggccgtctaccgccaacacgaaaaagcaatctggagtgaagccggaacagaccggaaactggacatcgcactcattgtccgggagttgctaatggattattttaaagaaagaaggactgacgtatacgacaatctccggcaatcccatgcgcagatatgcctgaacctcatccgccattacatcggcaaaggacagcaagaacaaatagagcatacggaaaaacggcttctgcaatatcaaccgcagtggactatggaagatgtgaaacgtatggaattgccccgcccgcaatcagccacacaaaggctggcaggatttgtcaaaggcatgatgaaacggggaagagccgccgtttccagagtgataccgttaccgcacatctgacacgtccggcgaaaacgacccatccacacgcaaagaggacattacaggaatttcccaaccgtcttttccagcacgccgttatcgctcagcagcttctccacaaactcgcgaaaagctccataaccgccatgtgcggccgttacatactttacttcccgcttcacatattcgggcgtattgctgggagaggcgctgtaacccaccagacgcagtagcggcaaatcattcaggtcgtcaccgataaaggcaacctcgcccaacgaaatacccaattcgcggcataactcctcagcctgcgccactttatccttgacccctaaataacaatagtcgattttcaacttatcggcgcgcttctgcacgatttgcgtattctcaccggtcataatggcaacgggtatatctaattcgcgcagaaaaatcactccccagccgtctttcacggaaaagcgtttcataacgtccccttcggcagtataatacattccgccgtcggtccatacaccgtcaatatcggtaataactaatttcggtaacatgcctgttatttcttttaagattaagaatgtaagaatatctattgcccacgctctcccaatttaccgcgttttccgtcacgatagccgtcccacagagctttccatttggctatcttctgcttttcatacaacagcacaaagacaatccgtttatatagatggtagcgtaaatgggctttcaggttcaggctctcaggatagagtctgtgaagtaccatgccattgcgcacattgtaataagtacgtgccggcggatactcgttcggaaaaacctccttacccagcaagcggtgtttcttcttctgataccccaaatcgtgctgcaacaggatatttttgaaacaaaccgtccgtactcctttacgcgctgcacgccagcagtactcgcagtcgatgccccatacaaacaactcttccataaaaacgcccagttcttcgaacaagccgaccggataaacagtaccggaagtcatggcggaagagacctcatccaccctgtcggcaacgggataaagcggagcctgctgagactttataaaataattgacggagaaaataacccgcttttcttccccgtaactccggatggcagccgtataatcccggaaaactcctggcaggaagtaactgtcctggtccagcgtcaaaagatgcgtatatccatgctcgcgggcgtaagccacggcatcattcagcgcagtgccgatgcctacattccgtccacaccctctgtattccagacgctccggatgagtgacgcccgacaaaggcaactgttcccttccgcctccgggcgtattatcccacaacagtaatctgtctgcctgcgacagataactgttgatattcccggccaaatccttaccgggatgataaagcacaacaacggcaagcagtctcattcctcaatcaatgacggataaataatctcgttacgcggtatctccttccgtacccgacggcctaccaccttatctcgttccgcccacttaaagccgtcgcccggactaagcaggtgaatatcctcttccgtgataatatcgccgggatgcagcgccttgttcgtagcaatggaacgctccagtttcactttggcggcagagacggcagggtcgatatacagttcctccctgcccagccaatgctcggcaatgcggatatcacgaatcatgcggttcacaccgtccggtcccagagaaccttgttggtctgttcccttcatgcggcggtcaatggtgacgtgcttctctataatctccgcacccattcctacggcaaccaccggagcggcaatgccaatggtgtggtcggaaaagccgatatggtattgtccgtaatgctgtttcagataagttatcgttctcaggttcagattatcgggctgagtgggatactgcgatacgcaatgcagtatggatatatcgttgtgataacgggtaataacctccagagcatcgtccagttccttcttgcctgccataccggtggaaaggatgataggaatcctggtttccgccatcacttccaacagcggcaggttggtaaggtcgcggcttgccaccttgaggcggtcgggcgtaaagagcttcaataaagacatgcagccttttgagcacagtgtttccacgaagtccaggcccaatgacttggcatgcttgtaaacttcaaaatgctcctcgtccgtcagttccagataagcgcggtgctcgccataggtgcgtccgaaagagtggggagagtcgtacggacggttcatctgcgaatcggtcagttcttcattcaaatcccgcttggtcatctttaccgcgtccataggacggagttccagattaaagacttcttcgcgtacgggacgtgacaccaggtctacaatcaacttggcgatatcgacggaaccgttatggttctgtcctatttctccgataatgtatgtactcttcattcggcaactgttatttttgtttactatcatcaaatctatcttccttccctgccccaatacactgtagaaagggggacaatgagtcagggagtgaaaggcattcagtcagggagtcatccccctttcagtcagtggctgaatggagtccggtcagcgactgtttccggcctcttcccggcagcataatcttttccttttccaagaagtctccctgcgataaagccggagcttatttttcgtttttcgctatattttccagcattttggccctatactccggatgtgcctccaccaaccggagcagtgcatggatgctatggtcggtctgctcgcagaaagcggcgtaaagttcttgcaacagggtgaaatcctccattgtatcgagcgtaaagcgaagatccaaccgcccttccagctcatcgggcaacggaagcaggcgaacgctgaacgcttcgggatgtgtatagagataaatcgtaacgtgctctatgtacagtttttcctgcgtagcggcggctgcacggcgcagggcatcggcagtcgtcagctcggcaaacaagcccaaatgagatttgatagtgggacggccgtctgcaaaaccgtaagcgatataatctgccggacgggcatcgtgctcctcgaagaaagcccggaagctgtcgggacgcaggaaaggattgtccgaacagacacggataaagcggtcaaggttgaatgtttcggcagcccggataaagcggtcgagtacattgtcctcgtctccccggtagcaacagatacctgcttcgcgggcaacctctgccagtatatcatcctgcggacggtcggtagtggcaagcacaatagtcttatcggcgcaggcctgcttgatatttccgattaaaatgtcgataatgcgctgcccgccatagaaagggagcagtattttattatgcaaccgggtagaaccggtacgtgcctgaatgatgattccgtctttcatactttcattcgtttaaaagcgtctatataactgcccggcgtaacgttgatcacttccttgcccaaccggcgcgcataggcttcgagcacgaagtaggacttaaaggccacatacatgtggtaaagtatcgtataaagccgtgcgctatgcagattctcctgcgtcaccgttgccgcctgcgacttattctggtcatagaaatgtttttggtgcatcagtaccacgttgtcgtccgtcaccgtgatttccggcaaccaggagtgatcggcgcctgccagataaattttcttgaaaggtaaacgcaacccgatggcaatagaaggaatcagtacgttgtgcggacggggcacaccccaacccttagcgaatacccagttgcagaatccctgcacaccttctatcggagtggtattgtaaatacagaggcgaatattcctgttacccgccaacataggctgccactctttgttcttcaaagcacgggcgggaataaacagactcatcggccaagcagttttttcggcaagcgtccggaacaattgtacccgcttctcgggaacaatccagaacagagggtcggctatcagatatatctccgggcggagctgctcgaacatcggggaagtaacgcagaaattcaccgccagcagcgtcttgccctgtacaaagtccggagcttcccgaaccgtacggttcaatgaaggaccgttggcaagtatcaacagctcttccggattactgaacgacgacggtaggtgcgtacgccatttggattgtagcagaatcttcaccacgctcaggaaagtctgccacagtagctccagctttttcattcctttatctcccatattcacatttattttctaccgatgaactccaggtttcttccggcgaaaaactcgttttccacgacgttcaatccgttgctcagtgcaacatctccactgctcccggcattacgagcttttaacctcggcaaagatagggagtttagcggttacagactaaaaaaataaaagatttatagagcagaaagcggcaaaagcagtacttttgtccaaacattccacaaaaatgagagtactattaatcaatacatccgaacgcatcggcggggcagccgtagcggccagcagactgatggagtcgctcaagaacaacggcatcaaggccaaacttctggtacgcgacaagcagaccgaccaaatcaccgtggtttcattaaactacaactggcgcatgatatggaaattcgtatgggagcgtatcgtcatatggaaagccaaccgcttcaaaaaggagaatatctttgccgtggacatcgccaatacaggtacggacattacctctcttccggagttccagcaggcggatgtcattcatctccactggataaaccagggaatgttatctttaaagaacatcgagaaaatccttgcctcaggcaaacccgtggtatggaccatgcacgacatgtggccgtgcaccggcatctgccaccatgcccgcgagtgcacccgctatcagcaggagtgtggcaactgtcctttcatccacggcaacggcagcagaaaagacctctcctaccggactttccgcaagaagcaggagttgtatcagggacggcacatcaatttcgtaacatgcagccactggctggaaggactggccaagaaaagcgccctgctcgccggacacacgattacctgcattcccaaccctatcaataccaacctgtttaagccgcacaacaagcaagaagcacgcaacagatgccaactgccgcaggacgccagactcgtactgttcggttcggtgaaaacaacggacaaacggaaaggcatcgactacctggtagaatcgtgcgcactactggcggaaaagcaccccgaactgaaaacgaagctcggcgtcgtcattttcggcaaagagtcgcagcaactggccaacctgctgcctttcaaggtctatccgctggactttgtgagcaacgaacaccagttggtaaacatatacaatgcggtagacctcttcgtcaccccttcgctggaagagaacctgcccaacatgattatggaagccatggcatgcggcattccctgcgtcggcttcaacgtgggcggcattcccgaaatgatagaccacctgcacaacggatacgtggcgcaatacaagtcgtccgaggattttgccaacggcatctactggacacttaccgacccggattatcccagcctcgccgagcaggcctgccggaaggccgtcacccactattcggaaagcgccatcgccaagaaatatattgacctgtacaacaaagtcactggaagaaatgcataaccatcccacccccaagttcagcgtcattaccgtgacctacaatgccgaggctgtattggaagataccatccagagcgttatctcgcaaacctaccgccacgtggagtatatcattgtggatggagcgtcgaaggataagacactctccatcatagaccgttataaggatcacatcgcaaaggtgacaagcgaacccgataaaggcctgtacgatgccatgaacaaaggcatccgactggctacgggcgattacctctgcttccttaatgccggcgacagcttccacgaagacgatacgctgcaacaaatggtacatacgctgccgggaagcgagctacccgatgtgatgtacggtgaaacggccctggtggacaaagaagggcatttcgtacgtatgcgccgtctttccgccccggaaacgctgacatggaaaagcttcagacaagggatgcttgtctgccatcaggccttctttgccaaacgcactttagtagaaccgtataacctgaagtaccgcttttccgccgactttgactggtgcatccgcatcatgaaaaaggcacacacgctgcacaatacccgcctcacgataatagactatctggacgagggcatgactacccaaaacaggaaagcctcgcttaaagaacgtttccgcattatggcgcaatattacggtctgataagcacggcagcctatcatgtctggttcgtactgagggcggtactgaaaaaataatccgtacagcttgaaaattgtatgtgccacttcattggcaatcttgtgccagcatataggcataagcgtgccattaaagtggcacatacatagactgtgaacggcacgcctaaggtttaagcaacgagcgcaactcctgcacgccttccgatgctcctttttgaattacatgtatctgccgcatggaatgtacatccaccggcttagggtctatcaggtacacttcggcatcgcgaggcacatagttgagcaatccggcagccggatatacattcatcgaagtaccgataatgacgaatatatccgctttctccacataatccacagccgtttcaatctcaggaaccgactcgccgaaccaaacgataaacggacgaagctgagtaccgtcgccggctttatctcccaacttcacttcgtactcatccggtttcagttcctttatgtagtgcggattataagggtcgcgactggaacagacctttgtcagctcgccatgcagatgaatcacgcgtttgctcccggcacgctcgtgcagattatcgacattctgcgtaacgaccgttacattgaagtccttttccagctctgcaagcccgatgtgtccggcattcggctttacatccagcaattgcttgcgacgctcgttataaaagttgataaccaactccggattacgggcatagccttcgggagtcgccacctgttccaccggatatttatcccacagtccgcccgcatcgcgaaaagtactgataccactctcggcgctcatacctgcaccggacaaaacaaccaagttcttcatctttatatctccttaaagttcatatagtcatacaaatgtatgaataataccccaaaagagggaagttattttcacttactaagattttttaatctgaaaaaaacaaaatcattcaaataaaagacgtatttttgccattcattaatttgcaataggctggaaaagaaatgatttcagccgccaacaaaaacattttatggataaattcagttatgctatcggccttggaataggtcagaatcttttaagtatgggtgctaaaggcatcgcagtagatgactttgcacaagcaatcaaagatgtcttggaaggcaaccagacggctatcagccatacggaagcccgcgaaatagtaaataagtacttcgaagaactggaacagaaaatgaatgccgccaatatcgaggccggcaagaagttccttgaagaaaacaaaaaacgcccgggagtggttacgctgcccagcgggctccagtacgaagttatcaacgaaggcaacacaggcacttatgccaaagctaccgaccaggtacaatgccactacgaaggtacgctgattgacggaacactgttcgacagctccatcaagcgcggccagcctgccacattcggcgtcagccaggtaatcccgggttgggtggaagccctgcaactgatgcccgaaggcgccaaatggaaactctacatccccagcgagctggcttacggcgcccagggagcaggtgagatgattccaccgcacagcacactcatttttgaagtggaactacttaaagtattaaacaaataattttaaaagcaaaatgaaaaaagtaacatttatcatggctcttgcagcagctgccggtttggcatcctgtactgcacaaagcccgaaagcgaacctcaaaacagacgttgactcattatcttacgccatcggtatggcacgtaccgaaggtctggatcaatatctcgcacagcagggtatcgattctactcaaatgacagacttcctgaaaggtttcaacgaaggtgcaagcaaaatcgacaagaaagacgttgcttacatggcaggtctgcaaatcggacagatggtaagcaaacaatgggtagaaggcttcaaccaacagattttcggtggagactctacacaaaccatcagccgtgaaaacctgttggcaggtttcgttgccggagttgtaggcaaaggcatcatgaccaaagaagaagctcagactttcatgcagacccagatggatgcagtaaaggctaaagccatggaaaagaaatacgccgacaacaaagctgccggtgaaaaattccttactgaaaacaagaccaaagaaggtgttgtaaccactccgagcggtctgcaatataagattatcaccaaaggaaccggtgaaatccccgctgatagcagcaaagtaaaagtaaactacaaaggtacgctgattgacggaaccgaattcgacagctcttacaagcgtaaagaacctgctacgttccgtgccaaccaagttatcaaaggctggacagaagccctcactatgatgcctgtaggttctaagtgggaactttacatcccacaagaactggcttacggcgcaagagaaaccggcggcccaatcaaaccgttctctactctgatttttgaagtggaactggtaggtatcgaaaaataaaacgatcatgccataaaagcgatagggcggtgaagcgacgatacttcaccgccctattccattatccccctaccactttatcaccttgccatccattatcactttatcaccttattaccctatcactttatcgtattatcacttttattctttttttcgctccattctatagataaattaaaataaagtcctatatttgcttactatttgataagaacaagaactttacttatttactattatggaaaaaatagacaatcttgaccggcagattctggaaatcatttcccaaaatgcccgtattccttttaaggatgtagctgctgaatgtggtgtatcacgtgccgccattcaccaacgcgtacagcgcttgattgatttgggcgttattgtcggctccggctaccatgtaaaccctaagtctttgggctacaggacttgtacttatgtaggaatcaaactggaaaaaggctccatgtacaaggctgttgttaccgagatgcaaaagattcccgaaatcgtggaatgtcattttaccaccggtccgtacaccatgctgaccaaagtgtatgcgcgtgacaacgaacacctaatggacttgctgaataacaagatgcaggaaatccccggcgtcactgcaacagaaacattaatttcactggaacaaagcatcaagaaagaaattcctatttgcccggaaaagtaagataaataaaacaatggggttgtgccaaaacaaaaaacacttattatttgttctgacataaccccatgatttcaccaccttatcactttatataaatatggatttcttaaacgaatatcacctgtcaggacttgtaatcggtatctgtactttccttatcataggcatcttccaccccatagtagtaaaagccgaatattattggggaactaaatgctggtggattttcctattgttgggaatcggcggtgccattgcttcactgtgtaccgataatattttggtagcctcgctgctaggcgtattcgccttctcctcattttggaccatcaaagaagtatttgaacaagaagagcgggtaaaaaaagggtggtttcccaagaatcctaaacgaacatataaattctaaacaaagaacattcgcatttttatctgaaacgcttgcatatttcaagagaaaatactacttttgtccccgctatccgatataaggatacaccggacttgtagctcagttggttagagcaacagactcataatctggaggtccctggttcaagcccaggctggtccacaaaggaaatcaagcagttacgaatttcgtagctgcttttttcttgctcttgcgtaaacaatgcgtaaacaaactgtttgagttgattatgtttacgcatagaatttctatgaaactccatacaatcctaatttctctatatacggggtaata

SEQ ID NO: 4078 - DNA, 145645 bp, Unknown
  gut microbiota DNA sequence
tttttttttttactattgctgcaacttttcttcctctttgtgcgtctgataagttgcagataacttaaaaataaagattatgttaataacaacgacttcagtgattgagggtgcaaagataacccgttattatggcatcgtatccggcgaaacaattatcggcgccaatgtattccgtgacttttttgccagtatccgcgatgtggtaggcggacgcagcggttcgtacgaggaagtgcttcgtgaggctaaagatacggcgcttcgcgagatgcaggaacaagcccgtttgttgggcgctaatgcagtgattggcgttgaccttgattacgaaacggtaggtggcagcggcagtatgctgatggtgactgcttgcggtacggctgtgacggtagaataaagagagtgcggcaaaataaaaaacgcttgcggtttatttctttcaggcacggaattacacaggatttcacggattaactttattcttttccgtgaaatcctgtgtaattccgtgcctaaaggaaatcatcaagtacgttctgatatattcttttgtttttccagtctttggcataaattcggttaatcgtttgcttatttcatttcaaatcaatacttttaagctttcgttcaaccttttaatacgatttatgctatggaccaattgcttttctggctggtaccggccgcttccgttctggcgctttgctttgcctggtatttccatcgtcagatgatgaaagagagtgagggaactcctcaaatggttaagattgccgctgctgtgcgcaaaggcgccatgtcctatctccgtcagcaatataagattgtgggatgggtgtttctgggactggtgattctcttctcgattatggcttacggcttcggagtgcagaactcctgggttccgatagctttcctcacaggcggattcttctccggcctttccggatttctcggtatgaagacggccacgtatgcctcggcgcgtacggcaaacgctgcccgtaactcattgaatgcgggtttgtgcatcgctttccgcagcggtgcggtaatggggctggttgtagtggggcttggcctgctcgatatatccttctggtatctgctgctcaatgcggttatccctgtggatgtgatgacacccactcataaactttgtattatcaccactacgatgctgacgttcggtatgggagcttccacacaggcgttgtttgcacgcgtgggcggtggtatctatacgaaagccgccgatgtaggcgccgaccttgtgggcaaagtggaagccggcatccctgaagacgatccccgcaatcccgcaaccattgccgacaatgtaggcgataacgtgggcgacgttgccggtatgggggccgacctttacgagagttattgcggctccattcttgctacggcggctcttggcgcagccgcttttatccattcgggggatacgctgatgcagttcaaagccgtcattgccccgatgctgattgccgctgtggggattatcctttctattataggcatcttctccgtgcgtaccaaagagaatgccgggatgaaggacctgctgaactcccttgctttcggtacgaacctgagttcggtgctgatagtcattgccactttccttatcctttggctgttgaagctggacaactgggtgtggatatcctgctcggtggttgtggggctggtggtaggcatcgttatcggtcgttccacggaatactatacttcccagtcttaccgccccacccggaaattgagtgagagcggcaagacggggccagctactgtcattatctcgggtatcggtctgggtatgctctctactgccattccggtaattgccgtagtggtgggcatcattgcttcctatctttttgcttccggtttcgactttgccaatgtaggtctgggactttacggcatcggtatcgctgccgtaggcatgctttccacgttgggcattacactggccacggacgcttacggtcctatcgccgacaatgccggcggcaatgcggaaatgtccggtctgggcgaggaggtgcgtaagcgtaccgatgcgctcgattctttgggcaatacgacagccgctacgggtaagggctttgccatcggttcggctgcattgacgggacttgccctgcttgcatcctacatcgaggaaatccgtatcggtctgacccgtctgggcactaccgacatctttgtgggcggtgaagcggtgtccgtacaagatgccactttctttgatttcatgcaccactacgatgtaacgttgatgaatcccaaagttttttcgggcatgttcctcggttcgatgatggctttcctgttctgcggactgacgatgaatgccgtaggtcgtgccgctgcccatatggtggatgaagtacgccgccagtttcgcgagataaagggtatccttacaggtgaggccgaacccgattatgaacgttgtgtagccatctccacgaaaggcgcgcaacgcgaaatggtagttccctcgctgatagcaatcattgctcccattctgaccggacttgtcttcggtgttcccggtgtgttgggactgcttatcggcggacttagcagcggattcgtacttgctatctttatggcgaatgccggcggtgcgtgggacaatgccaagaagtatgtcgaggaaggcaatttcggcggcaaaggcagcgaagtgcataaagccacggttgtaggcgatacggtaggtgatccgtttaaggatacttccggtccgagccttaatatccttatcaaactgatgagcatggtggccattgttatggcggggctgactgtggcttggagcctgttctaaacataagcgattcgttccgtaagacgaaatcattcatcccgtgagacggatttattcatctcacgggatgatttttgccgtttcgcgagacgaatatatttgtctcatgggatggatttatcacaataatatcctaatttctacgttcgaagcagcgctttgtctgtaatcacctatatcgaacagaacaaggtcaccagaaacggcacgctgaaatccacaacaaatccgtgaaatatggagactacgacaaactgctgtcctgcggtacgggtgattatcgggagtgtggtatccatcgttgtggcgccgccggcagagatgggagccaggttgccaaaccagcgtaccagtaacggtgctgccagcagggtaagtatctcgcggctgatattggcgagtagggcgatagttccgagttcggctcctttgtattcggtaatgaagatactggagagtgaataatatccgaatcccgaacctacggccaggcaatcggtcagggaacggtgcgtcaggatgaggctgaccgctgcagagcctgccagtgtgcccagtatcgtcataatgggcagaaataccagccggggattgagcgaacggaaattcttcaatgtctgcgggtcgttacccacactcaatcctacactgaacatcagggcgcaaagtgcatagaagctgaccttgctatccatgactgcatcaacgggtatcaggtggaaaattccgcaaagcgtacccaaaacaaagaaaccgattataataaggctgcctttcatgccgtttttcctttcttcctatataaagctttccacagcgcccaggcagcaatgacactgcccaacgtactgcccaaggtcagtatcacggcttcgatgcctatggtgtgcaatcctttgatgatttgctcgttgccgccaacttcaatgccgaggatgaacagcagcgcccagattaataccgtgatgacagtatgaatcttatgtaaacttcttttccgtaagagatagcccagcaacattccggtgagcatcagtccgataatcgtaaacatctctgttgtattttaatttgccggcaaagatagtcatatttattctctttaaaaatccggtttacttatgaaaaggtttatctttgcgcattctaatgtagtgatgtatgctgttaccttatttaaataaagaactgatagaagcgggatgtgacgaagcggggcgcggctgccttgccggtgctgtctatgccgcagccgttattcttcccaaagatttcaagaacgaactgctgaacgattccaagcaactgaccgaaaaacagcggtatgccctgcgcgaagtcattgagaaagaagcgttggcatgggcggtggggattgtttctcccggggaaatagataagataaatatcctcaatgcttcttttcttgccatgcaccgtgctgttgaccggttgcagctacgtccgcaacatttgcttatcgacggcaatcgtttcaagaaatatcgggacattccgcataccaccgttgtgaaaggcgacggcaaatacctttccattgcagctgcttccattcttgccaagacctatcgcgacgattatatgaaccggctgcacgaagagttcccttattacgactggaatcataataagggatatcccacaaagaagcaccgtgcggctattgccgaacggggaaccactccttatcaccgcatgacgttcaatttgctgggtggcgggcagttggagcttcctttcctataatctttgttccaataagtctatccgtttggatagcaggtcgatgattctggtgttggccttgatgagttcacggaggtcattcaggtcatatgcgctgtcattgttgctgttgtttttgcaactgttgtctgtattcggattcatgcttttgtctatgtggctgaatagacttaacgcagagatacccagtacctttgcgattttgtctaatcttgtcagtgttaaatccgtttcaccatattcaattttacagtaggcacttgtagaaagatttaatttttcgctcatttgttcttgtgtcaggttcttctccaagcgtagcagctgcagttgttgtcctgcgattttctttagttttgtgttcattctgatagtattttggttaatagtaggtgtttattgggtaaatataataaaattagtgtacatacgcaatattaaaatgcgcttatctttgttaacgaaaaaaaaagttatctgagacggattgataagatgtgatatcatgattaagcagattggaaactgactgtgaagcgtattttcagatttagtaaaaagctgttcacaactatcaatattttttaggcgaaaagggagatttacacatttattataaaccctggagcagaagtactatttctgtttcacattaaaaattacaggttatgaagaaatatttattggttttattgggtctgcttgttttgactaccactacttactctcaggaattaacggagaaagagaaagcaagacaagaaaaagaagcacgaaaacaagcaaaagagaatgccaagaaagaagctaaattgaagaaagcagccaagaaggatgctaaaatagctgatttgcgtgcagattatgaagaatttttggcagagtgggagcctatcgaagccaatataggcattgcggaagttgatacattttttatacacacgaatgaattgtttgctttgctgcaacgggtagaagagaatactgcttttatagagatggttcccgaaccttattttgacgaagaaatgggagtgacggatacaatttggaatgccaaaaacaagaatacaaacgaacccattgccaagaatgatgcgctgaaagtatatagtatcgctactctgaatcttacagaggctgctgcccgcggagtctcccttactgctgaaagcgtatcggcactggcatctctgacttcggacccattgaaagcattgacaatcggaaagaaagtgaaacaggcaacaaaagctattaagatgtctgtaaatgtaattccattgattcagcgtaatatcaaagagaacacggagaaactgaagtataagaaagccaacgaggggcaggaagtgaaagaagaatagttgtaaacaagggacagcacgatgaaaaagatatatttattgtttgtaatgcttactcttgctttgggtgtttttgcccaaagtaagggtaagaacgcaatgaccttacgtcttgtagatataaaggttacggacggcactttggtgaatattgccaaagagcaggaggccaaaggtaataccaaacctatggatatgattcgtatctatgaggggaatgtacgtgccaagctggatgaagtggcaaaggcgagcgggcgttttgagatatccgatgaaaacgcattggaagccctcacacgggatgcagaggccagtctgtttatgaagatgtccagagcggaaaagatagagtacgtatcctccaagcagaatgactatacgctttcctgtgatataaacagttgccagttcacccgcagggcaggtggagcaggttattcctgtgtacttcgcctgaaagtaagcatcagtgatgcgcgcgattctacggcggcagcattgatttcgcgtgagtttatcagcgatatcaagaaaaccgctatccgtcccaaccgggacgctgcttgtcaggaagctctggctactttaacggagcctttgacggacttctttttaaataatatcccggtatacgggcttctcggctacgaaggagatgaatatgtcattacctgcggcgagagcctgaatataagaaaaggagatcagttccaggtttctttgataaaatatagtggcggggagcgtcagagcgaagtggttggtgctgtaaaggtacaagacttgcgcgcttctacatctgcggtttctttcaccgagggtaaagaccgtataatagaattgatacctacattggatgccaacagtttcctgcaatgtagactgttacttttaaaatcccgttgatatatgaagaagatattgattttttcttttttctgtttactgtgcttcacgacttcttttgcccaaaaggtaaaaccggtgaattatggtggatcggttaatttaatggaagtaaggggacgtggaggagatgccgtcgtggtactccgtacgttgggatatggcaagaacgatgctttggcgcaggaagatgcggaagtgcgtgtgatccgtgctttgctttattcgggtttttccaaggattatccggctgtgatttcgatgacggagtcggaggcggaagcgaagagccagggcaagttgcttgctttttttgagaacaaggagtataaggattgtataagttcggtgaagcccatgggaaaactggacaaagtgaaaggtgagaaagtaaagaaaaagccttttgatattgcagtcaactattatgttttgaagaataagatagcgaatatgaacttcgattcgttcggtttttgattaatatagatgattatgagaatagttgtttcttttttaagtctgttcctacctctttatctgttagcccaaaacggtcaggcgagacagccgaatgtaatggtggttccgtttgtagaacccggagaaggagagaacgaccggataaaagatgcggttctgaatgatgaagctgtgccgttggctctttccaagataaaggaagagtttaatttgcgtaatttcaagacgattgactttatgacggagttccagcgggtacaaaaccgtgcttatgcggcctctgcattgaatgccaaatctaccggattgcaggcgtatgtggatggcgcacgggcggatatatatgtgacggtgaaaatttccaaagaagatttcgccggaggagcttccaatgtcactcttttgatggaggctaaagagcgtgagaccggtttttcgttggcaaacgccagtattgtgagcgaccgtttccgtgcgtctaaaaaagagctgaccgaatatgccttggaaggcatctctgagaatttcttcaaccagttgaaacaggcattccgtgatatggtaaccaatggccgggaagtgaacataaccctcaatgtcgatgaaaactgcgactttgatatggaaaacgatgttgtcggcacaagagatatgacgttgagtgatgaacttgacgagtgggtgcttgaaaatgctttcaaaggcaacggtgaagtccgttcgggaggcaacggcctgaatgtctatatgcgtgtgccggtatatgaccctgatacgggaagaccgcgttccataaagtcggaaacgggcaagctgagaaggtttgcatcaggattgttgaaagacaaaggctatacggttagcgagaaagccgcttccggacaatacatacagcttttaattcagaattccagggaataacattggactgggtgtccggcaggtattttatggataagatacacagccggacatctgtcttttaataattatgatatgaagaaattcttatttctattgattgcaggattttgtaccgttcagctttcgggacagacaatcaacttctccgtacaaccgttgtccggggaaagcgagttgtccgcagcatcgcaagaaatgcttcaaaacaagttgagacaaattatcacccgaaacagtgcgggagcggcaaacgactataatgtctttgtcatagaaccggtgataacggttttagacaagcagtccacttcgggattgatgcgtaataccacgcttgtaaagggagaattgacgctggttgccaagaacaggatagacggcagcatgtatcacagtgccgttgtgtccgtgtccgggcaggctgcagaaggcgccgacccctataaagccatgatttctgctctgcgtacaaccgatccggtttacacccgttttatccgtattgcccggcagaagatacaggattattatgccgctaattgtgctactattcttcagaaagcacaaagcctttacaatttgaagaaatacccggaggcattgagttatctttctgccgtgtcggagagtgtgccttgttatgagcaggcttccgtgctccagacggagttggcgcagtatgtgcccgatgtacagccggatacggtgattatacagaaagtgatagagaaacctgttgaagtggagaaaatagtggaggttgaaaagatagtggaaaagccggttgtggttgagaaggtagtcgagaaacctgtgattgttgagaaagtggttgaaaagcccgttgcgcaggaaactccggcagcccgctgcgaaattaccctttccacaaacaggttgcagttcaaggttttgaagtgcacaggtaatgctacccagcagcgtatcacgattttggcggaaatgaccaatgtggacacaggccgtaatacggatgagttcttgcgatttacttccgcctttacggacagtggtacggaatgcaagaacttcgagatacagaacggggcatggatgaagatgccgccccgtgtaacggtacggcgggagttttatgtaacgaacgtattcgacagattctcccttttttcttatatagagttgttggtagcggatacaaaagtatatattcgtaacctgccggttcaatggcaataaaaagataaaaagcgtatgaaacgattgatatggatgattttcatcacattgctggctgcgggtgttgcagcccagaccaaagtggtggaaaggagtgcaaagaaagttccgggctggctgaatacggcggtggaagattatctggtagtgtcggttacggccggttcgttggcagaggggcagacgaaagcgttgaccgagataaccgaacgtatcattcagtcggtagccagcaatgtaacggtgtccaagaagaatactctttcggaagtcaatgtgaatggaaacatagaatcttcggatgcttttacgcagatatccaggataaagtctgccaatcttccttttctgaaagggatttccctttccaatgtcgaagaaatctattgggagaaagtccaggacaaagctacgaaaaaagaacattataattattcggtaaagtatcctttttcgcgtttggagcaaaggaaactgactgcggaatttgaagcgttggatgccggacaggtggcccggtatgaagcattggagcagaagataggggcaatcgaatctgccgatgagataagccgtgccataacggaactgaataccttgtccgagtatttcttcgatgatgtacgtttgagccgggtaaaggggctgactgcccgttacaggcagttgtacgatgcgcttacactgacgggcactttccttgaaagcggaaagtatcagtgtcagcttctgttggatggtaatcctataaaagtggcggccaaacccaaagttacgtccaactgcgccggtcaaatcagcgtccgtcctgccgacggaatgttcctcattacgtacagtgcggaagactgtctgccggaagaagagaacttcctgaacatttcactgacagtcggcggcaagcgtttgcagcataaagctttcctgaacgaggcaggaacgggaagcatggctttctccgtcgtaccggaagggaaactggtgctgacggccgattccgtggcggacagaaagatattcaatatcaatatccgcctgacattgaacaacaggggcggtactcctttcgggttgaaggcgctggaacttcatgttcctgaaatatccgctcctattatattcgatgatatagatggcgtttataaaaccaaaggcatcatacagataaaggcattggcagagggtgaatttacggtcggagagaaaaagaagtcgcttttctcctttgtgcagggtgccataacattcgtcaatccgcaaacgggtgccgtagagcgctcccagttgtctttaccttatgtcacaaactgggaatgagtatattattaacaattaaaaagaaatgattatgaaaagaagttttgcgttttttgcgcttgtctgcgctatattgttcggttgtacggcaactgccggtgcacagtccaaagctctgaaaaaggatgtcaagaaaagggtgaaagagttgaccaaagagggatggaagccattggcaagttcttctacgctggagtatgctttttccaagtaccgcacgtatctggaggaagatccggaaaaccgcatcgagctggtaggtattgccatcggcaagaatgtaaaaataggcagagagaatgccataatgaacggcattaccagttatgcttccagagccaaagcacaggttgtaggcaagatgaaagggttgatgtcttccgaggcgtcttctactccggaagaggagattgacaagttcggcgcggcttatgaatcgggtgtcaatacaaagattgccggtcttgtgaagcagcaccttgtattggtgaaagaaaacaaggacggcagcaaggaattcaatgtatatatgtctatcgatgaggccaaagcaaagaaagccagggaagaggctgcgttggcggcaaaaaaacaggcggctttgggcgtactctcccagcaagtggaggagtttatcggcgaaccggtagaggctgagtaatctatatggacttataaaggttgttcctgtggcacagtgctccgggtgcaacctttttcggttatttaaaacgatgcgaccatgaagaaaacaatatcttttattgcagggcttttattggctcttacgggaatggctcaggagaacaagggcggcatatccggttttatgaaagaggagctggaagacttcgataaatttatggatgatgccgataaagacttcatcaacttcatgcgtgagccctggaaggagtttgaagcggagaagccggttttgaagcgggtgaagcccgaaccggtgaagccggttgtatacgatgaaaagactgcgccgaagagtgaaaagccggtttgcctgacgattgaggaaatactcgatatgacaacttcggaagggaaacagaagccggtagtacagcttaatgaggtggacagaattgtctttgacaagcccgaagtgatagttcggaagaagaaagacccgaaagtcatcattatcgaagagaaagctgcggacaagccggcggtgcagccggaaaagaaaccggtggtcgaggttgtcgaggccgaaccggaagcagaacctgctcctgttgttgaagcagaccgacgtccggagctggcggcagaaccccggttaccggtctcctcaactccaacgtccccattgtacaggggcgaatcgggacgcagcaagatagcgtatggcggtctggctttttatttgaataacagcctgaaccgtaaatgcagcctgaacggacttaatgagaatgccattgcggatgcctacgaggctttatgcaactccgattacaagccgttattggcagattgtgcgcagatacggaaagatttgcggctgaacgattggggagtttttacattggtgaggcaggtagccgatacttattgcggtacggccaatgaaagcattgtaatgcaacagttcctgctcaatgaaatgggttacaaggcacgtatggcaagaaaagccacggaagataaaatgatgttgttcgttgctacggattgttctatctatgcgcatccttatataaccttaaacggtcagaactactataatctcagcggcaataatgaacaatgccagttttacatgtgtcagaaagactctcccaaggcaaagaacagtgtaggaatgcaattgaaagaggctccgttgtttccgggtacagtcgtcagctccactcaccaggcaaagggaagcgctgccagggtaacggtggatgttccgaaggctttgatggatttctataaagattatccccagtgcgattacagcgtctacttcaatgctccggtcaatgctgccatggaaaaccggatattatcttcattggctcctttggtgcagggacggaatgaggcggatgcggcaaacattctgataaattttgtgcagaccgctttccaatatcagacagacggccaacagttcggatacgagaagccgttctttgtcgaagaattgttctactatccctattccgattgcgaggaccgtgcgatgctgttctcttatctggtgcggaaactcttggggcttgatgtcgtattgctggattacccggaacacatcgccactgctgtccgcttcaatggcaatgtttccggtgattatctcatggtgaacggccggaaatatatagtttgcgaccccacctatatcggtgcttctatcggtatgacgatgcccaggtataaaacggtgtctgcaaaggtgttgaaatactgatgtctgtagcctacacgtattttcagaaccatttgatctttctgaaccatataaaggtcacggccgataatattgcggacagcagcacaatgaacacaaacgcatgtggaaatccttccaggtgtatatccacgttcataccgtagaaactggctatcaacgtaggtatcatcagggtaatggaaaggcttgtcatgcgtttcatgatagcattcacgttgttggaaatgatggaagcgaaagcatccattgtccctgtaaggatgtcgctgtagatgtttaccgtgttgtacgcctgtttcagttcgataacaacatcctccagcagttccaaatcaagatagtccgtgtcttggaagatgtttttcaaccgtcctatcatgacttcgttgccgcggatggaagtattgaagtacaccagcgtcttttgcagtttcatcagctggagaaggtcttcgttgcggatgctcttttccagttccttttcggcggtggccacatcgttattgatttgtttcagatatttcaggaaccatacggcggaggagtatatgattcgtaaaatcagtgtcagcttattgttgacaacaatccctttgcggcgggtatgctgtatgaagtccggtatcagttcggtgtgatgataacatacggaaacgatgatatcgttgtttgtaatgatgccgatgggcacagtgataaacgggatgccgtgctggttgctctgcatcggaatgcgcagaatggtcagcagccagttgccttcggtctccgtgcgcggacgttcgtccgtatcggctatgtcttcaaggaatgattcgggaactttcagttcttgggtaaggaattggaaatcgttgtcgtccgggcactccacgtttacccagcagttaggtttccattcggctttttctacgaagccgttttcgctgtagagatactttctcattgttttgcctcctttctttagtccgaacagaggcattgcgaccaacatctccgctcgctttaattgtaaacactattgcacgttcgtgggtttgaatcgtccataatttcagttgattttatttaaaagccatgcaaaagtatgaaaatcatattggatttcatgcgttggcatggcttttttaggatttcttgttgtttatggaaagcgctcctttgtgcaaatgttatttttactttccgaatgacatagtttggccgctattttgtacctttgcaattggaaaaacggattgtaaatcaattcccttcttccatataagtagagattgtacaattaaaaaactaataattatgagcaagaaagcccttttaatgattcttgatggctggggtatcggcgatcaaggtaaagatgatgtgattttcaatacgcctactccctattgggacagcctgttggccacttatccgcactcggagttgcaggcaagcggcgagaatgtcggtttgcccgacggacagatgggtaactcggaagtaggtcacctcaatatcggtgcaggacgcatcgtataccaggacttggtaaagattaaccgtgcttgtgccgacggcagcatcctgaagaacaaggaaatcgtttccgctttctcttacgcgaaagagcacggtaagaacatccattttatgggactcaccagcaatggcggtgtgcacagttctttcgaccatctgttcaagctttgcgatatttcaaaggaatacggtatcgagaatacatttatccactgctttatggacggtcgcgacaccgacccgaagagcggtaaaggtttcatcgagcagttgacggcacattgcgaaaagtcagccggtaagattgcttccatcgtaggccgtttctatgccatggaccgcgacaaacgttgggaacgtgtgaaagtggcttatgacctgttggtaaacggagaaggtaaggttgcttccgacatggtccaggccatgcaggagtcttacgatgagggcgtaaccgatgagttcatcaaaccgattgtaaacgcgaacttcgacggtactatcaaggaaggtgacgtagttatcttcttcaactatcgtaacgaccgtgccaaggaactgactatcgtgcttactcagcaggatatgcccgagcagggaatgcacactattcccggtttgcagtattattgcatgactccgtacgatgcttccttcaagggtgtgcacattctcttcgataaggaaaacgtacagaataccttgggcgaatacctggcagccaacggcaagacccagctccatattgccgaaacggagaagtacgctcacgtgacattcttcttcaacggcggtcgcgaaactccgtacgatgcggaagaacgtatccttgttccgtctccgaaggtggctacgtatgacctgaagccggaaatgagcgcttacgaagtaaaagataaactggttgaggccattaataccaagaagttcgatttcatcgtagtgaattatgcgaacggcgatatggtgggtcacaccggtatttacgaagccattgagaaagccgtaaaagctatcgacgaatgcgtgaaagatacggtggaagctgccaaagccaacgattacgaggtaatcatcattgccgaccacggtaatgccgaccatgccctgaacgaggacggtacgccgaatacggcccactctttgaatcccgttccgtttgtttatgtcacggccgataagaatgctaaggtagaaaacggtgtattggcggatgtagctccttccatcctgcatattctgggtatgaagcaacctgctgaaatgactggtaaagacttgattataagttgataattgagaattaaaaattaagaaatgatagcaagggataatgttatccatgctaagtcgtatgcgtttgctattcgaatagtaaacgcatacaagtttttagcggattctcagaaagaattcatattgtcttagaagaagcggatgaaacaatctttaaacaggtgaacatttattttttaatgctcaatttttaattttcaatttactaatgttacagatagatgatgttgtagtttcttttgatgtactgcgcgagaagttcctttgcaatctggatgcttgcaaaggagaatgttgcattgaaggggatgccggtgctccggtggaatttgaggaggtagagaaactggaagaggtactgcctgtgatttgggatgaactttctccggaagcgcgtgccgtgatagatgcacaaggagtggtgtacacggatgaagagggcgatttggtaacgtctatcgttaataacaaggattgtgtatttacttgctatgacgggaaaggctgttgctattgtgccatagaaaaagcgtatagagaaggtaagacggacttttacaaacccgtttcctgccatctttatcctatccgcataggcgattacgggccttataaggcggtgaactatcaccgttgggatgtttgtaaggcggctgtcctgttggggcggaaagaggatgttccggtatataagttcttaaaggaacctttgatacgtaaattcggcgaagattggtatgccgagctggaactggctgccgaagagatgaagaagcagggaatgatataagaaaagctccggtcaacaggtatttcctgtccgtccggagcttcttcgttgtaagatgtgaggttggtaaataaaaaattgaggattgagaattaagaattaaaatgatagcatgtctatttttcaattcttaattctcaatttttaatttcctgattatgcatcgatatttgcataggttgcgttcttttcgatgaaatcgcggcgcgggcctacgtcttcacccatcagcatggagaaggtatagtcggcttcggctgcattctcaagatgcacttgcttcagcatacggttttccggattcatggttgtctcccacaattgttccggattcatttcacccaaacctttgtagcgctgggtgtggactgcattttccgaaccgccgccgtaagtatcgataaacttctggcgctgttggtctgtccagcagtattctttcaccttgcctttggtgcagagatagagcgggggagtggcaatgtacagatacccttgctgtatcacctgcgggaaatagcggaagaagagcgtcatgatcagcgtgtcgatgtgagaaccatcgacgtcggcatcggtcatgatgattactttcttgtaacgcaacttgtctatattggcttccttgctatcctcgccgtctacaccgaagcggatgcccaaagcctgaatgatattgtttacttcatcgctttcgaatgctttgtgccacatggccttctctacattcagaatcttaccgcgaagcggcaggatagcttggaaagtacggttacgtccttgtttggcagaaccgcctgcagagtcaccctcgacgaggaacaattcgcattcttccgggtctttgctggagcagtcggctagtttgcccggcatgccgccaccggacatcggtgacttgcgttgtacggactcgcgcgccttgcgtgcagccacgcgtgcctgtgctgccaatatcaccttgtctacaatcattttggcctctttgggatgctcttccaggtaataggagagtgcttcgcctacagcctggtccacagctcccataacctcgttgttaccgagctttgtcttggtctgtccttcaaactgcggttcggccaccttgatggagataactgcggtcagaccttcgcggaagtcatcgccggaaatctctacttttgccttttccagcatcttgttgtcttcggcatatttcttcaaggtacgggtcagcgcacggcggaagccggccaggtgcgtaccgccttcgatggtattgatattgtttacataagagtggatattctcgttgtaggaagtattgtacatgatggctacttctaccggagtaccttgcttttcggtgttgatgtagatgacatcgttcaccagatgttcgcgggaagaatctatatagcgtacaaactccttcaagccctctacggaatagaaaacttcttgcttgcagcttccgtcttcttcttttacacggaggtcggtcagcgtaattttgatgccggcgttcagataggccagttcgcgcatgcgggttgccagaatatcgtagctgtagaccgtttcagtaaagattgtagcatccggccagaactgctggcgcgtaccggtgattgcggtagtgccgacttcctttaccgaatatagcggatggccgcattcgtattcttgctggtagatttttccgttgcggaaaacctgcgtcgtcatgtgcgtggacaatgcgtttacacaagatacaccgacgccgtgcaaaccaccggaaactttgtaggaacccttgtcgaatttaccgccggcatgcagcacggtcatgacaacttcgagagcggatttctgttctttttcgtgaaagtctaccggaataccgcgtccgttgtcttgtacggtgatagagttatcttcgttgatggtaacttcgatgtggtcgcaataaccggcgagcgcttcgtcgatggagttgtctacaacctcgtaaaccaagtgatggagtcccttggaactaatgtcgccgatgtacatggcaggacgcttacgtacagcctctaaaccttccagtacctggatgttactggccgagtaattgctttcgccgtttatcttttcttcttcagtcataatctaatttctcttattgtaataacaaagcaaaaatagtgaaaatccttgatatatcatgccggcggcttgataaatttgggctgtttacagctttttagcaccgtgaggatttgtttgttttgagggtattgcccggaaatgatacaaacgcagaaaagtccgaactaaaaagtccggactcccatatcttttgtgtaacttatcagcttaaccgagtttgttgatataaactgccaactttgacttcaggttgttagccttgttcttgtggattacgttagtcttagccaacttatccaacatctttgtgataccaggatacattgctgttgcttcagctttatctgtagtagcacgaagcttacgaacagcatttctcatggttttgccataatatctgttgtgaagtcttcttgtctcttcttgtctgattcttttcagtgatgatttgtgatttgccatctcgactaatcttttttaattcgtttatctttttaattgtagcccgtgggggaatcgaacccccctttcaagaatgaaaatcttgcgtcctaaccgatagacgaacgggccatccttgttgaacgtttccgctctttgcaaccgtttttcctttcgtttgcggttgcaaaggtagaaactatttttgaattggcaaacatttctgataaaaattttgcagaaattcttctgcgttttctcttgtgtgtggttttatttattgataatcaggtatataatgatgttttaaattttctgtatttgcttcattttttttattcctcttctttaagttccgtagtttcgcgctttttttgtagctttgttagccggattgaaacttgattaaaggacggaaatgttacagaaaacgcaaggaatcgtattgcattctttgaagtataaggatacttctattattgtagacatctataccgaggtgtccggacgggcttctttcctggttccggtgtcccgttcgcgcaaggctgcggtgaagtcggtactgtttcaacctctgtctttggtggagctggaagcggatttccgtccgaatacttctatatataaggtgaaagaggcaaagtctttctatccttttacttcgattccttacgacccttataaatctgccatcgctttgtttctgtccgaattcttatatcgtgcgctgcgcgaggaggcggaaaaccgtcctttattcgcttatttgcagcattccattgtctggttggatgaatgcggcagtggctttgccaattttcatctggtctttttgatgcgtttgtcgcgttttctcggattgtatccgaacttggaagattatcacggcggcgattattttgatttgcagaatgcctgctttaccccgttgcgtccgcaattgcattccgactatatagcgccggaagaggcggcacgtctcacaaggctgatgcgcatgaactacgaaacgatgcatctctttgccatgagccgcatggagcgtgcccgttgtctgacgattatgaacgagtattaccgtttgcatctgccggattttcccgtactaaagtctttggaagtcttgaaagagttgtttgattgagctccgtttcaaagggcattccgtttccttacgtgtttcctggagtttcctgtagagaaacgcgcgtttcccttaagggaaatttcagtttccttaaagggaaattctcgtttctatgaaagggaacgggcgtttcttccgggggaaacgggcgtgtcataggcatggaaacaataaaagccgtacttcaaactgctctccaaccggaggggagcttgaagtacggctctgtacgtattgggttgggcagaacgcttatcccagcaattcctttactttggccgagatggcacgtccttcggcaagcccggcaagtttcttgctggctacacccattaccttgcccatatccttaccgctggtagcgcctgtttcggcgatgatttccttcaaggcagcttccagttcttcgggagacatctgcttgggcaggtatgcttccataacctttacttgcgccagttctgcatcggcaaggtcctgacggccttgctgcacgtagatttcggcggcgtccttgccttgctttgtcagcttctgaatgattttcagggcatcggcatcggtcagggtatcattggctcccggagcggtcttggcttcgaggaatactttcttgatgtttctcagggtttccaaagctactttgtctttggctctcattgcgtttttaatgtcttcgctgactctttcaaataaatccatattgttctttattgttttactgtttataatgtactgtttccggttgaagtccggaacggcagtcggtttagaaagtgattatgccgttgccgccgctttccgcttcctgcgcttcttcggtggcgagtatgccggcttcttccgccttgaccttgattgccgccagggtactcttgtcgcgttggtaggtaggggagttctccaccatgctgatgatgtcggcgttgtccaggtcttcagggttgaagatatagatatgccggcggcgcagacgctgatacttggtgttggcatcctttccgtagtaggtttcgcggcgtgagcgtctttgctcttcctcttcctccagttcggcaaggcgcttctgctcttctgcggtacgctgggtgatgcggtcgtccatctctttcatatggatgtcctggatgccgaagccggtggcaagcagggtaatcttgactttctgctccagtttgtcgtccacggccataccgaacttggtttcaaagtcgcggctgaagcggttcatgaactctttcacttcgtccatttcgctcatcatcaatttgtattgcgagctgtacgagatgttgagcagcactttcttggagttgaagatatcgttgttgttgagcaacggagagtgctgggcattctggatggccatgctcacgcggttgtctccctcgccgtagccggtactcatgatggccacgccgccgtctttcagcacggttttcacatcgttgaagtcgaggttgacctttccgtgcagggtaatgatttcggcaatgctcttggcggctaccgagagggtgtcgtcggctttgtcgaaagcatcgtctacggagagttcgctatatatttcgctcagtttttcgttgttgataaccagcagggcatctacatgcttgctgatttcctccacgccgtccagtgcttggtctatcttcttgtcgccctcccagcggaacgggatagtgacgatgccgatagtcaggatgtccatttctttggcggtctgtgcaatgataggcgctgcacctgtacctgtgccaccgcccattccggcagtgatgaataccattttagtaccgtcgttcagcatggccttgatgtcttcgatgctctcttcggctgccttgcgggcacgggcaggacggttgccggctcccagaccctctttgccaagttgcagcttcacaggaacgggggagtctttcaacgcctggttgtctgtgttgcacagcacgaacgttacatcatgtatgccttcccggtacatgtggtttacggcattgccgccaccgccacccacaccgataactttgatgattttcggtgaatcggtcggaaaatcgaattgtgctatatcatccatgattatagagtttttaattatttcatatcatcgtccgagaatatctcattggagattttgttgaaggtcttttcaaaccagctgggacctttctttttcttctccttttctttcttctcccgctctttgcgttctttctccctgcgctccttttcctctttctcgcgttgcgctttggcggcacgggctgcggcttcctgttctttcagggcttcgtcgttaccgaacatgtcagcgggggtggacgtagggttgccggctggttgtaccggtttcacctcctgcaggcagcagttttcgttgcctgcggcaagaaggccgagcaaggtattctgcataccatccttggtcagtacgtcactgaatccgtgaacggtatcatgcacgaagcgcatcgtctttactttctctattttgctttgcttgcggaaagcttcctcgatattcttcaggtttgctccgcctccggtgaatacgactccggagaatagcttatcctcataaccggagagctgcaactggttccatacgttggcaaggatttcttcggagcgtgctccgataatgttgttcagcgtggccagctcaatggcgcgtccgtcttccagtgcacatacggcgggtgtctcgctctcttcctcttcctcgtagagggcgttgccgtattgcagtttcagcttttcggcatcctgctcttccatctgcagggacgtgatgtcacgggtaatggtgttgccacccagcggcaatacgctcaggtagcggagaatattgttcttgtagaccgaaatggtggtggtatcggcgccgaagtctaccagtgcacagcccgaacgcatttcgttttccgttaaaacggcgtttgccaacgctatcggagcgataagcaggtcggctatctctacctttgcctgctcgaagctgtgttccaggttcttcttgagtgaggcgcgtgccacgatgttgaggaactgtcctgtgatgtgctggcctgccacgcccaccgggtcggcttgcagggtattgtctatcttgtattcttggggggccacatccagtacactcatgtctgccaacggcacttcaaggttctcgtcacagatagagtctaccaactcttgcgagatgatgccttcttcttccagtgtacgactcaccgcgttttttactgtgcgcaatgactgtccgccgatgcctacatatactttggcaatggagttgttgagctggttttccagcttgttggtgatggaagtcaatgcctgtgctgtcttgtcgatgttgtagatgacccccttgtggataaacgaggacgcatcttcgcgtgcataggccaacacctgaatgcttccgtcactgttcttctttcctgcgataccggaaatcttggaagaactcaactcaatagcggcgatgaaatctgttgttgccataactgttttatttactattttactatttactgtctactatttgctgcgcggtaactattctcttttcgtgcagataatctggttaccaaactcaacactgatacgggaatatttgttccagcctaccttgttcaatcctttttcgtagaatacctttacccgtttcagtttccgttcgaagtcgtccagcttaccgaggtagatgacatggtcgcctacgcgcggtaccagctctatgtttttgtcgggcaatacatgaatctgctcgatttgcgcgttccagaacgaattcttttgcaaaaatacaccaaacttatataaatccctcatggcaaacgacttttctacgtttccggtcacaatggcacggtgcgcaacgcactttgcatcgggcggcattaccgtgcccttattgtccagatagtagttctcgccgttggcgctcattatcctcaggatagggatgcgctgggttacttcgatacagagtttgccgctcggcgtcttgtaacattccacttcgtcgatgagcggatgcttggagagcgcctgctccaacgttttggtgcggatacggtccaagtgcttgcctatgggactgacgcctttcttttccagcatggcggctacttcctttttcgtgatgaagccggcatataccgtgtctttgataaccagctccacatcacggcacacttgacccgccggcttccggttgaaagcggtaacggccactatcaggtaggcaaggacgagcaacaggacgatagaaagtagaatccttttaatcataggcttatttgctgtttactgttttacggtttacgctttgctgcgctgttcgagcagccgggctatggaaggtacatagttgtccaggtctccggctcccagcactatcagcacttcaaccggtttcttcgagagcaggtcgggaatgtcttccttcctgcatatgcacttttcgatgcccgggcgcaggttgtcgtatatgagttggctgctgacaccgggaatgggttgttcgcgggcagggtatatctctgtcagaatcacttcgtccagtagcgagaggctgtctgcaaagtctttgtagaagtctctggtacgggtatagagatggggttggaagatagccgttatcttcttgtcccggtaaagttcgcggatagacttcacgctttgcgcgatttcggcgggatgatgggcgtagtcgctgaggaatacgagtctgtccgtctttatcttgaagtcgaaacggcggtctacgccgcggaaactggccattccctgtctgatttcctcatcggtgaccccgttcaggtgtgcaagcgccatggctgccacgccgttctctatgttgatgccgataggtacaccgagccggatatcgttgatgcgggtgtccggagcaatgaagtcgatgacgatttcaccgtttccgatgcggatgttctcggcatggaagtctccttcgtcgcgggagtaggtataagttcttacgcccggctgtacatccggctgcaaggcaagccccttccggataatcagtgcccctcccggttggataagggtggtatagtggcggaagctttcaagataagcctcgcgcgtaccgtatatgtccaaatggtcggggtcggtagaggtgataacgctcatatagggagaaagccagtggaacgaacggtcgaactcgtcggcttcgattacggtgtacggactggccggagataagagcaggtttgttccgtagttcttggagatgcctccgagaaaagccgtgcagcccacatgcgactggtggaagagatgcgccgccattgtacttgtggtggtcttgccatgcgtaccggcaacgcagagtcctttgctgctgcgggtaatcgtgcccaatacctgggaacgtttatgtatctcgaaaccattctcccggaaataggccagttcggcatgctcctgaggaatggcaggggtgtacaccaccagtgtgctttccttgtccttgcaattttcagggatgagaccggtgttttcctcataatgtatttgtgcaccttctgcaatgagatgcccggtcagttcgctcggcgtacggtcatatcccgccacgaacttgcctttggatagaaaatagcgtatcagtgcgctcatgccgatgccgccggcaccgacgaaataaacggattttatggtttctatattcatgtacttgtcatttaataagtttcagcacctctttggcaatgacggttgccgagtcgggcaatgccaatcgggcgatgttgttgctcaattctttcagtttatcactgtcttttaccgtatccagtgctgcgggcaggagtttctcttcggcttccgcgtcctttacgtagatggcggcgtctttatcgacgagcgccagtgcgttcttggtctggtggtcttctgccacattgggcgaggggacaaggattacaggcttgtgaagcaggcagaattccgaaatggagccggcgccggcacgggagattaccaaatcggcagccgcataggccttcgccatgtctttgatgaaatccgtcacatacaggttgggtatggcattgatatgcgggtggtgtacggcttcaccggttgccgcggtgatggcgtcccttacctggtcgatgtatattttgccggtctgccagatgaactgtatgtcggggttctgccggatgacgtcaaggccggcggtcagggtgcggttaatggtgcgtgccccgaggctgccgcccagtatcaggatggtctttttggacgggttcaggctgaagtagcttacggcttcttcgtgcgcaacggcatgtccgagcaagttctggcggacggggttgccggtcatgataatcttctctgcagggaagaacttttccatgccttcgtaggcaacgcatatcttgcaggctttcttggcaagcagcttgttggtgacacctgcataggagttctgctcttgtatcagggtaggcactcccatcattcccgccgttttcagggtagggccgctggcatagccgcccacgcctactgccacctgcggacggaattgcttgatgatgctgcgcgctttccattggctgcgtgccagtttcaccaatacggcaaagttcttccacaaatgcttgcggtcgaagcccgccacgggcaggccgataatcttgtagccggcatcgggtacacgctgcatttccatgcgtccttctgcacctacgaacaggatttccgcatcaggacgcaattccttaatcgcgttggcaatggatacagccgggaaaatgtgtccgcccgtgccgccaccgctgatgataatgcgcggcttgttgttctttgtttccatatctgagtttatctacttgctactactgataattaatcttattcaaattcggcatcgctgttcagcatcttggctgtcggctcggcagcgctttgcgcttcgctgtaagtgctttcgttcccgttgccggtttccacctgcatggtgatttgggcatcgtgcgctctctgttcttccagcttggcggtgtaccggctcacactcagtatcatgccgatataggcacagtttatcaacgtcgaagtacctcctttgctgataagcggcagcggttgcccggttacgggagccagtcccacggccaccatcatgttgaagatggcctgcgacaccagcagcagggctatgccgatgatgaggaaggcggggaaggtgcggtcgcatttctttgcgatacgtcctacacgtatcaacagacagatgtagaggaatacgactatgactcctcctaccagtccgagttcctcgatgataatggcaaagatgaagtcggagaatgcctggctcaggaagtcacgctgtacggagttgcccggtcccttgccgatgacattgctggtggcgacggcgatacgtgcgtgggctatctgggcgtctttgtctatatcgaattttgcggcaggcactacctcgtcactcgtaaacttctcgatacgggcacgccacgtgtcgaaccggtgcaggaaaggtatgtcgctgttctttgtcatcagcaggaaagttacggcaacaatgcctaccgatgccaggctgccggtcagcatcaacagtcgttttgcagagacacgccctatgaacatcatcagaaagactaccccgaacagcaatgccgccgtggataagttctccggagcaatgagcaggcagataactccggttattatcataatccgcttgaaagccttcgggttggcgccgtcctcatcctgccctttggacaggatgaaagccgtgactatgataaccgccattttggctatctccgagggctggaactgtatgcccatgaacgtcatccagcgcgccgccccgttgatacgttccatcatcatgaccagtatcagcagtattgcggaagccggcaacaggaagacagggaatacctgaaaccatttataggggatgttgtgcatgaggaccacaatcacagcgcctaccatcaggattatgctgtgctgggtgatgggcccccaatggtcgccgctcttataggtaagcgtactggcagcactgaacacctctgtaatggagatgaggcagaggaagaggaaaataatccagattactttgtctcctttgaatatgctttttaataaatccatttataactctcttacgtatttcttgaattggtcgccccggtcttcatagctcttgaagaggtcgaaggaagcgcaacagggactcaataatactgtttcgcctttccgggctaatttgaaagcggcgtctaccgcgtctttcatgccggtctgcacatcggccaccggcagaccgaggcggtcgaaaaagccgtgcagcttttcattgtgcagtcccaggtagaccagcgcggagcatttgctacgtaccaaatcctctatttcggtatagtcattccccttgtctttgccgccgagaataagcacggttttggttgtcatgctttgcagggcgtaccagcaggaattgacattggttgccttggaatcgttgatgaattggacgccgcgtacggtcgctaccttttccagacggtgttctacacctttgaagtcggacaaggctttgcggatatcttctttgcggatacctgcaaggttggcggaaatgccggcagccaatgagttatacaggttgtgggttcctcgcagggcaagttcttcctgctccatgttgaaagcaatcggttcgttgatttccacttcaccgtcttccacataagcaatggcgccgtcttcctttacggcggcaaaaggatagggatgggcttttaagccgtgcttttccagctctctgcggatgatggggtcgtcgttccagtagatgaaagcatcttccggagtctggttttgcgtgatgcggaatttggcatccacatacttctgcatgcagtgatcgtatctgtccagatggtcaggggtaatgttcatcagaacggcgatattggcgcggaacttatacatattgtccagttggaaggagctgagttcgataacataatagtcgtgcttctccatggccacctgcaaggcaaggctgttgccgatgttgcctgccagccctacattcagtcccgcactcttgaagatgtggtaaatgagcgaggtggtggtagtcttgccgttagaaccggtgatgcaaatcattttggcgtttgtataacgtccggcgaactctatctcggagatgatggagatgcctttttctttcaatttcagaatcagcggagcgtcgttggggatgccgggactttttaccacttcatcggcattcagtatcaactcttccgtgtgctgtccttcctcccaggcaatgccatgcttgttcagcagttccttgtatttgtctttaatggcagacatgtcggatacgaacgtgtcgaaacctttcaccttggcaagtacggcagctcccgcgccgctttcgcctgctcctaaaactacaattctactcatatactattataattaagatcggtaactcttcatttttcattcataattcttcattgggttgttatcttatctttaacgttataattgttattgctgccagtacaatggttacgatccagaagcggacggtaatcttcgattcatggaacaattgtgccggttgggtaaataccactttgcagccgggctctatcagattcatgccggtgcggaagtggtcgtgtatcggcgtccgtttgaagagacgctgttttacccctttccgtttgccggctttgtagtatacccgttgcagaattaccgacaggttctctacaaggaatataccgcataggataggtatcagcagctctttatggatgataatggcgtatacggcaatgatgccgccgatggtcagactgcctgtatcgcccatgaatacctgtgccgggtaggcgttgtaccagaggaagccgataagtgcaccgatgaaagcgcagataaagattaccagctcttccgaacccggtatgtacatgatgttcaggtaaccggcatattcgatatggctggatacgtatgccagtatgcccagtgtcagaccgataatggcggagttgcccgctgccatgccgtccatgccgtcattcaggttggcgccgttggaaacggcggttactacgaatatggtgacgagcacaaacagtatccagcccgccgtttgtgcgtgttctcccatgaaagacacgaggtcggcatagtcaaggttgttgctcttgaagaaagggatggtagtctgtgtagccttgatttctttggcggcatgtactacctcgatgccttgtcccggtttctctacctcgatgttttcacggataacgacctgcggactgagatacagggtaagccctacaatgagtcccaagcctacctggccgataatcttgaacttaccgtgcaggccttccttgtctttcttgaatatcttgatgtaatcgtcggcaaatcctaatgaacctaaccacacagtggtgataagcatcagaatcatatagatattattcagcttgcccagcaacaggcagggaatcagaatggcaaagataatgataactccgcccatgctcggtacgcccaccttgtttacgccgaacgggtcgatgttggcatcccgttgcgtctcggtaatctgtttgcgtttcagcaggtcgatgaacttgtcaccccagatgctcgaaatgagcaatgccaggatgatagccatcaatgccctgaaagatgtatagccgaacatacccgcaccggggaagtcgtatttatctaaccattggaataagtagtataacataatttcttactttatcactttaaaacattatcgcctttagttcttctttgtcatcgaaatgatgcttcactccttttatctcctgataattttcatgtcctttgccggctacgagaatgacatctcccggttgcgccagcatgcaggcggtctttatggcttcttttctatcggcgatactgattgtcttctgcaaatcgtccttatccaaccctgccagcatatcgttgatgatgtcttgcggctcttcaaagcggggattgtcggaagtgatgatgacacggtcgctcaaacgggcggactctttagccatgataggacgtttccctttatcacggttgccgcctgcgccgactacggtaatcactttgcctttgccttccagtacgccgtggatggcattcagcacattcaccaacgcatccggagtatgggcataatccacaatggcggtaatgcccttcggagagcggatagagtcgaatctgcctgctacagggtgcaaagtgctgagggcaacgagcacatcttcttctttctttcccaacagtacggctgcgccgaatacggcaagaaggttggaagcattgaacttgccgataaagcgtacggccagctcatggttgttgaagtcgagtagcatgccttcaaaatgagactccaatacttttcccttgaaatcgctgaggcttctcaatgaatacgtatatacgcgcgaacgtgtgttctgggtcatgaccagcccgttcttgtcgtccagattggtcaggctgaacgcgttcttaggcatgtcgtcgaagaacttcttttttgctttgaggtagttttcgacagtcttgtgataatccaggtggtcgcgcgtaagattggtgaagatgccgccggcaaacttcaaaccgctgatacgctgttgtgcgatagagtgggagctgacttccatgaatgcgtatttgcatccggagtctgccatctcacccagcaggcggttaagggtaatcgggtcgggggtggtatgctcggtcggcacgggccggtcgtcaatgtagttgcataccgtggaaatcagtccgactttatatccgaaataacggaatgtattatataataaggtggcaatggttgttttgccattagtgccggttacgcccaccagctccattttggaagtgggatcaccgtagaaagtggtggcaaccttacccaccgcattctcgctgtcttttacttggatatatgtaacatcaggatttgtttcttccggcatgtcttcgcacagtacggctatagcgcctttttcaatggcggtagggatatatgcgtgaccgtcggtctgcgtaccgcgcattgccataaacaaatgtccggccgcaactaaacgggagtcgatattcactcctgttatatctttctccgtactgccgataatttgtaccggttgtatcgcttttaatagttcgcttaatttcattccttattatataataatgtatattcttatattaacgtaatgtcaaggctattgtctgtccttttatcaatcggcttccgcctgcgatggactggtttcttaccttgccgatgccgttgaggcgtactctaagtcctttgctttccagcagataaacagcatccttggcccccatgcccactacgctgggaactatgccgtcagaaactttctgattttgcaggataacggcggacggggcagcctggctgtgtccccacaactctctcttgttttctacctcaaattgtttctgcaccggaacatccaatgtgttgagcacgcataatgcctcgttcatctccccggcttttaccgcaggaattacattggtggtgctgtctattgcactgcgtatatcgaaccgcagattcttggcatataccctttctgcaatcttgctgaatacgctacccgccatcaagccacccgatgccggaagtccaggcttctgtatggaaacgatgcaactgtatttgggagcctctgccgggaagtatccgcagaaactgacgagataattcacccgtcccgccttataaccggcggcaccttgcgaaatctgcgccgtacccgtcttgccggctacggcaaactgtttgcttccggcgggtttggccaaaccttcggcaactactttgcgcagaatctcccgtatctgtgtcagcgtattgtccgagcaaatcttcggattgataacttccgtaggaaagtcacggacaacctcaccgtctttcactgccgcttttacgaatttagggcgcaccattgtaccgttgttggcaatggcattatagaaagtcagtatgttcagtggcggtacctgcgtttcatatcctatactcatccagggtaacgtggtcttggcaaaataccgttctttcggaccgcggatgttaggtttgccctctccggctatttgcaggtggagcgggcggtctataccgatacgcttcaatccgtctacgaacttctgcgggttgtcgctgtagtgcttgtcgataagatatgaaacgccgatattggatgatacttccagaatacgtgtcacatcaatcttgccatatccgccccgatgccagttatggtctttcatcgggcggccgtgcatcatcatgatgccgttgcctgtgtcgacttccgtatgaggagtaatctttccgtcttcaagggctaccatgatagaggctgtcttgaatgtggaacccggctccagcatatcgctgatggcgttattacgcatttcgtaatagttgccgtcgcccgctttcatcatgttgacaatggcttttacttctccggtctgcacttccatcaatacggcaacgcccacactggcgtttatctctttcagcttgtctatcagtgctttttcgcaaatatcctgcatacccacgtcgatggtggaaatgatgtcgcaaccgtctacgggagcaatgtccactatgttcaggtatttgttcatcaccttctggcgatgggtgataccgtcgcgtcctttcagcagcgtatcaaaggcaagttcaataccgtttttggctccttgcgctgtatcggcatagaggtcgccgagtgtacgtgccgccagagaaccgaaaggtttcttacgctggttgaaaggctgttcatggaagcctcctttgtatttgtttagtttgaataccggcagccttttaacttctttgtattggatataggagatacgtttcgggtaaatcaggtaattgcggctaccctttttacgtcctcttaacagatgtcttttaaattcggcggcacttttatcggggaatatctggtgcaatccttcgcagatttctcccagatgattcataagcatggtgtctttcttctctccacccgctttgaagtccatgtaaatacggtactccggtagggagctcgccattaatttaccgtccgatgaaaggatattgccgcggttgggcttcaccctaacattctcctttacaaagcggtcggcaacatcttgccagtactgacgttcggcaaacatgatgacagtaccttttacgataatagctactcctatcagtcccatgacgaggactacgaagaagtagcgggtcattatatttttcttgtttactgccaaggttgtttcgatttactattatactatattacagtttacttgtttatcggtttgcttaccattatccgtacttatttgattaagtacggcggattggtcgaagtctgcaaatcgctctctttcgttgcgatgtattcctcgatacgcgattgacggctccgttccatcagttcggaactgcgtgtcagggcatcgtattttatatctatcagttctttcttgagcttgtctatctctatcatctgctgctggcaggcgtaacggttatggatatagaacagaataagaaccatgatgaggacaagcagcttcgtctgacggcggaaaaagtccgtagccagaatatcaccgcctataatgttctttagcgaagtccgtcttttcaccttttcgcctttttgctcctcttgtttattatttgtttcattcatcgttctatctctttacagccttatcgcttccctcattcttacagtttttccgcaatcctcagcttggcgcttcgcgagcgcgggttgcgttctatttcatcgttatcaggaacaatcactttattgtttaccagacggaaaggcgtctgtacgtttccgaagaagtctttttccgccttgccctctatgttgccggtcttcatgatgtttttcaccatgcggtcttccagcgaatgataggtgattaccaccagccgtccacccggctttaatgcttccgtggctgcatataacatctctttcaacgcttccatttcccggttgacttcgatgcgcaacgcctgaaacactttggcaagctctttcttttctctttcacgtccgaagaggggcttgataatttccagaaattccccgatggtaccaatcttttgagcggcacgtgccttgacgataacggatgccagcttgcgactgttcttcaattctccatacaaatagaaaatgtcggcaaggcgttcttcatcgtatgtatttacgatgtcggcggctgtgagtccggcacgcttgttcatccgcatatcgagagcaccgtcaaaacggaacgagaacccccgttcgctatcgtcgaaatgatgtgacgatacaccgaggtcggcgagtacggcatctacctgctcgatgccatgataacgcaggaagttatgcagataccggaagttgctgcgtacaaaagtgaagtgcggatcgtttacgatgttccgttcggcatcttcatcctggtcgaaaccaagcagtcttccaccgtctcccaggcgggagagtatctcgcgggaatggccgccgcctccgaatgtcacgtctacatacgttccgtccggacggatattcattccgtcaacgcttggcatcaacagtaccggaatatgatatgttgtttcttctttcatttttctttcattacaatcgttctattactctacgctcttatcgcttgtctctgcttcttcctctcccaggttttcctctcctaaaatatcttgcagcgcttcgctgaattcttccgggttcatgaaaggctgttcagccttttctttcgcccatatttcgatggtgttgtccacgccgataaagcgtacctcactttgtatgcctgccatttgcaagtagcgtttaggcagcaggatacgtccgttcccgtcgggaatcatgatttccgcatcgcttacaaactgtcggaaaatttgttggtgtttcgcattccatttgttcagccgctgccggagttggttttgcgttttgaaccagacgctttcggggtaaagtatcaggcagtcctgaaatacatctttacgcaatacgagtctctcttcggaagcagcctgcaactgtttccgaaagccggcagggataaatacacgtccctttgtatccgtctttgcttcaatattgcctaaaaagcgtatcatttttcaccttattataataagcgacggtaaaagtacacatttccccacaattccccacaatgttttaactaaaatcttatttagaagttttcaacagcttgttgattacttattctattgaaaatgaacaatgtgttatgttgtttgtttggtggggaactggcgcagttatctgctgtaattgcattctataactgccgttccaacggagaaaaatagggtatttatgagtgcttttctttgtattgtgtgggtgaatatcctgtatattgtttgaataccgtactgaaatatcttgatgtggagaatcctgtctgttcggagatttcattaatgctaagtttgctgttggtgagcagaaaaatagcccgctcgatgcgtagtttagtgatataatcattggctcccatgcctgtaagggctttcaacttgttatagagtgaagcgcggctgactcccagttcctggtagaggaacggtattcccatttgagcattgtccaggttgtttgatattaacttatttagcttgtgtaagaaatcttcatccgcagagctgaaagtgctttctttcggctcaggcaatgagcctgtttcggtgtaacgcgcgcgtatccgttcacggttctttaattggctgcgtatcacgccgtgaagcatattcacttcaaaaggcttggtgaggtaggcatccgccccgttcttgtatccgaagagttggctctcatcatcgttgcgtgctgtaagtaatatgacggggatatgactgatttcaagttcttctttgatatgtttacacagttcatacccattcattcgcggcatctgaatgtcgctcaccacaatgtcgggctggtatttccggcaggtgtgcaaggcttcttcaccattgaaagccagccatatcttcttgaatttgttttttagagtgttgtgcaaatagtcggtcaaatcgacattgtcatctacaatgagtagtgtatgttctttggtgttttcctgattgtcatcggcatcaggaatactttccacttcttgggtgggagccaataactcgttgaggtaagggtgaggttgcagcgtgatttctccggactggatattacggggtatttcaaaccagaaagtggctcctggaaattcttggtggtcataagctcctatgcttccaccgtgctgctcggcaagaattttggaataggacaacccgataccggttccgggacgactgttgttaccttgataaaaacgggtaaacaagctgtttatgtctacttcctttaaaccgattccttgatcggaaacagagattcgtacgcacttcttatcgtccgataagtcggcagaaaccataatccggctattgtcgggactgtatttaagagaattgattaaaagattggttagtatggttgtacatttttctttgtcaaaacacaaactgtcaatcgccgtgtcggtccggtaccggatgtcgatgtttctgttccttgcttccggtttgaaatctgcaataagttgttctatccagtcgttcaacgctactttttcaatatttagtgtactttgttttacttccattttacgtacgtccaagaccatgtttaataacttcttcatacggtcggactgtttgcaaatgttttgtatggtttcatatttacaatcgtcggaagtgagcgattccaataattgctttaagggggcgtgtatcagggtcaaaggcgtgcgcagttcgtgattgatatttataagaaagcggactttttcttcatacacttgttgttcatgctctttcattgcccatttcagtttgtttgcattgcggcgcaacaacgaatagataatacccgttgcaagagaaagaatcaatgccaagcagcatgccttaaaccagcccgacttgtaccagggcggcgataccgacagttctaatatctgataatcgccggtccagcttccgcttcgggtgctgcatgaggccgatattcgatatgttcctataggtaagttgttcaatgtcagttccggtttgtaggaataagatatttgtccgtccggtccatgtacggtaaaacggaacatcggctttcgaaagatatccttgttaccggctatgattttgatagatataggcttgtttgactctatgacttccagatgcctgtgggtgatattgttattcattcgttctccgcccacccatacatccgccaagtttaaaacgggatcactgttttcctcttggggcagttgcctgttgatgtgaagtaatccgttgatgccgcccatataaatatctccttgcgtggatagtagtcgcggcttttccaaatattcgttaagtacgatgccgtcggactctccgtaaaggataaattctttttcttcaataagatgagcaaataatttgccttcggttccaagccacacttttccccgcttgtcacaaatcaatgcgctgatttcgtcgattaattcattggagatacaggtccgcttattgcttatggtagagtaataacttaaaccgtggttgcttcctatccaaaagagtccgttttcatcgagggaaatagagttgaacacagtgtcttcgtagcaggtgtggatgggtagaagccggttaaggctgtccaatcggtatatatgtttgagatcgtgcaggaaactgcgggtgctgtcattgcacaccggctgtattacaccgtctatagctgtttttccaacggagacgattggagtgaatttcttctttgtcaaatgatagctatatggagattcggaaagcaataatacggtttccggtgtattttggagtacattgacatttttcccccgttggcatagtaatgtgttgatactgtcattgactataatcagcggttgatattcctctgtttccttatcgaaaaagaatatgcctttgctgaataatgaaattaacagtcgccttttgtctatgccggttattgaagatactttatcgccccatgtcggtagtatatgattgaatttccgggtatcgggattaaacttgttgatgccgcctccgtccgtgcctatccatattttttgttcttcgtcctgatagatgcttaatacgacttgaccgctgagaccatattctattccgggtaaagcctccgaataggttgtcatacccgtttccttgatgtttatcaatccaccccatacgctgcctgcccatatgttgttattgaaatccttgtataggcagagaatggagtttgtcggtaacgagttacggtttcccggcacatgttccaatgacaccatttcttcgttttcaggatttaatatgaagatgccgtaaccgtcggttcctatccagatgtgtccgtcgcattccgtaatggatagtacaacgttggttttcatggacgaattcatcgtgtggtaagcatgtaaaagctttccgttgcgatcgtagcattttacgccttggtggtatggggcagtccatacattgcctttagagtctatgaagcagtccgtcaggtcatcacttttgaagggagcgggttgtgtctttcctgtccgtatgtcaatcagtaatgcatttttccaacggtttatggcaagcagtgtgtgtttgtcccattctcgcaaggtagtgatattatagtgattgtcgggttgcagggagcaaagcagttccgtttgccggtcagcatagttgtatttataaatctttccgtatccgccaaataaaactccgtttgtccatggacagatagaggcggcagaaagtggatgctgttctttgtctttcgcttgcaggaaattatcatccgattcattgtagtaatacaggcctttggcggtaacagcccagattttgttttcgttatcttcaaacagatgggttatattgtcgtggaggtattttttcagttcgtatccgtcaaaacgtcctatgccggtgcgtgtacctacccacacatatcctttttcatggctcacggtcaggcatcgtacggaggaagataagccgttttggatattgatgatttgctggaaagcatactgcttcatttctgtagccttaaaaggaagggataacaataggcaaatcattaagaagactggattttttttcataaggatagttcaaggggttgctgcaaaagtagtttattgttttggaaatacaaagtattgtgccaaatatccggtatgagaaagtaacttatttccataacattatcttgttgtttctgagcgaattcttaatttttcctgttctcatcttcggaaagcaacgggagaaataaggccgtcaatagctttaaacaggatattctcttatgagttttgtctttgtatatgtaccaaaacctcgttttgtaattgcgggctctccggttgccggttgcgggccgtacggttgccaactgcgggctcttcggttgccaattgcaaaacgaggaaaagaaacaggtatagcgatattatgtatgaagctttgcggtattatatataaggcattgttgtattccgtaccggagataaccggcatgaaatgtggtaaaaaacaaagaaaacaaggtataatcagttttcagtcgataagtgtcaaatgcctgttttacaggtgattggtgtggaaaagtgcaaaaaaagggtgatgaccaagtatttgtcgtcacttgtcataacgcttctcatcaccaatcaacttgtacattatcagttggttaagtgcaaaagtgacgagtgatgacggattaatcaaaatatcggtttctatacttgagtatgtttttcggtatatcacacattccaatgactggttggtatgtcagatttgtattgctctaaagtcattggcgcaatcttaaaaaaggctctacaggtatgtacagatgtatgttagttaaatttggaaatagaaatagtgataattgaacatctgtttttacggcatgatttacatttgtccgtgggtttacaggacataaacctgataaccgaattaccttataaatttaatattatgaagaattgcttatgaaaaagatttgtttcgtttttctattgctccttacgttgattcctttaggagtatccgcacagcaacagatgattcaggggcgcgttctcgacgataaaggcgagagtattattggcgcatctgtttccgttagaggtacagttaccggtggcattactaatttggacggtgagttttccgttgccggcaaagtgggggatatgttgactatatcttatataggatatactccgttggaggtgaagattaccaagctgaccggtaatgtctatacgttgaaagaagactccgaactgttggaggaagttgtggttgtcggtatggataagcagaagcgtaatactattaccgctgctgtggcaactgtgaaatcggaagccatcaccagccgtccggtaaccgacctgaccagtgctctgcaaggaaatgttgccggtctgaattttgcttcggatgccgctgccgatggagtaggtggtgagacgggcgctgaaataaaattcaatatacgcggtgtcggttccattaacggcggcgaaccctatgtattggtggacggcatcgagcagagtatgcagaatgtgaaccctgccgacattgaaagtatcagtgtactgaaagatgcctcggctgctgctgtttacggtgcacgtgctgcgtatggcgtagtgctggtgactactaaaagcggaaaacaggagaaagcgcgcgttacctatcgcggttccgttggtttcagctctcccattaacatgccgcagatgatgagctcattggaatgggcgaggtattccaatttgcgggacgagagtatgggacgttctcatcagatttccgatgcaactattcagaaaatggaaggttttatgcagaatccttattctgccgagtttcccggtatagatgtcaatcagtcgggtgacggttgggcggcagccgataatgcgcagtatgccaataccgactggttcgattattatttcaaggaccgtgctatccgccattctcataatatcagtatacagggcggttcggaaaagacttcttattatgtaggtttgggttatatctaccaggaaggcttgatggataaggtgcaggatgatttggagaagtataatgtgaacactaagttttccatacgtgctacagattggctgaagttcaatttcaataataatgtgtcgttgagtcttttgaaacgacctttggcaaaccagactattttttatggaacgatagctaatatgtcgccaagccgtgtcacgaaacttcctgtcgagcaggcggagtattccactcctacgtggaacgagcaactttatctgcaaaaggcgggctatagccagaatcgggtatcggatgcaatgtctttttctgcaattatcactccgctggaaggactggagtttgtgggcgagatgaaagcccgtttggacgtagagaacaatagtttcgagttgcgtaaaggtaattatgcgttgcctaatggttctgtaatggaagtatcgggcaataagcagggataccattatcccggtatgaagtggcagaatacccagttcggttcgctgacgcgcggcagtgtgttcaattactatctttcgcccagtgtgaccggtgcctatacccgtcagtggggcgatcatttcttcaaggggatggcaggctttcagatggaattgcaggaaaactccagtgagtatatgtataaggacggtatgttgagcgaggatatttactcttttgataatgccaatggaactccctatgcagccgaagctcggtcgcactgggctacaatgggtatgtttgcccgccttaactggaactaccggaatatctatttcttggagttcagcggacgttacgatggatcatcccgttttgctccggacaatcgttggggatttttcccatctttctctgccggctacgatatttcacgtacgccttattttaccaaacttaacctgccggtgtcacagcttaaagtacgtgtgtcctatggtcgtcttggcaaccaaaacggtgcggggctttatgattatctcggcgtgatgacactcgacccgaacaacgtgaatgcatggttgttgccgggtacaggcaataaacccgccaaaggaaccatttcgcttacaccgaaaatgataagtccctacattacttgggaaaaggtggataatgccaatatcggtttggatttgatgctgttcgatgaccgtctttccgtaacgttcgatgcctatcagcgcacgacgaaagatatgattggcccggccgaagctattcctgccgtcagcggcattgtaccggacgaccgtgcaaagataaacaatgccactttgcgtaaccgtggttgggaactttccgtcaactggcaggataagttgaaatgcgggttcagctatgggataggttttaatttgttcgattataaggctgttgtaaccaagtataataatccggaaggtatcatttataataatcataccggtttggcgcgtaataaaggatattatgagggtatggatatcggcgagatatggggattcgtggccgacgaccttttcatgaccaaccgggaagtggacgattaccttcagagtaaggacctctctttctttaaggcagataatctgtggcaggcaggtgacttgaagtatatcgatgtcaatcgagacgggaaagtggatccgggaaaaggtacgttggacgaccacggcgacttacgcatcataggtaacaccactcctaaatattctttcggtatcaatctgaaagcgggctacaaaggtttccaggtttctactttgttccaaggtgtgggtaaacgcgatttcccgttggcgggcagtacttatctgttcggcggaaagaactacttcaaggaacatctggattatttcagtccgcagaatcccgatgcctatctgcctcgtctggccgatccgaagacagacgattacagagtaaatgccgggtataatactactcgttacatggtgaatgcggcttatatgcgtatgaagaaccttacggtatcctacacattcgacaagaagatgctcaaggcattgcgcctggagaatttacgtctttattttacttgtgataatttgtttaccattacctcattgcccaagtcgttcgatccggaaactctgaatcaggtgaatacatgggcgggcggtagcaacgatacggctccgggactgacatccgctgccaatgagaacggtaacggtaaggtatatcccatgaacagaaactttgtgtttggtattgatttcacattttaactaagtattggtaacagaataaagagtatgaaaaaaacttatttatatattgcattactaatgggagcaagcacgctgttttcatcgtgctccgacttcctggacagagaaccgataactgcaccgaataatgaatcgttcctttcgggcgaatcacaggtacgcggctatatcaacggcttgtacacggcattaccttccttgcagaaattcggaatgggagtgcgcggtgaagagaaaaacagcgataacatcctgtccgaaatttacgataggcgcctgaatggcgaagaaacggtattttccagtaatcaagcttgggaaaccggttataagaacctgcgcaatgtcaattatttctttcattactataaagtacccgagaatctggaaacggaagagattaaatcgctgattggcgaagcctactttttgcgggcctattggcattttgtgcaactgaagaagttcggagatattcccgtgatggatgctttttgggatgagaacgctactatcgccggattgcagattccgcaaaaagaccgcagcgaggtagcaaaattcattcttgaggatttggataaagcgaaggatttactgttcgaccgtagcaaatatgcaggattgcgtatttcaaaagaggcggctatgatgcttgccatgcaagtagcgctttatgagggttcttgggaaaaatatcacaaaaacgatgcctttgcagccgatacggaccaatccgagtacttcttcaatgaagtgctgcgttggggcgatatgttgcttaacagcggattgcaactgaacaccagggatacggataaagatgtggtgaatccgggagatgcttacggacgtcttttcaatcagaaagactattccagtgtcactgaagccattttttggaaacagtactctattacggaaggtgtgtttcatgccttgagcggattacttgccggcggtgtggttgaccagaacggccctgccggggtatcgggtgaattggtaaatacatatcttagtgcagacggaatacctgttgacccgaatgatgaaaaattcaaggatttcaatgaaactttcaaaaatcgcgatttgcgtcttacggaaactgtgatgagtagcggctataaattcaaatcgactatcaccggctccagaccattgaatgtgcaggatgtagcttccgatgccaaaggtatcaatccccctttcctgacgagtgacggcaatgccaagaacgtgacgggatatcacatacgacttggagtggatactacctatgtgcagggagattcggaagttgggttggttattatgcgttatgccgaagcgttgttgagttatgctgaggcagcggaagaattgggtaagtgcgatgatgccgtactggaaaaaacactgaagcctttgcgcgaacgtgccggagtgaagtatgtgaagcctgtgactgtcgatcctaatttcacagactatgggtacgcgttgacgcccgttcttcaggagattcgtcgcgagcgccgtgtggagctggcgttacagggctatcggttggacgaccttatgcgttggggcggcgccaaagttattgtcaataagcgtggacgaggcgcttatttgggaaaggatgcggtactttataaatcattcaccgaagagcagcaatcgaaacttactaccatactgaccgacggtagtcaatggatggatcctttgcaggaactgttgcccaatggctaccaatttgttgccggtcgtgattacctgcttcctattccgcccagcgaactcaagttgaacaggcagatgaagcagaatcccggttggggagaagagtaagaatatgatgcggttatttaattttagaaagaacagaccatgaaaaagagtaagaatatatattgcatattgttgtttgccgtgttgggcattaccggttgttcggaggagaagatggcgccgttacctgaacccgtacctctgaggatgagctttaatagtacggatttggtgatgggtgaaacgctggagattacttttgatgtcaccggtacggacgaaggtatgaaagcgatgaatgaggatgtaagcattaaactgagcgccactacggaaaaaggagcggtagaccgcctgttgttcgaaggatttcccaccgaagtcgttatgaagcagggagaaacgagcaagactattccggtacttgtgaaagaggggctgaataaagaatattctgtcgaaatatcggcttttgcacgcggctatagagtagagaatgccttgcaactgctcaccgtgagcgattatcattattcgcgcgtaatgataaaaaacaatgcggataatacagtgaaagagggacagagttttattttgacagcttccgtcaattctaaattgaaggacgaccttactatcgttattacgcctgcggaaggtgtggcccggcgtcttgagaaccttcccgaacaattggtgattccggccggagagagttcggtggagagtgaggctattatgatgataaaaagtacggaaaccattgccgatgaagatctgaagctcacgttctccacgattccggtggcaagccgttatccgttggtggcaaatgaaatcattattcacagaatagatatccataagggtatggatacgaagataagggatgaacggtggttgtacgaggatgccgaccaactcttcgtgtcgcctcaaaatgaagatgccgtgaagaaatggggacaactgaactatgtggtgatgaaagagggtgacccgcaccccaacagcggcaatgtgctgcccgacggtaaatggaagtttttccgcgcttatgagtttcataagattgatgcctgtctcacgacgaaggacagtccgatgggcgattatgtcagtaaggaatatccgtttggctttgccgaccagaatactgctgcggtagaaagtcaaggtgcggtggataatgctaagtatgcttatgtaatggatgaaggctatttgcgtatgatgacattgaaagagagggctaaatccggtaacgggggtaaggaatgggattatggaacatctgcattctattcttgtaaattcatgcgcggcaatgccaatagtacggcatgggcatcttccaatatccgtatttatccgggtatgcgcattgagacccgtgcccgtatccgcggtatggaaaatagcggtatgctgcccggtatctggctgcaaggcaatgagcaggtgggtggaaatgccgagtggaataactggcctgattttggagaaatagatgttatggagaataatagccgacacaataatttggcatacaggcgcggggtggaacaaactttccattttggtgctcccacgccgggagccagtaccggtgccggtgcttataatccaaccaaagctgtcacggaattggcttcgggcggcaagaccggaggtactattatagacgaattccagatttattgggtagaatggatagacgatgaaaccgttgccatagggacaaacggtgtagaaacgcttcgggtgaccaaagcgatgacagaacagaatggcggtcgctggccgttctcctacagtataaacagtgaagggttgtattacatcatcacgatgatgtttttgcacaaagcagagccgaatttcggtgcaacggatatggtgatgagctatcaggctgcacggaatatcttgaaagtgaatccggatataaagattccccgtatggaaatagactgggtgcgtttttatatagacgatacttatacggatcatgagatgccttatcgtaaagacctcattttgtattaatgtacataacaatgaaaaaaagaaagaacattaacctataaagaataataatatgaagattaagactattttgtgcacgctgtgtgcagtaactgtgttgggtagctgtagctacgatgatgatggattgtgggatgcggtgaacggtcaggaagaaagaatttccgcattggagaaatggcagaagacggttgtagaccaactgaattctttgcaggggattcttacggctaccgattatgtgaccaatgtggaaaaagtggaaaaggatggtgcgcaagggtataaaatctctttcctgcacgctaatgctattacattgtactataatgaagacagcgaggtcagtggcggaagcgatgcttcggttggtgtggcacaggacgataacggttattattggacgatgaacggcgagcctttacagatagaaggcaagaaggtatatgtgacagaaggaggcggagcttcattaacgcctaatgccggtaatcctgaaatattcgatttgacaattggcggaaccacggtgacggtagaccaaaatgcagtaggtgcacatcctattaaagaggtgaaggaagaaaacggcagggtgattgttacgttgaatgacaatacaacgaaagagctggtgaagtgggtgaacctgaaagatgctttgtcggcaacgtatgaaggcaccaacggaactgaggtgacatatccgattgcccttggagccggacatatcatgagaaaggtagacgagactcctgcagggtggacgataaaggttacgggaataggtgctgatactaaattgattgttacttatccgtcaggcaatgaaagtgtaacggtagcttttctgatttccgacggaaatacgttatcggttgttcaggaagcgacatttacatcaacagctactcccggaatagcttggaccactgttacttattctaccaatacgccgataacaattcctcccggaactcaaaatgttaaggttacgggtgatgcttctgctttagctccagctgcatttgctacgaatataacaaatcctttgaaaagtactgccgatgtagtaaatattgacttatcggaaattacttatactaaagcatttccttccaacgccttttatatgaataccccttccgtacctgatacagataaaaatacttcaatagaaactataattcttcctgaaggaatcattaatatatggggctctgcctttaagaattgcaaggcattgaagagcgttacggttggcacggcgacagatgtaccggcacagtattcagatacatggtttaccggatgcgaggcattagaatcgatatatgtaccggccgacaaagtggatacatataaggactcatgggatagcagtttgactgattatatcaaggcgataccggccgactaagttataatctgtaagtataatcagaaacccaaatgccggaaggatgggtgaatatccatgcttccggcattttacatataaaaggaaacaacaatttaatcactgattgaatcatgaataaactacagaccggatggttgtatactttgacaggggcggtttcggcggtatcattggccgcatgtatgccggcttcaaaaccttacaacatcgtctacatcatgaccgacgaccatacggcgcagatgatgagctgctatgacaatcgctatatagaaactcccaacttagatcgcatcgccaacgacggtgtgcgctttgtcaatagttttgttgccaactctttgagcgggccgagccgtgcctgcatgtttaccggcaaacacacatgtggcaataaattctatgataataccacttgtgtgttcgacggttcgcaacaaacctttcccaaaatactgcgcgaaaacggctatcagacggctgttataggtaaatggcatttggaaagcctgcctaccggtttcgattattgggaagttgtacccggccagggagattatttaaatccggactttatcacgatgaacaacgataccgttgtccgcaaaggctatatcaccaacttaattacagatatgagtatcgattggatggaaaacaggcggaacaaggaaaaacctttctgtctttttattcatcataaagccattcatcgcaactggctgcctgaaataaaaaaccttgccctctacgaagacaagacattccctttgcccgataacttctatgatgattataaaggccgccctgccgccgcttctcaggaaatgagcatattcaaggatatggacttgatttacgacctgaagatgttgaaagagggcaaagactccccactgaaagagcgctatctgagctacatagaacgtatggacgctgatgaccgtaaagctttcgacacattttatgcgcctatcattgaagatttttataaacgtgacctgaaaggtaaagaactcgccgaatggaaatatcagcgctatatgcgtgattatgcaaaagtagttaagtcgctggacgataatgtagggcgtgtattggattacctgaaagagaaagatatgctggacaatacattggtggtttatacctctgaccaaggcttttatatgggcgaacacggttggttcgacaagcgtttcatgtacgaagagtccatgcacacaccgcttattatgcacctgcccaaagggctggatgcacgcggcgacattacggaattggtacagaacatagactatggtccgaccatcctcgatcttgcaggtatcagtctgccggaagatatgcacggcatttccatgttgccgttactcaagggagagcatcctgtaaactggcgtaaggcattgtactatcatttctacgaatatcctgcagaacacatggtaaaacgccactacggagtgcgtacagagcgctataaactgattcatttctataatgacatcgatgtttgggaattgtatgatttgaaaaacgaccctgccgaaatgtataacatctatggccgacccggtaccgaagaagtgacagccgaactgaaaactactttactggatttacagcaacaatataacgacccggtgcgcttcggaccggaaagagataaggaatgatttatgttttacttgaaaataacgattttattttatgaaatactttataatgctattattatgctgctggttgcttccccccttgggctgccaggcagataacttgactcagcctttttcgttggttccctgtccggtcgcaattgtgccgggcacgggtaactttcaattcacggctaagacggtattcgcagtagaaaatgaagaacaggcggaagtcgtgaaacagtttaccgcgctttttacgaatgccgccggctttactccccgtataaaaacggaaagtaagaaaggagatgtttgcttgctaactgatgcttccttagattcggaagcctatctgttggaaatcacctcaaagaaaatccgcatttacgcatcggatgtacaaggctttttttatgccttgcagagtatccggcaattattgccggctgctatagagggtacacaggtggttaacgctttgtgggccgtacctgccatgactattaccgaccgcccccgtttcagctatcgcggattgatggtagacgtatcccgatttttcacgcctaaggagaatctgctgcgtatcatagattgcatggctatgttgaaactgaacaagctgcatttgcatctgacggatgataatggttggcgtattgaaatcaaacgttacccgctgctcacggaaattggatcgcgccgggtggaacgtccgggagcgccgttctttgcccgtcgtaatgcccgtcagggagaacccacggtggagaaaggcttttatacgcaggatgatattcgggagattgtatcttatgccatggcacgccatatcgaagtgattccggaaatagaaatgccggctcatagtaatgccgcattggcatcgtatccattgcttgcctgtccggtagtggataaatatatcggggtgttgccgggattgggaggagctcatgccgatatcatctattgcgctggaaacgatagtgtatatactttccttgaaggagtgattgatgaaatcgtagatttgtttccgtcaagatatattcacttgggtggtgatgaggcatggaaggttaattggaaaaaatgtccgcgttgtcaggcacgcatgaaagcagaagggttgaaaaacgaagaagacttacagggatatttcatggcacgtatggcgcgttatgtgcagagtaaaggccgcgaagtgatgggatgggacgagctgaccaataccgatattcccgaagatgccattattttcggctggcaggggcgtggacaggctgcattgaaagccgccaaactgggacatcggtttgtgatgactcctgcgcttatattgtatcttatccgttatcaggggccgcaatggtttgaaccattgacttatttcggcaataatactctgaaagatgtatatgattatgaacccgtacaaaaagaatggagtccggctgttgagaaacttttaatgggtgtacaagcatccctttggacggagttttgcaacaagcctgaggatgtggactatctgttgtttccgcgcctgtctgctttggccgaaggggcatggacgcaaaccgaccgtaaggattggcagacttatttaaaagcgatggaccggtttaatgaacatattgcggcgaagggaatagtttatgcccgttccatgtataatatacagcatacggtaactcccgttgacgggcaattacaggtcaagttggaatgtgttcgtccggatgtacagattcattacaccactgacggtaaggaaccggatttgcaatctgcactttattcggagcctttacggcttacgacatctaagaccgtgaaagctgccacttttgccaacggagagcagataggtaaaacattggttctgccggtggaatggaataaagcaacggctaaacctattttgggaagcaataccgaaaaactgaagttgttggtgaatggcgtacggggcagcttgaagcaaaccgatttcgaatggtgctcttggatgaataacgatacgatttcttttactgttgatttgcagaagaaagaagaaatccataccgtaacgttggggtgcatcactgtttacggaatggcagtacataaacctgcttgtatacgggtggctgtatctgataataaccgcaacttccgtctggctggagagttgcactattctcaaaaagaaattttccgtgaaggttcttatgttgacaactgctcgtttgccttggataatgtgcaggcccgctatgtgcggataacactttgcggagcaggcttgtgtccggaaaatcatgtgcgcccgggacaagaagcgagacctttcttggatgaacttattatagaatgaaaaaacgaatgtgtatgattgaccgtatgagccgacagatatttacattacttggagctattcttgcgttttcaccgcttgcagcgcaagaacagccggaatggcaaagtcaatatgccataggattgaataaattgcaacctcatacctatgtatggccgtatgccacggtaacggatgtggagcagggcgattacgagcaatctccctattacctcagcctgaatggcaaatggaaattccattgggtgaagaatcccgataaacgaccgaaggagttttataaaccgtctttttataccggtggttgggcggacattcttgttcccggtaattgggaacgtcaggggtacggtacggctatttatgtgaatgagtcgtatgagtttgacgacaagatgttcaaattcaagaagaacccgccgctggttccttacgaagacaatgaagtcggttcttaccgccgtacattcaaagttccggcttcgtggaaagatcgccgggtggtgctttgctgtgagggagttatctctttctattacgtatgggtaaacggtaagtttatcggatacaatcaaggctcaaaaactcctgcggagtgggatattacggataaactggaagatggagagaatatgatagcacttgaagtttaccgctggagtgccggttcttatctggagtgtcaggatatgtggcgtttaagcggaatcgaacgcgatgtatatctgtacagtactccccaccggtatattgctgattataaagtgacgtcttctttggaaaaaacgaactataaggatggtcttttcggtctggatgtaacgatagaaggcgcttcacagaatgcttcttccattgcgtacacgctgaaagacgcggaaggccggactgtatcggcggaagagattccggtaaagtcacgcggattaagcaacttcatctcttttccggggaagcgactcccggcagtgcaggcatggagtgcggaacatcctaatctttatacattgtttctggagttgaaggatgctacgggcaaggtgaccgaagtaaccggttgccgggtggggttccgcacttcggaaataaaggacggccgtttctgtatcaatggggtaccgatattggtgaaaggtgttaaccggcacgaacattcccaactgggacgtactgtcagtaaggaattgatggagcaagatatccgcctgatgaaacagaacaatatcaatacggtgcgcaattcgcattatcctaccgactcttattggtacactctttgcgaccgttacggattgtatatgatagatgaggcgaatatcgaatcgcacggtatgggctatggcccggcatcgctggcgaaggatagcacttggttgccggcacacatggatcgtacgcagcgtatgtacgaacgttccaagaaccatcctgccatcgttatctggtctttgggaaatgaagcgggcaatggtataaactttgagcgtacatacgattggttgaagtcggtagaaaataatcgtcccgtacaatatgaacgggcggaacagaactataataccgatatttattgccgcatgtatcgcagtgtggatgaaatcaaagcttatctggctacaccgggtatttatcgtccctttattctgtgtgaatacctgcatgctatgggtaatagttgtgggggtatgaaggagtattgggatgtttttgagagtaatccgatggtgcaaggcggagctatatgggattgggtagaccagtcgttccgtgagattgacgacaacggccgctggtattggagttatggaggtgactacggacctgaagatattccgagttttggtaacttctgttgtaatggtctggtaaatgcagaccgtgaaccgcatccgcacttattggaagtgaagaaaatctatcagaatatcaaagcaaccttgatcaatgaaaagaatctgactgtacgtattaagaattggtttgatttttcgaacctgaatcaatatatattgcattggaatgtaactgccgataatggtatggtactggcgaaaggaatgcaggaggtggattgtttgcctcatggaatggtcaatgtgatgtttggagcagtcaaactgccggttaatacgcgtgaagcctatctgaatttgagttggatgcggaaaacagtttctcctatggtagatacttcctgggaggtagcttatgaccaatttgtattacccggtaatgcaaccggaaaggcttatctgccggaaacatccggcaaaatgacttttacggtggacgaaaagagcggtgctttacaattgcttgcacaggatgggacagaattgctggcaagtccggttacattgagcttgttccgtccggcaacggataatgacaatcgcgaccggaaagcggcacatttatggcgtcaggcgggacttgacaagacggtgcagaaagttgtttctttgaaaaaaggcaaggcttctgctactgcggtagtggagttgctgaatgaggcagggaagaaggtgggcgacgctattttggcatactcattggcgcagaacggaggtgtcaggatacaaaccgaatttacgcccgatactacgatggttaaatcaatggcccgcatgggattggcattcgagatgaacgataggtatgggaatgtttcttatctggggcgcggagagcatgaaacgtatgccgaccgtaagcagtccggtaagattgacatatacaatacgactgttgaacgtatgttccattattatgtaaagccgcaggctacaggtaatcgtaccgatgtacgttggatgaagttggcagatgaagccaataacggattgtttgtcaattcgagccgtccgtttcagtttagtatttctcctttctcggatgagaatattgaaaaggctacccacattaacgaactcgaacgtaatggcaaggtaaccgtgcatctggatgccggacagtcgggagtgggcaccgctacttgcggacctgccacattaccgccttatcttattcctatagacaggcaacagtttgattttaccatttatcttgtcagatgagtgcaaacttatttgaattttgctcatagcaagaggtattgagttaactattaatagaatatatatatgaaacaaataatgctcctgacatcattacttttcgcagtcttttgtggagtgcaggcacaggaaacctattacgagaaacatttgatcttccccgaaaaggctactgctgcacagaagctggacatggcttcacgtttaattcctactccgcaacagttggagtggcagcaaatggagtttaccgctttcctgcatttcggtatcaatacctttacgggacgtgaatggggggatggtacggaagcccctgctctctttaatcctaccgaactggattgtgagcagtgggtacgtgcactcaaaaacggaggttttaagatggcaatcattaccgccaagcatcacgacggtttttgtctgtggcctacgaagactacccggcactctgttgcatccagtccctggcgtggcgggaagggagacttggtacgcgaattgcgtaatgcatgcgataaatacggtattaagtttggcatatacctctctccgtgggatcggaatgccgcttgttacggcgattctcccgtctataaccaattcttcattgaacaactcacggagttgctgacgcaatatggtgaaattcacgaagtatggtttgatggtgcaaacggtgaaggacccaacggtaaaaagcaagaatatgactgggatgcagtgataaagaccattcgtcgcctgcagcccaaagctgtgactgctatcatgggtgatgatgtgcgttgggtaggtaatgaaaagggaatcggacgtgaaaccgagtggagtgccacagcattgccgccgggcatctattcccgttcggaagaactgagaaagggattgggtatttatggtaaggccaaagacttgggcggtcgtgacatcgtggcgcgtgccaaggaacttttctggtggccgtccgaagtggatgtgtctattcgtccgggttggttctatcatgctgcacaggacaagcaagtgaagtcgttggcgcatctggtggatatttatttcaaatctgtaggttataattcggtattgttgcttaatattccgcctgataagcgcgggttgattcatgagaatgatgtgcagcgtctgaaagagctttccgcttatctgaagaagacgttcggcaaagattttctgcagaaaggagatacccgttggcaacccttaagtggagatgtccgcgaatataaagtgcagaaaggcgctgtggtaaatacattccttattcaggaagatattgccaaaggacagcgtgtggaaaattttcttgtggaggcttactccaatggttcgtggagatatgtggcggaaggtacgacggttgggtacaaacgtctgatccgtttctcggataccaaggcggagaaaatacgggttactgtccgttcggcacgtggaaaggcaaatatcctgaaagtgggacttttcttcgccgaacctttgaatgacgagaatacggaagtgcagttgagtgatattccggtggatgaatggcgtatagcagacggtgaaccgaatgcgcatcaggctattgacggagaccggagtacggggtggtacaccaactcattgaaaccgttgacggtggatatggggcgcgaagtgcaggttacaggcttcagttatgctccggttacgggtgatgacctggcgggtactatttacaaatatgctttctacatcagtagtgacggcgaggaatggacaaaatgcgatgcagccggtgagttcagcaatattatgcacaatcccgttccttactttgtacgcttcggaaagagttatcgggcacgttacttcaagcttgaaccgcttgccgaaatcaacgggaaagtatctactgctattggcgaggtgggtatccttgctgtgaaaggcatgccgaaagatgatgaaacgctggtatatgaccgtcccggtgcaccgttgaagctaagacccggtgataatcatccgaaagtgaaaggttggcgtttctacaccgctcatgaattcttgaaccgtgatacggaaaataatcttccgaaaggattcattgaacataggggggcgcacatgagccgtgccgcacgggtggataatgcacgctgttcggaagtgaacaatggtgtattacagattcgtacagttgaggaaaccgattcagtggacaatcgttttggtgccaatgtgaagttctctcacggctgttatcgcacgtcattgcccggaagcaaggatttctggtgtaactttaccgagaatatgcgtattgagattcgttttaaacgcaatgcttatcaaggtttcaacgatgcactttggtttatggggaacaataaccgtccttggcctaagaatggggaaatagatttattggaaaatccgaaaaagacagtcaataatcgtgcacatttcacattgcactcggagaattattatgccggagtagtaggaggcagcggaagtgttacctcgacaattgacctggccgatatgtcctggtggaatatctactggttggaatggtatcccgaccgcatagtaggaggcgtgaatgggcagacctattttgaacaccgtaagggagccaatggcaatgaagattggccttggagtgatccggaaggcttctttcttattttcagtaccggtatatcaaccaatcctaaggcatggcccggggcggttatgccgtccgaatggaaaaaagatgctatgccggccatgttcgttgactggatacgggtgtatgtgaataaagattataaaggtgggaaagctcctgccataaggttctattgatataggtacgtgaaatgaaatatacagttgcttccttaacagttgtagcattgctgtcgggtaatgctatggcacagcgtaaacctaatatcatcctttttttggtggatgatatggggtggcaggatacctctctgcctttttggaaagataccacggacttgaaccgtatttatgaaactcccaatatggagcgtttagctgaaaggggagttatgtttactcacgcttatgcctgttcaatcagttctccgtcacgtgtaagtttgttcactggtgcaaatgctgcgcagcataaagttacaaactggacgttgaagaaagatacgccgaccgataggaaagatgctgtcttggaatttgaagcatggaattataatggtctttgtccggaagcgggattggaacattctttttatgcgaagtgtttgcctcaactacttcgtgagaatggatatgctactatgatggttggaaaagcgcattttggttcgatgggtacacctgcggccaatcctttgacaataggtttcgattataatattgccggtcatgctgccggagctatggggagctatctgggcgaggaaggatatggcgccaagagcgatccggaacgtgcagcagtgtgggctgttccggatttagagcaatatcatggtactgatactttcttgactgaagctttgacattggaggcgaaaagcttattagataaggtaaccggacagtctaagccgttctttctttatatgagccattatgctgtacatgcgcctttcggaacagacagacgtttctaccagaagtacgcagataagggactttcacataaagaagcacagtatgcggcacttttggagggtatggataaaagtttaggcgatttaatggattatgtggacgaaaaaggtatagccgataatacggttattatttttatgtcggataacggcggttatacaatcggtcgtcatgataagaattatccgctgagtgaaggtaaaggttctttaaaggaaggtggaatccgtgagccgatgattgtttgttatccacatgttgccaaaccttctaccataaatgacactcccgttattattgaagatttttttcctacgttgttggaaattgccggagtctgcgattatcggacacctcaacatattgatgggataagttttttgaagcaaataaaaggacatgccggagataaagagcgtgctttgttttttcattatcccaataactggggtgagagaagacagacgatcggtgcaccgcaaagtgcggtcgtggcgggtgattggaaactaatccattactatgaatcgggtagtgcctgcctttataatttggagaatgatatttcggagaatgatgatttgtctgccaggtatccggataaagctaaagaactggctaaggtattgagcgattatttaaagtctcaacatgctactatgcctattctgaagctaaccggcaggacagttccgtatcctgatggtagcataagataataaaagagaaaagggcagtccgttaccgaaagcccttttctctttgctactatatttaaaacttatgttatctattgaaaggaaagaagtgttttctttttcttgactaaacaaaatctttcagttcttgttgtagtttttggcgggtaaagaagatacggctctttacagttcccagcgggagtcccagcttctcggctatttcgcggtatttaaaaccggaaacatgcatggagaacggtactttgtattcgcgtggcagtgaattgacgatacggtgcatctctttcaggtcgtatgcgctttctgtgttctcaaatgctgtgtcgcgcggcaggttcaggtggtaaagattgtccgtctggtccacaaatgtctggtcgcgcactactttacgataattgttaataaagatgttgcgcatgatcgtatatatccaacctttgaaattagtatcgggcatgtatttatcttcattatccaaagccttgagtgatgtttcttgaagaaggtcgttggcttcttcgcggtcggaggtgagcttgtacgcaaagcgtaataaatcgttttgaactccgatcagatcttttttaaatgtcatactattcataaatgtgctttgttaaatggttacttgttcgttttgccttttagcattgcaagtttacgaaagttccggcttttcgacaggctgtttttaagcaatctttggggtgaaaactatcaattgatagattttgggtgctatttgatagattttgggtgcagttttctatcgaatatttgcatttaattaaaaagatgcgttaattttgcgcaatcatttcatcacaaaaagaatggctgacgactctttatttttgattgacattgataagattcttcgggagaaagctccgaagcatgtgaagtatatccctaagtttgtcgtatcttatttgaagcgcattgttcatcaggatgaattgaatgtttttctgagagagtcgaaagataaagtgggggtggaattcctgcaggcttgtctggactttctggatgccaaattgatagtgaagggcaaggagaatctgcgaaaagacggtctttatacattcgtttccaatcatcccttaggcggacaggatggagtggcgttgggctatgtacttgggagtttttacgatggaaaggtgaaatatatggtaaatgacctgcttatgaacctgcatggactggctcctctttgtattcctatcaataagaccggcaagcaggccaaggactttccgaaaatggtagaggccgggtttgcatcggacgatcagctcatcatgtttcctgccgggctttgctcgcgtcgccggaatggggttatccgcgatttggactggaaaaagacgtttatagtaaagagcgttgaagcgcaccgcgatgtagtgcccattcattttgacggccgtaactccgattttttctataacctggcgaatctttgcaaaacgttgggtatcaagtttaatatagccatgttgtatctggcagatgaaatgttgaaaaaccgtcataaaacatttaccattactataggtaagcctattccctggcaaacattcgataagacgaaaacacctgcccaatgggcgcagtatgtgaaagatatcgtgtataaattgtaagttgaacattgaatataaaaaaatagaagctcggaagatggaagatattattgcaccgataagcaaagaactgctgaaagcggagttgaccgaagacaaacgcttgcgcatgacgaataagagtaataatcagatatatattattactgcccaggattcacccaatacgatgaaggaaatcggacgtctgcgtgagattgcatttcgtgctgccggtggcggaacaggaatgtccatggatattgatgagtacgatattatggataatccttataagcagttgatagtctggaatccggaagaggaagagatattgggcggttaccgctatattctcggtacggatgtacgcttcgacgagcacggcgctccgattttggctactgcacacatgtttaatttttccgagaaattcttgaatgaatatcttcctactaccattgagcttggacgttcattcgtgacgctcgaataccagtctacccgtcgcgacagcaaaggtttgttcgcattggataatttgtgggacggtttgggtgcgctgacggtggttatgcccaacgtgaagtatttcttcggaaaggttaccatgtatcccagctatatccgtaaaggacgcgacatgattctttatttcctgagaaagcattttgccgataaagacagtctgattactccgatgaaaccgctgcaattggagtcggacgaggaagaactggctgcattgttctgtaaggatacatttaaggaagactataaaatattgaatggcgaaatccgtaagctgggatacaatattccgccgttggtaaatgcctacatgagtcttagtccgacaatgcgtatgttcggtacggccattaattacggtttcggtgatgtggaagaaacaggtatcctgattgccgtcgatgaaatcctggcggaaaagcgcatccgccatatccagtcattcatcgaaagcgagccggaagcatgcaaactgacttccggggcgaataagatattctatccgagcagataaatcatacagccggcaggctgtttccgttgattttccggtagaggtcgagggcgaatacatccgtcatgccggatatgtagtccaatacggcctgtatcctttcatacagtgcagttgctttcatattatattgtccggatacccggttgatgagcaactgcgaatatgctttttccggtgagcgtactgcatcgatcatcagttcgagcaaggtgctgatgatacggaaaccggcaagttctatgtccaatacatcgcgcgaacggtatatcttcttgaaagatacctctgcgcaatgttggtaggccgcggcaggccgttcggtgatatgcttgatgagacttccctcaaattccccttccagtatctgtacttcgttatcgaggaatgcccgggtgcattcgccgataagcagcccgatgacggaagaacgcagataggctatctgttcattggtgtcgctcacaatcttgagcgtgtcgaggatgtgcgccttacgttcgtcgggaaagtaggccagcagcaggtcctgcgtttcctgcgtagtgagaatcttcagtttgtgggcatcttcaatatccatcatctggtagcagatgtcatctgccgcttctaccaggtagacaagcgggtgacgtgcgtatttcaaaggtgaaccgttaagctgtttcatccccagttcttcggctattcgccggaaactttcttcttcggtagtaaagaagccgaatttggatttctgtcctgccaggctcgatgaaaaggggtattttacgatgctggcaagtgtggaataggtcaggacgaaaccgcctttgcggcgtccttcaaactgatgggtaagcagacggaaagcatttgcgtttccttcgaaatgagtcaggtcttcccattgtgccggggtgagttgttctccgtcgggttgtttttctttcaatgccagcccttttccttccgaaaagaaagtagagatggcgcgttcgccggaatgtccgaatggcggattgcccaaatcgtgcgccagacatgctgcggaaacaatggagccgatttcgggcagataagagtcttgcagttcggggcggcgggcaaggatggctttggctacgtcattgcccagcgaacgacctacgcaggaaacttccaggctatgtgtcagccggttgtgtacgaatatgctgccgggcagagggaacacttgtgtcttgttctgcaatctccggaaaggtgcggagaagatgaggcggtcgtaatcccgctgaaattcagaacggttctcgtgacgctctttatgaaactcttccaagccgaatcgtttggcggatatgagggtattccagtccatcatgttcttactttcttattatttaactgcaaatgtatgactatttgcttcaaaatccgtaattttgtccgttaaatagtgaattaaagtaatctcaatcgtaacttcattgaaatggcaaataatagtatgaccgtccgaattataaataagtcgaaacatccgttgcctgcatacgccaccgagttgtctgccggaatggacatccgtgccaatctttccgagccgatagctttggaaccgttgcagcgttgcctggttcctacaggtttgtacatcgctttgccggcggggtttgaggcgcagattcgtccccgcagcggtttggctatcaagaaaggtatctcggtattgaactctccgggtactatcgatgcagactatcgcggtgaaatctgtattatcctcgtaaatctttcttcggaaacatttatgattgaggacggagaacgaatcgcccaaatggtaattgcccgccatgagcaggccgtatggcaggaggtggatgtgttggatgaaacggaacgcggtgccggtggcttcggacatacgggcgtgtagttggaatggggtatgagtgattagcgatgagtgattagtgattgacggagggttgcttataccatttgattttatatagataatgagcatattcaataataagaaaatagggctgtttttgttggtggcgggtttcttgcttgtctcctgcgggacatcccgtaggcaggcaagggcattatcggcgaagcctgtggcggaacttactccggaacagcagcgtaagtacgattacttctttttggaagcagcccgtctgaagattcagaaagactatgatgcggcttttgatttgctgcaacattgcctgactatcaatccgaatgcttcgtcggccttatacgaactggcgcaatattatttgttcctgaagcaagtgcctcaggggcaggctgcattggagaaggccgtggaaaacgatccggataattattggtacagtcagggactggcgaatctttatcagcaacaggacgaaaaggagaaagcgatgaagctgctggaagatatgtccatacgtttcaccgacaagctggatccgctttatgccttgttggacatttataatcggcaggagcagtatgataaggtgattgctactttgaaccggattgaggagaagatgggcaaaagcgagcagttgagtatggagaagttccgtatttatctgcaaatgaaagacaataagaatgctttccatgagatagagagcctggttgcggagtatccgatggattcccgttatcaggttgtgttaggggatgtatatatgcagaacggaaagaaagaggaagcatataacatgtaccgcaaggtgttggatgccgagccggataatgccatggcgatgtattcgctggcgtcctattatgaggagaccggtcagaaagacctttatcagcagcagttggacaccttattgctcaacaagaaagttccttcggaaacgaaactgaatgtaatgcgccagtttgtcgtgcagaatgagcaggacggtaaggacagtacgcgggttatcagccttttcgaccgtattctggaacaagagccggatgatgccgggataccgatgctttacgctcagtatcttttatctaagggaatgaacaaggaagcctttccggtactgcgtcaggtgttgacaatcgatcctaccaatacggctgcgcgtatgatgttgctgggtgaagcggtacgcaaggaggattacaacgatgtgattgatttatgcgaagccggcgttgaaaccaacccggagatgctggagttctatttctatctggctatcgcttataaccaggcggaacggacggatgatgtaatttccatttgtcagaaagcattgacgcaaattacggcggacagtaagaaagaggttgtttcagatttctattccattttgggagatgcctatcatacgaaagatttgaatacggaagcctatgctgcctatgattcggcgctggtgtacaatccttccaatatcggagctttgaacaattatgcttattacctgtctgttgagcgccgtaatctggataaagccgaggagatgagttataagacggtgaaggcggaacccgataatgccacctatttggacacttatgcctggattctgtttgagaaaggcaattatgccgaggcccgtttgtatatagacaatgccatgaaaagtgacggaggcaaaagcgatgtcatcgtagagcattgcggcgacatctactatatgacgggtgatgtggacaaggctctggagtattggaaccaggcattgaagataggcagtaagtccaagaccctacaggagaagattcggaagaagaagtatatcagtgataagtaagtcggtaaaacggtgaagtgatacataataaaagtaacaaggtaatggaacaaacaaaattcaatggcaggactctggtctttatgctctttatcctctgctgtctggcaggctgtaaaaccacccggaaggcggagacatccaaatttcccgaaagtacccgctacctgtcttccaaggtgcggctgaccgttcctaccaaagacgccgttttcaccgtaaacggtacgatgaagctgataagcggcgaacggatgcagctttctttcctcatgcctatcatacgtacagaggtggcgcgcatggaagtgacacccgaagaaatattgctggtagaccgcatgggcaagcgttacgtccgtgctacccgtaaggaattgaaagatgtgctaccgaagaaagccgactttgcccatttggaaaagattctattcaatgcttccaagcccaacggaaagaaagagttgtcgggaaaggaattgggcattccttcgctggagaaaggcagaatcgagttgtccggcttttccaataattcgttttcgctgacgcctaccgagctgtcttcaaagtacacacaagttgagttgaatgaaatattagaaatgctgatgagcttatgagacgtttgctttgtatttttataggttgtttctgtctggcttttccgcttcttgcccagtccaacaaactgataaaggaattggaaagcaagcgcggtgctttgcaaaagcagattaccgaatcggaaacacttctgaaaactacaaagaaaaccgtaagcagccagttgaacggacttgccgctttgacggggcagatagaggaacgcaaacgctatatccttaccataaataacgatgtagagtcgatagaccgtgagctatcgtcattggaacgccagttaggaaaattgcagcgcgacttgaaggacaagaagaagaaatacgagtcgtctgtccagtacctttataagaaccgttccattgaggagaagctgatgtttattttctctgcgcggagtctggcgcagacctatcgccgcttgcgttatgtgcgtgagtatgccacctaccaacgcctgcagggcgaggaagtgctgaaaaaacaggaacaggtcaataagaagaaagcggagctcaggcaggtgcgggctgccaaagccaatctgctgaaagagcgcgaggccgagaaagtaaaactggaagcgcaggagaaagaaaagcgtatccttgtggccgatttacggaagaagcaacgcggattacagaacgagattgccaagaagcggcgcgaggccagccagcttaatgcgcgtatcgaccgcttgattgccgaagaaatagagaaagctcgcaaacgtgccgcagaggaagcacgccgtgaagcggctgcccgcaagaaagaagcggctaaagcggataagtcgggaacgtccgcttccggaaaaaaggttgctcctctggaaacttataccatgagtaaggccgaccgcgagctgtccggtgactttgccaataaccgcggcaagctgcctatgcctatcagcggagcctatatcataaccagccattacgggcaatatgccgtggagggattacgcaatgtcaagttggacaataaaggtatcgacatccagggaaaaccgggagcgcaggcgcgtgccattttcaacggcaaggtggcggccgtattcaaactgaacgggctgtttaatatccttatccgtcatggagcctatatttccgtatattgcaacctggcttccgcttcggtgaaacaaggcgacacggtcactaccaagcaagctatcggccaggtattctcggatggggcggacggcggacgtacggtacttcacttccagctacgccgtgaaaaggagaagctgaatcccgaaccctggctgaacagataagttttatattgttgctccgtccagcaggtccagataaagtgcaatagcctcttcaatctctttgacgaagataaactcatccgcagtatgggagcggctgctcttgcccggtcctatttttatggacgggaaagacatcagcgcctggtctgaaagggtaggcgaaccgaaaggagtccgacccatcgcaacggccttttttaccagcgggtgttcgggagaaacatgcgaagaacccaagcggaaagaacgcgctttggcttcacaggcgatgtgtttccgtatctcgtcgaaaagttcctggttggtgtaacattcgttactgcggatgtcgactacgaatgtgcagcggtcgggtattacattgtgctgtgtccctgcattcaccatggttacactcatttttaccggtcccaataaagccgattctttcgggaaacggtaatcgcggaaccaggcaatgtcgttcagcaccttgtatatggcgttgtcgccttcgttccgggcagcatgccccgacctgccgtaggcggtgacatccagtaccatcagccctttttcggcaatggcgggttgcatctccgtgggttcgcccacaatggcgaattgtatgggcggtagttccggcagtacggactctactccttccttgcccgacacctcttcctcgcaggaagccaggtaaatcaggttgtaagcctgtgtagtccggcacaattgcaggaatacctgcagcaggctgactacgcttgctccggcatcattgcttcccaaaccgtaaatcttgccgttctcttccgtaggggtgaacggggctttccgccatccgtttacgggcttcaccgtgtcgatgtgcgagttcagcagcagcgtaggtttgttcaggtcgaacatcgggctgagacaccatatattgttgcctttccgtccggttgccattccctgcatttcgatgtaattctgaagaaagtccgcagcctgctcctcttcgcggctcaatgatggtatggctatcaatgatttaagcagtccgattgcctcggaaaccagtgtttctatatccgttgtcatcgttgggttctgttatatattcgttattactttgcaaacttacggataaatcccgaaaaagggagatagtttcaaataaaactaatacctttgtacccatatttaccaattcattaaaaatatgacttatcatcatttgtctgttctgatacatcgtcaggcagagaagtatggagacaaagtagcccttaaatacagggactatgaaacatcacaatggatacctatcacttggaataaattctctcgtacagtacgtcaggcagccaatgcgttggtggctttaggtgcagaggaacagagaaacatcggtatcttctcacaaaacaagccggaatgtttatttaccgattttgctgcctttaccaaccgtctggttaccataccgctgtatgctaccagctcttcggttcaggcccagtatattatcaacgatgctcagatacgtttcctctttgtgggcgagcaattccagtatgatgccgctttcagcgcattcggtttttgccactctctggagaaactgattattttcgaccgcagcgttgtgcgcgatccccgcgacaagacctctatctactacgacgagtttctggcattgggcgaggggctaccccacaatgccgttgtggaagagcgtaccgcccgtgcatcggacagcgaccttgccaatattctttatacatccggcaccaccggcgagccgaaaggagtgatgctgcaccacttcaactacagagaggctatccgcatccatgatatccgcctgactgccatgacggataaggatgtgtccatgaacttccttccgttgacgcatgtgtttgaaaaagcatggacttatttctgtcttcacagaggtgtgcaggtttgtgtcaatcttcgtccggcagatattcagaccactatcaaggagatacgtcctacattgatgtgcagcgttccccgcttttgggagaaggtatatgccggtgtgcaggagaagattgcccaggagagcggcctgcggaaagcaatgatgctggatgctcttaaagttgggaagatgcacaacattgattacctgcgtgcaggcaaaacgccgcccctgatgcttcatctgaagtataaattctatgaaaagactatctatgccctgctgaaaaagacaatcggtattgagaacggtaatttcttcccgactgccggtgctgccgtatccgatgaaatctgcgaattcgtgcactcggtgggcatcaatatggtggtgggttatggattgacggaatctacggctaccgtgtcctgcttcctcgacaaggggtatgagataggttcggtaggtactgtcatgcccgaccttgaagtgaagattggagaaaacaatgaaatcctgcttcgcggtaagactattactaccggctattataagaaaccggaagccaccgctgcggctatcgacaaagacggatggttccatacgggtgatgccggctatctgaaaggaaatcatttgtacctgaccgaacgtatcaaggatttgttcaagacctcgaacggaaagtatatctctccgcaggctctggaaaccaaactgtcgatagaccgttacattgaccagattgctgtcattgccgaccagcgtaagtttgtgtctgccctgattgttccggtttatggcttggtgaagaactatgccaaggagaaaggccttgagtacaaggatatggccgatttattgcagcatcctaaagtgcaggctttgttccgtgcccgcattgatacgttgcaacagcagtttgcgcattatgagcaggtgaaacgtttcactttattgtccgaaccgttcagcatggaacggggagagctgacaaatacattgaagctgaaacgttctgtggtggcaaagaattataaggagctgattgataagatgtacgaagaataaaagtccggatgactttagaatttgcttaaaataataaaaaaggaggcggtatgcctccttttttattgtcggatatgccgtcaacggtttaggcttatatgtttacaaatggaacggtatgattctttcttcttttccgctccgttgaatgaactctatcaagtcagggactgaatgcctttcactcagggactcattgttcccctgttcagaagtctttgtgggcggggagggagaaaaggggaaaaagttggaagtcgggataaaaaatgtgtatttcttcttagggttgcgccggtgtggtctgtttatattctatggaaagatatttttaatcttaaaacttagtatgctatgagaaagcttttatcggcgctgatattgtcgttttcaatatggagcgttttttcatgccggcaggaaaataatgtaaccgttaagcagtatcccatgttctggacatggctggattatcgtcccggcatgaatttcgattcggtatgccaggtgatgaatgacatcggcatggatggaataatgctgaatgcacctacccccgacgactatcgcattgccattcccatagcccgtaaacacggcattgaagtatacgcatggttgtggaccatgaatctggagcacgaccgcgataagattttggcagaacatcccgactggttcagcgtaaaccgcaacggaaagagcctcgcagatactacggcatatgtggattattataaattcctctgtcccgcactgcctgaggtgcgcgaattcatcagggagaaaattaagtcgtattgcgaagtcgagggattgaacggaattgccatcgactacaaccgtttggtggatgtagtgcttcctaccacgttatggccgcattacggtattgtgcaagaccgggaatatgccgcatgggattacggttatcatcccgccatgctcgaaaagttcaagagcaggtatggctatgatccgcgtgagcagcaggacccttcgacagacataaagtggcggcagttccgttgcgaccagataacggaagttgcgaatatgattgccggagtggtgcattcgtatggcaagacaatggcggcatctccgtttcctacgccgaagatggcttcacgcatggtgcggcaggactggggtaaatggaacctggatatcgtttttccgatggtttaccatactttctatacggaagatgtcagttttatttccgattgtaccgttgagaatgtgcgcgacaagaatgataaaaccgtattgtattgcggcatgactgctaccgatggtccggaaatgttcgaatgtatggatgccgcgctgaatagcggtgctcagggcattgccgtatttacggtggcaggcttgcgctcgtccgaggtaaagaaccggttcaaaacttatacggacagcgtacgggcggtgcgcgcggctaatggcggtatcattgaagcggtgcatcctcacgtggcggataccaatccttttactcataaaggcatcatggcattggtggaaaagcgtatgcgacggattgtggccgaagcatccggtaaagaggagttacccccgttggctttgggtgagtataggcaaacggaatcttacgatgccacccgttgctatcgggtggcggatgagaacagcaggacggtctttaaggttactttctacttctacggtgatgtactttcgggttgggacgtagtggcggaatagcccgccctctttcttattccgttgattgcagcggatttatgcgattttttcagacttttgcactatctttgcggtttgaaaagatagaatttgaagaaagtatatgattaccattgaacaactgaaagatatcaaggaacgtaccgaagcgttgaaccgctatctggacatcgaaggaaaaaaaatacaagtggaagaggagcaattgcgcacgcaggctccggggttctgggatgaccagaaagccgccgaagctcagatgaagaaagtgaaaggcttgcagcaatggatttccggctacaatgaagtcaaggttatggcggatgagttgcagcttgcattcgatttctacaaggatgaactggtaacggaagaggaagtggatgaggcctatgcaaaggcatccgctgccgtagaggcccttgaactcaagaatatgcttcgtgaggaagccgaccagatggattgtgtactgaaaataaattcgggagccggcggcacggagagccaggactgggcgagcatgctgatgcgtatgtatctgcgatatgccgaaacacacggatataaggcaactatttccaacttgcaggaaggcgacgaggccggaatcaagacctgtaccattgaaatatcgggcgattatgcctacggctatctgaaaggcgagaacggtgtccaccgtttggtgcgcgtatctccctataatgctcagggcaagcgtatgacttctttcgcatccgttttcgtcactccgctggtggacgatacgattgaggtgaacatcgaacaggcgcgcatctcgtgggatactttccgttccagcggtgcgggcggacagaacgtaaataaggtggagtccggcgtgcggttgcgctatcagttcaaagatccttacactggcgaggaagaggaaatcctgattgagaataccgaaacgcgcgaccagcccaagaaccgggagaatgcaatgcgtcagttgcgttccattctgtacgacaaggaacttcaacatcgtatggcggaacaggcaaaggtggaagccggcaagaagaagattgagtggggttcgcaaatccgcagttacgtgttcgacgaccgccgcgtgaaagaccaccgtaccaatttccagacttcggatgtaaacggggtaatggacggtaagatagatggtttcgtcaaggcctacctgatggaatttgcaggcggagataacatttagtcctttctgttttcctttttataggcacgggattgcacggatttcgcagatttgctttattctttttcggtgaactccgtgtaatcccgtgtctgataaagaaacaaataacaagcgtttttttgttttgacacattcctttcttttttcttttataaatgcttgcaaacttcccgaatttccttttactttgtttatcgttgaactttaaactatagaaacaccatgggaaagagtaaaaagaaagtaatgcacagccggaaagaagaacaacaagccaggagagtattgctgattatcggagttgccgctttggtattggtggttgccatgctggtgggctattccttcttaggctgattcagaagataaatatgccgcaagagatagaacggaaatttctcgtaaaaggagaatacaagtcgcaagcatactcgcaggaccgtatcactcagggatatatcagcagtgcgcgcggacggacggtgcgggtacgcatacgtggcgggcaggggtatctcaccattaagggagcatccgatgcatccggtatcagccgttacgaatgggaaaaagaaattcctctgaatgaagccgaggagctgatgaaactgtgtgagccgggtgttattgataaaacccgttacctgatacgcagcggaaaccatgtttttgaggtagatgagttctacggtgagaatgagggactggtagttgccgaagtggagcttgcctcggagaacgagccttttgagaaaccggactttatcgggcaggaagtgacgggagatatccgttattacaattcgcaactgatgcaacatccgttcaaggaatggaagtaaactaattacgccccgtaattgttgattcgtatatggagaaactgtaccaatacttgccggaagaactcgtcacttttatcctggtgacggtgttttctttgcttataggtctttccctgaggcgtatcagtttgaagcgcgaaggagagacaaccttgttcggtacggaccgtactttcacctttatcggcattctgggctatctcctctatattcttgacccgacggactatcgcctgtttatgggtggcggggctgtcctagggttgctgcttgccttgaattattacgtcaagcaggcgcagtttcatgtgttcggggtcactaccattatcattgcgctcattacgtattgcattgcacctatcgttgctacgcagccctcctggttctatgtaatggtaattgtgaccgtattgctctttacggagctgaaacatacgtttaccgaactggcacagcggatgaagaacgacgaaatgattacgcttgccaagttccttgccatcagcggtatcatcctcccgatgctgcccgacgacaatctgataccgggcatcaacctcacgccttacagtatatggctggctacggtggtggtttcgggcatttcttatctttcttatctgctgaaaagatatgtattccgtgagtccggtattctggtatccggcattgtaggcgggttgtacagcagcactgccaccatatccgtactggcgcgtaaaagtcggaaagtatccgcccaggaagcacccgaatatgtggcggcgatgctgttggcggtcagcatgatgttcttgcggtttcttatcctgataggaatattcagtgtaggggctttgacagccatttatccgtatttgttgataatgtctgccgttgctgccgggacggcgtggttcctgcattcccggtggaagcgtcctgctatgtcggaaacggtcgatgaagacgaggacggcagcaatccgctggagttcaaggtagcgcttatttttgccgtgctttttgtggtgtttacaatcgctacccattatacgttgatatacgccggcgagggcgggttgactctgctctcctttgtttccggcttcagcgacatcactccgttcatcttgaatcttctgcagggtacgggcaatgtgcctgtttcattgataacagcttgcagcatgcaggcgatagtaagcaacattgccgtaaatatgtgttatgcattgttcttctccggcaagaagagtccgttgcgttcgtgggtgttgagaggcttcggttgtgtcattgccgccaatgtgttcctgctgttgtttttctactttctgtaaatcaatgtgcttttcgctttttttaactccggtgttccgataaatgccgaagaatgccctatttttgcctaattcgttgtgacagtagacactatctgctacgaaaaaacagacaaggtatagatttaaacagggaaacaccatgaaaaacagatgggccatgttgctggcggtattgttaatacccgtttgggcaactgcacagaatgcggcaaattcttcctttcagattaagggtatcttactcgattctcttactaaagaaggcgagccgtacgctacaatcaaaatagttaagaaagaagcgccggaacatgcgttgaaaatgctggtgacggatatgaagggacacttccaggagaaagtacccggtaataaaggcaacttcattatgacaatttcttcggtgggacggaacagtattgtgaagaacttctccgtaaaactgggagaaaagtcggtggacttcggtaccatgtatattacagatgcttccaatgagttgggacaggtggagattgtagcccagaagccgttggtaaaggcagatatcgacaagatagaatataacgtgcaggacgaccccgattccaagtcgaactctgttcttgagatgctgcgcaaagtaccccttgtaacggtggacggcgaagacaacatcaaggtgaacggcagcagcagtttcaaggtgtatgtcaacggcaagcccaacaacatgatgagtaataatcctacggaagtcctgaaaagtatgcccgccaactccatcaagcacatagaggtaattaccaatcccagtgcaaagtacgatgcggaaggtgtcgggggtatcctgaacattgttaccgtaggcggcggactggaagggtatacggctacgttcagcggcaatgtcagtaaccgtggcgccggtgggggtgtattcggtacgataaaaagcggcaaactgactttcagcgcccgttataattacaactataacaaccagccccgcagctactccggcggcaatcggcgtaccgtcggtgaaacggacagcagttcgtccgacctggattacagcgggacaagcaagggagacggttctttccagtcaggcagtatggaagccagctatgaaatcgacacattgcggctggtaaccatgtccttcgggctttggggcggcaagaacaagagcgacggggagaccaatacgctggccaccttccccggtactgccaacgaactgtacagctatgtctccaatagtcacagtaaaagttcctggtattccattgacggaggtatcgactaccagcgtctgtttcccgtaaaggagcgtatgctcacgttctcgtataagattaatacccgcccgcagacctcggattcctattccggctacgagtatgatatggacaatgtggctccggactggcaggactttatgaagcgcatgctcgaccagcataatgacggttcgcaaagcactacggagcacaccttacaggcagattatacgactcccatcggcaagatgcacacagtagaaaccggagttaaatacatccttcgcaacaatactgccgaggacgaccgcttccagcgcgccgcagggcagcaaaccgattatgaattcgatgaagaccatagttcccactacaaacacctgaatgatattctggctgcctatgccggttattccttgaaagtgaagaagctctccggcaggctgggcgtgcgctacgagcataccatacagaatgtgaagtatcttttaggtaaaggcgataacttcaagaaggatttcgacgatgtagttccttccgccagcatcggctggaagctgacggatatgtccaacttgcgtttgggttataacatgcgtatctaccgtccgggcatctggtacctgaatccctacctgaatgacagtaatcctaccaatatcacgcaaggcaaccccaatctggatagtgagaaaagccatgccttcaatctgagttacagcaattttacgcagaagttcaatgtcaacctatcgctccgctattcgtttaccaacaacagcatcgagcaaatctccgaaatggttcccgataccgagattgagggtttgaaagagactaccggcaaagaggtgctttactccacttatcagaacataggaaaaaccaagaatgcgagtcttagcggttatatcaactggaatgctacatccaatacccgtatctatgccaatatctacggtaactattcatatatggaaggagccaacggccttaaaaacgacggttggaatctttttgcctacgggggtgcgcaacaaaccctgccccatgactggcgcatcagtctgaacgtgttcggccagactccctgggtgatgttacagggcaaaggaagcagttacttcgattacggcttgagcgtaaacaagtctttcttcgacaagcgtctgaccctctctgcttttgccagcaacttctttaagaagtacatggacaataccaatacgctcgaaggtgttggttttacgcaggagagctggagcaagtacagccgccagcgcttcggcatcagtgtcagttaccgtatcggcgagctgaaagccagcgtcaagaaagccgcccgttccatcagcaatgatgatgtaaagggcggtggaggcggcaatagcgttcagtaggatcgcaatcccggttatgaagcggaaatgggggtgtcagaactcaattggaatcctaacttccgcaatccctgctgtacgtccggatggctcataaagagtttccaaagcagtccgctgcggtaattctcaatcatgacagctatcggcccttggtcgatggcaagataacgttgcggataccagttgtccgtttcgctgaaagcgtcgtagaatccgtaagggccgaacaccttgtcgcccatgtcgtaaaggtggcgcatcacttgcagcgaatactccggtgtatatacgatggacgaaagggcggcggtgggagcgatgactccccggtcgtcgcgctcgttgggagagtgggcggcatacccgtctgtggagtagctggcggtcagtccccagcagtccggtccgaagcctttgtaatgtttggggttacggatgcagtaggcgcggttcacaagcgtgaggttacgcatttcgccgaagtaatcggggcaatactcgtctttcagcccgttggggtcgagtcccaggaacgagtactgcgcccagaacagaggaccggcttccgtgccctgataccgcagatgcagttcgattccctctaccttatgcgggctgacgatggcgccgttctgcgcccagccttcgtggtatacggcggcgggcacgccatgcgtaggcgaggcggcggcaaggatgtacatgatgaggcactcgttgtagccgtgcacggggaagtccatctcccagccgtattcagggctccaatgccagtagagcacgttttggtcgccctggcggtagaagttccagtctacttcccgccatagcttgtcgatgcgggcggcgagggctttctcttgcggattgccgcctgcatagtattggtgtacggcaaggagagcctgcatgatgaaagcggtttctacgaggtcgccgccattgtctttttgtccgaaaggctttacccgccccgtatcgccataccaccagtgggggtaggcgccgtgaaagcggtcggcggtttcgaggaaagaaacgatgcgttccatacgtgccaggccttcttcacgggtgacgtagccccggtggataccggcaagcactgccatgatgccgaaaccgctgccgccggatgtcactacgttttggtcgttttcgggatatacgccgtccatgtggatgcgttcgcgtgccagtccgctgttgggttcggctccgtcccagaagtaattgaaggtccggcgttgtacggtgtccagcagggcgtcgtcgctcaatgctccggatgcaccgtcggatttctttgtgccgcaggctcctgcaaggaacaacagcaggagaagcgggatatataggtttactgatttcattctgttttacgtgcaatgatttatatactgttgggagaattctgtttccccgtaaggaaacgcccgttcccttagggagaaactcccgtttccttagtgggaaatttcggtttcccctgagggaactgcgcgtttcctttggcgaaactgtcagtatcctcaggagaaaccgcgggtttacttcaaggtaatacgagccgtcctggcagcctgactgcttccaccgatgaagaggtcgaaatctccaggttcggctacgtggttcaggtcgtaatcatagaagcgtagcagctccggagtaatcttgaaggaaacggttttgctttcgccggcgcgcaggaagattttttcgaagcccttcaattcgcgcacgggacgggtgatgcttcctacaaggtcgcggatgtatagctgtacgacttcggctccgtcccgtttgccggtgttggtaacggtgactgcggcggttatggaaccgtcctgtcccatcgacggggtactcagagcaatgtcactgtaccggaaagtggtgtaggacaagccgtatccaaagggataaagcggctcgttgtccacatccaggtagttgctgcggaacttctcgaaccatttgcctgcctgtagcgggcgtccggtattcttgtggttgtagaacagaggtatttgccctacgttcttcgggaaagtcatcgtcagctttccgctggggttgacatctccgaacaatacgtcgccgatggcataggcggcttcgcttccgccaaaccatacattcagtatggcgggtacgttcgcctgctcccaggtcagcgtcagcggacgtccggtgaagagggtgagcactacgggcttgcccgtcttcagcagggcttccagcagcgagcgctgcacgtcgggcaggtcgagattggtacgactggagctttcgccgctcatttcggaagattcgccgagtgcggctatgataacgtctgcaccggcggctgttttcagggcttcgtccagcagttctttgtctgtacggttgtcccggttcagggagcggccgaacatggtggcgcgttcttcataggcggcgtcgccgatgaggttgctgcctttggcgtatgtgacgttcactttgccggacatcatctctttcagtccctcatacaaggaaggatagtcgttgaggcgggcggctacgctccatgtgccgggcatattgctgcgtgtgttgcccaagggaccgataacggctacggttccttcttttttcagcgggagcagcggttggggcagagagccgggatgtagcccgatgctgtcgttcttcagcaatacgaagctctcggcggcaatgcggcgtgcggcggcgcggtgctctttggtgaagatgtcgcgtgcgggacgctccgggtcgcagtatttgtagggattgtcaaagagtcccagcttgtacttggcttcgaggatgcggcggcaggccgtgtcgagggtcttcatgcttaccttgcccgacatgacggactttttgagcgtgcccacaaatccttcgctcaccatatccatatctaccccggcattgagggcacgggcggaaactgcttgcaggtcgccgatgccatgttctgtcatctcggatatgccggtaaagtcggtcactacaaagccgttgaagccccattgcttgcgaagcacatcggtcatcagccatttgttggctgtggcaggtacgccgtctatctcgttgaaagacgccattacactgcccacacctgcctctacggcggcctcataggggtacatatattcgttgaacatgcggttgcggctcatgtctaccgtgttgtagtcgcggcccgcttcgcctgccccgtagagggcgaagtgcttgacgcaggcaaggatttcatcgttgcgcttgagctggtcggagaggttggctccctgataaccgtataccatcgctttggcaattgctccgccaaggaaagggtcttcgccactgccttcgctgacacgtccccaacgcgggtcgcggctgatgtccaccatcggactgaatgtccaggagatgccgtcggcactggcttcgatggcggcaatacgtgcggattcccgaatggctgccatatcccaggtgcaggaaagtcccagagggatggggaagatggtttcgtaaccgtgtatcacatccatgccgaagagcaggggaatgcccagacgggagttttccactgccagcttttgcacgtcgcgtatcttgtccactcctttcaggttgaaaagtccgccgacgagcccttgctcgattttcttggctacgtcactgcttttggcttgcccggtagtgatttcaccggtaacgggcaggttcaattgccctattttctcctctacggtcattcgcttcatcagggcatcgataaagcggtccatatcttgaggagatttttgcgcctgcatggcggcggcgcctataaaggcggctgcaagtagcaggccggttcttttgaaaaacttcttcataatatgtttcttttaatatgtattttctaatacggttctttacacatgtttttgcatatgcttttatagatactttttaagcatggataatgtatataggtctttctaagtgaaagcctgaaaggcttttatcttcaagagaagtgtgtcaaaatacacttgacgatttcttttaggcacggattacacggatttcacggaaaaagaataaagaaaatctgtgttttctgtgtaatctgtacctaaaaagaaatcaatagtaagcgaatcttggttttgacacactttcatattacagatgcattaatatacatcctataaaggcgaattccttgtgtataaatcatttgtcctaacagagcacaagtcatagaggactttttatacccggggtatattatcccgggcttgtagataaaaagctttcagccttaggtgcattatcatgccgtatggtattaatcactaatcactaatcgctaaccactaattatcgttaataatcaggattctgtttcagcaccccgttcgatttgtcaatttcttcttgtggcaatggcagcaaggcattcttgtcctgatagttctttccggcagcttgaagcacttctttggcaatgccccagcgcacgagatcgtagaaacggtcgggttccaatgccaactcaacgcggcgttcgtggcgaatggcatcacgcagtgtgctttggtcagtggacgtgactttgggcagtatactgctgtccgcaccgcgtgcatgggcgcggacctgctccagataatcgatagcctctcccggaatacctttctcgttggcggcttcggcagccatcagcaatacgtccgggtagcggatgatgcggatgtttacccaaaaaccgtctttggtatatttcttacgcagttcgggttcggtatacgcctttttgttgaagtaagcccccatagcggtggatacgggggattcaccgtaaggcttgttggtattttccggagtgacagggtcgctgatgctccggcggaaataaagcagagtggcatctttgcgggggtcaccgggctcgaatgccccgcctaacagcacagtacccatatgccagccccaaccgaggtcccaatcgcctgcgccgcgcacgccttgtacctggcagaactgacttccgatgacatcactgtttttcagggcatcggtcgattcgcattgcagttcgaacacgctttcgccgcagttctcgccctcaacggtgaagactttatctacgggcgtgttcaggttgtagaggccggacttgatgacttcggtggaagcgtcgtacatattgtcccagtcgttacgcatcatgtaggtacgggcgtgcagtgagcgggcggctccccaggtgatgcgtccggtgtattcggaagtccatgtcagcggcaggcatttctcggcttcggtcaggtctttgtctatctgttcgtatatctcgttcacattacttttgggccggttggcgtcggatgcctctttcactttgaatgttaccagcggcacctctccccaggcacgtacaaggttgaagtagcagtaggcgcggaagaacagggcttcgcctttggtacgtacattctccaaatcatccttgtttccgctgttttccaggtcgtcgaggatttcgttgcactggtagatgattttatagttctgtccccaataggcactgagcgtaccgttggaggctgtatactggaaatcgtcccacatggctgcctggtcggcgccgtcgccggcatcgctgcctttttcggagtcctcgctgcgtaccatgtgtatcatgaaggcgggtattccggcagtgatgttatagctgcgcatcaggtaatatacgttgtacatctttccgccgataagggcgttgggagcatcgtcttcggtgaactgccccagcgggtcgcggtcgaggaagtcgttgcaggatgtcagggcaaaggtggtgagtgtacctgctatcagagttagaatcttatgtttcagtttcatgattattattttttggttcatcgcagcagacaccgggttgtgtgctctgcggtgaattgtttttagaatgtcagattaaagccgaatgtataaatggcaggcatcggatagctgccgtcgtctacgccgaaagcaatggccgtaccgcccagttcgggagtgtaaccggtgttgtgtttccaggttttcaggttctggatgttgacgtagagcttcagggcctgcataccgattctggatatcagggtcttgtcgaagttatacgccaactgtacgttgcggatacggaagaagctgccgtcttcgatgtagtactcggaattcatattgttgatggtatgcttcgtgttgagcaagggttgggtattgcttgtacccggtccgtgccagcggtccatgcgttgttccatgaagttgaactggctccagttgtagttgtcccaggtacggaatatctggttaccgccttgtcccatcatgtcgatgccgagctcccagttcttatagcttacgccgagggcgatgccgtaagtgacattcggggtagggtcgcctatcagggtacggtcggcagtggtgatttcaccgtcaccgttcacatccttgaatttcaggtcgcccggagtcacggtggccagggtattcttgggcgaccgggctatttcttcgtccgtctggtatacgccctctaccttgtaaccgtagaagtaaccgatgggatagccggccattgtgtaactctggctcttgtcgcctgcgataatcgagtaaccctcctgtacaaggctcaataccttgttcttgatggtagtgaggttgaagcctgcgctatagccccagtcgccaatccggtcgcgccagtcgatggcgagttccacgcctttgttctctatggagccgaggttgccgatgcccggcaccgtgccggagatgcccggaacttccgccagcaggtctttagtggttttcttgtaatatacaccctcgaagtgcaggcggttgcggaagaagttggcttctgcacccgcttcccaggcttccaccttttcccagcggagacggggattgggcaggtaggacaactggtagcccggatagatggcggacggcttgccgaatacggcggaataggcattggtgagcaacggttcggcaggataggccttgtccagattctgattgccgagcgtaccccacgagcctttcagcttcaacatatccagccaggtgatgtctttcatgaactcctcttcggacatcagccagcctgcgccgacggagtagaaattctgccactggtttccggtgtaggagaatgcggaggaaccgtcgcggcggaacgaaccgttgaacaggtatctgcctttgtagttatagagcacacgtcccagcatggatacggtactgcgctcccattgcttgctctcgttggtggctgttgccgcatcgccgatgctgatgtaccacttgtcgggattgtcggggataaccaggcctacgccctgcgtacgttctccgcccagcatctccagcttgttgtaataggtggtgaagccggcggtggcggtcaggctgtggtcgccccaggtattggtgtaggtcagcaggtagtcgctttgtactttggcttcggtttccttggactgtttcacgccggtcttaccgttgccgagggtcacgacgttgccttccacgctgctgtcgaatacgttgataacaggcgtgtaggtgcggctgctgttggaagcatagtccatggagtacattactttgaactggaagtttttcaggaagtcccattgaccgtatacattgcccgatgcgcggtagttttccgcacgggtggtattggctttcaagtccacatccaccatagggttgttcatctgcgctttctggaagccgggcagggtggtgtacaagccgtattcggcattgtatacgggggctaccggggctgcgcggagagctgttgccacactttttgtatcggcgggcagtatgcgtgcgccgttgaactggaagcctactttgaagttatccgtaactttatagtcgttgcttatgttcagtgtgaccttgctatacttctcgtgcttgatattgccttgctcgtaggcataaccggcgccgaggtagaagctgtgcctggcggaagcacccgtgatgctgacattgttgttggtgataaatccggtctggaagatttcatcctgccagtcggtattgcccgtccacggggtgaaatcaaattcgggattgccttcatttctcaactgttcgttgtagagttccttgaacccggcggcgtcgaccattgcaatcttgtccgttacacgcttgaagccgaacgagccgttgatgttgacacgcgtctgtccttctttggctttcttggtggtaatgatgatgacaccgttggcgccgcgcacgccgaagatggcgagggacgacgggtctttcaggatttccatggactcgatgtcctgcggattgaggaagttgatgttgtcattgaacaggccgtctactacatacagcggtttgtagccgttaatggagtttgtaccgcgcacacgtatttcaggatctgctcctgccttgccagaattgataacctgtacgccggctatctttccctgcaaggcggctaccgggttgactacgggtttgttggcaatctcatcgccttttatgttggtgatagacccggtgaggtcgcgtttcttggcgctgccgtacccgatgacgaccgtttcggcaagcatctgtgaatcgtcgttcatctgcacgtcgataacactccggttgcctactttgacggcttgctttaccatgcctacataggaaaactccaaagtagcttcgggcggcacttggatggaatactttccgtcaatgtccgtaatgacaccgttggaagtgccttgttgcagtacggatgctccgatgagcggttcgcccgtagcgtcggtcaccgtaccggtcactgtcttgttttgagagaaaccgggagttgccgtaaagagcaaacatgctatcagaaatagatttttcagccagaaggctttctccatagaatgtttaggttttttcttcattgcataaatttttagtggataactaacttgattgtctcctctgaaacaatcggaatgcaaaaaagatttgggcgttttgtatatctccggtttttaacataatccggaaggtttcttcgggcgcttcgcagtccgttcgatgatgaggtttgtctctttgtcctgtaatcgtaacccggcaatacagtggtgccatgttttcagtgcctcttccctttctcaaccaaaagagaacactgaaggaaagaagcaagccatgtcaccgaaaaggtcaccgaaacggtgtctgtttttttcgtagtgccttggtataagcaataaaaacccactaaaattgcagttttagtgggtttttgtctataaaagactgtatgtgtgtgcgggtgataggactcgaacctacacgcctcacggcaccagatcctaagtctggcgcggctgccaattacgccacacccgcaagggattttcccgttaagcggtgcaaagataagaagttttcttggttttacaagtaaaagttcaaagaaagttattcgctgactgccggagtccattcccctttaaggaaagcccgggctttttcgatgatagtgtctatatgctttgtttcatccgcttcgtccatattgactttgatatcgggctctattccccattctatctgctccatgtcggcgttgaaatgtgggctggcggagaagcgtactgtccatccgttaggcagttcggaagtgaaaggcatgccggagccgccaccggttttgtcacccatgatagtgacattgggcagacagctcatctgattgacgaaatcgttggttgcgctgtaggagcggcggttggtcagcactactgttttcttttgccaacgtatgctgttgctgggttccagttctatggggtagggctcggagaaatcattatgccccttgccggttttgtggcggatatacccggtcagcactttctcgttggtgaaacgggcggcgatgcgttcggagttggttacgttgccgccgccattgttgcgtacgtcaatgataagtccgctgcatgaggcaagataggagagtatctcatccaggtttccgttgcctatgcccgaagagaaactctcgtaacgcatatagccgatgttgtcttcgaatatcttgtacttgatacctgcggcagtgcggtagtcggtactcgccttgcccagatagaagtcttccacaatgtcttcgcggaagttgcgcggatagtcctgataccaggcatcgtaatacgaaacattgtgggcggaagctaagtttacatgcccgtcctgcagttcgttcagcatgtttcccaatacttcaaacaggccttcgctactcatgctgccggtaatcagcctgctgtattcgtcgtgtatggcatcccagtctatctgtttgtattccaggaagcagtactgctcgtcgataattttccagagggcctcaaagtttccctgcggagaattggcaacttcgtcttcgcggatgcaactgcccagcaaaggaagcacggcaatcagaaccattatatttttcagaaaccttaccatcttgtcattcttcatttatcactccgcttctttatttctttctcttgtttttcaataaatacagctccttcacgaatcccaccatgaatacgtgcgagtaggtgtgtgtctttatatcgttcacgtgtgactgctgcgcgtcccatatataggcgaaacgcattttggcacgtcccaccggaaagtctgccgtaagcatttgccgcagtgacggttggttgtgcaatgaggtgaatttcaccactccgctgctgttgcccaacgagaagatttcgtaataggattgcccgtagtgcggtgagaacataacgcccattaacggcagattgacctggtagcgcagtgtcagcggatagttctttatgcgtaagttccagatggccatgcccgatacgtccagattgatataggcgcgtgccgatgccggattgttggtattgcgcaggttgtagacaaaaccgccgttcaggtcggcaagaccgccggcgagcaacttgaaattgcctgtaatggggaagttgtagtgcaggccgtagttccagtttgccagtgcggagaatgtattgttgttatccgctttgttgcgggtatatcccaaatcggcctgaaagaaactctgtagggagagcctgccatccatccatctggtcatgcgcatgctttcgcgcgagacgcggaaatcaattccggtgtattcctggggagacagataagtgtcgaatacattcgtaaaacctacgccgtacatggtggcgcgagttacgaggcggctctgttccaaaccttccgctgtggcgggaagctgtgcctgcatggcactgctgcataacagcagtaccgtgcagataaccggtattatcggtttaggtagtttcatgttccttgctgtcatcattatcggagaacaatttcatttgtccggtcagctcgtccagtatgtcgctttcactctttccgtggtccgggtccagaatttcgggttcttcctcattcttgctttccgggatttgcggagtttccggctggcgggtaggttctaactcgttgatagtatccagcgtataggtagtcagtcgcttgcctttcgccttgaaaccttttacggcgataaattcgtctgcatcgaccaccagcggttcgcggaatttgtcatgcccgccgaatacgacttccagtcggggatagtattcatcggtcagcaggatgaggcggttattcttgttttcgcccaggtagttctgcttgcggctgcttgcttcaaagcagaatcgcttgatgtacggatacccctgctggtcggcatcataaaggactgccgtccacaccttgttcgggtcatatttctccaatacccgtatattgtcttcgtagtggttgttcacatcgaaattgctggtgtagaactcgccgttgttcagcactatcaggatttgctcgtcgctttggaactcaccgaggtattctccgcggctgtcgtagttgaggcgcaggacatcttggtcgaaccatactttccgtccgcccaatgtggaaccgccgcgctgtttcagggctatcttatgaaccgggttacgggtaagtatattacccatggcctgacgtcctttgatgtttatctggctgaaatcttcttcgaagatgatgcggcgtatgcgcggattgggcttgagcgtcactttgatgatttcggcctcaccgttgggattggctgtgaaatacacgatgcgtgagtcgggtgtgccctgtgtcacgtcgtattcgcggtcgcgcactacggaagtcacggcgaaacgcttgatataatgcgtgccttctttcccgtcgcggtagacaacgttgtagatggtacgtttgtcgttcttcttgaagacattggcatagagtatgttcttgcctacgaatttcttgtctgctaccggagtgatgatataacgtccgtcgcggaagaagatgataacatcatcgaggtcggagcagttggctatgaattcatctttcttcaggccggtaccgatgaaaccctcttcgcggttgatatacagtttttcattggcttccaccactttggtagagtcgatggtgtcgaagttgcgtaattcggtacggcgcgggaaggctttgccgtatttctctttcagcatgcggaaccagtccaccgtatattccacgatatttgccaggtggcggtctatctcctcgatgtccgctttcatgcgggcaatcagctcttctgccttgtcggagttgaacttgaggatacgcgccatttttatctccatcagcttgaggatatcctctttggacacctcacggataaacgtgggataataaggtgtcagacgctcgtcgatgtgttcgcaggcggcatccatgttcttggcctgttcaaattccttatccttgtagatacgttcttcgatgaatattttctccagcgatgagaagtgcaggctttccagtatctcgttcctgcgtatttccagttcccggcgcaataaggccaaagtgttgtccaccgactttttcagtacatcgcttacggtgagaaagtgcggtttctgctcgtcgatgacgcagcagttgggcgagatgctgacttcacaatccgtaaaggcgtaaagtgcatcaatcgtcttgtccgatgatacgccgggtgcgaggtggactaatatctctacgcttccggaagtaaggtcttctactttctttatcttgatttttcccttttcgcttgctttaacgatagaatcacagacactggccaccgtttttccgtaaggtatctcgcggatgacgagtgttttgttatccaccttttcaatcttggcacgtacccgtacggctccaccgcgttcaccgtcattgtacttcgatacatcaatattgccgcctgtctggaaatcgggatagagcttgaattcttccttatgcaggtattttacggatgcgtcgcaaagttcattgaagttatgcggtaatattttggaagaaagccccacggcgataccttccacaccctgtgccagcagcaaggggaatttgacgggcagcgtcaccggttccttgtttcgtccgtcgtacgacagtttccattcggttgttttggggttgaacaccacatcgagtgcaaatttggaaaggcgcgcttcgatgtaacggggggcggctgcgctgtctcccgtaagaatattcccccagtttccctggcagtcgatgagcaaatccttctggccgagttgcaccagtgcgtcaccgatgctggcatcaccgtgcgggtgaaactgcatggtgtgtcccacgatgtttgccaccttgttatagcgtccgtcttccatacgccgcatggagtgcaggatacgccgttgcacgggtttcagtccgtccatgatgtggggtacggcacgttccaggattacgtacgaggcataatccaggaaccagttctgatacatgccgctcagttggtgcttgacgtttgcatcattggtatccgcaggtttataatccgaatgcccttcgctccccttcgggagttctttatccaaatcatcttttgttccttcaaagtcttcgctcatatttgttcgggagttgtctattcatgaataaccgccggttgggcagttgcaggcaaaaatacgaaatatattccattaaaagaaagactgtatgtgagtttttaaatagcttttattatatagagagtctcagttatatggatttataaaaaacaatttgtttcaaatacgaatccatataactgagactctttttttatgttatagtttttgtgtatttaggcttgtagtgttaatcaatttattttaatggttacggaaattccatttggagttatcgctgttcatatcgaatttaccaagtgatggagtgctatctcctatggacactaatactagttcttcatttgccctagaaacttttttaggcatgatacggtaggtaccatcagtgagttgttctatcttccatagttgttcgggagcgccggtaaactcagggacagttgtaacttcagcatctgctgtggcagccaatgcacggttggttccttcaatcactattttgtagtaaggtcctcctaaatatccgccggcatcaggtacagcagtaattgtccacttctggtgggggcggaacatataatcaccgattcttacatcaatgttaccttgtggccatgtgtcgattacatcttctaaagtttgcgacttcaaaggcagaataggttcgtcacttttttcccaaaaacggtgtctgcctccttccatacgtacgaaatcaacactaagttcaagagcgtatcctctacgttcggattcaatttcgtatgtaccttccttgaatacttcacctgctaccggccattcgtttttccatagaagcgggcgtatggcaagtacactacggccaccacggtcgaaatcggcttcaaaatgacatgacatcttttctactccgtcagtttcgatgaaacgcccgaagtgtcctggaccggtctggcggtttcctgcagcgagtaccatctttccgcctccttccagcatatctctgcccatattgtcgatgtaggggcctgtgactttgcgtgagcgacctactacgatgttatatgtagagttggggccatcgcagcaagtgccgtgtgtaccaagcaaatagtaccagccgttacggtatatcaggtcggttgcctcgcagtcgatagcgatgttgataggttcattgccttccattcgtttgccggtagtagggtcgagttcgaccagccggataaaaccgaagtaggtaccgtaagatagccacagacgtccgtcagtagggtcaagcaacagtccggcatcgatagcatcacagtcttcattgtcttcggacgaagcgacagcaatagcttctgtatatttgaaatcgggcgaattagggtctaatgtcttgttccacatggtaagtaccgtaccgcgatgactgcccccaagacctcctccggtggcgctgtaagcaatcaggtaacggtcacctattttcacggcatcgggagctgcacctcttccgggtcttactccaccgctattccacgtccatccgtcctcggagatcaggccgcctccacctgtaccgaaggtgtaatatttgccttcgcattccataatggtggaaggatcgtgtatataaggttctccgatttgtgcggttgctttttcagatatcagcaaggataacagggttgcaacactcaagaatatagtttttgttttcatgattatttataactgatagtaatgtttttaacaggagcccccttttcgtcaaggaggcggatacaaaaatcgctcattccgggtccgttgataacggctccccggataatattctttcctttttttaaggtcagccgcttggacaggcaatcgtcttttaccatacggcggtcaccggataaaatgacaacttcttcaccattcagccaccacatggaggcggaatttgaaccgaccgatattctgacattcggtatgtcctccgggcaattgataacagtgacagcccaaaacagtacgccgtatatttgtttttgaagactagatgcaaaacggaacagctttacattaaacaatttactgtcgagagcgtgccaggttagttcctgtttaccgacttttactttgtcgccgtttttgggtaatacggtgaattgtccgggaaaatattcggtagtaaaggtcttacggatataactgtccgtaaataccgtgttactgcggttaggcttgtcgataggttcgagtaatagccaacggcggataaaaccatcatcatcgggtgatatgacatcggtagtacccggcgaaaaataggtggccaaacgagaggcggtttctttgttctgtgcatacccctgcacactcattagagtggcgaagcaaatcgccaaccatactctgtaataaggatttttcattgttatggtgtgtttctcaataatacataattatttaaatagtagtggagcaaattctttcaggcatctgcgccaagtgagaaattcatgggcagtacccggagattcgtaatagatgttgttgataccggcagctttcaaaccatcgctgagttttttggttctttcgggatgttcttccgaaccgatacccaggaaaaatacgtggatgttatcattgaatgccttgcggtctttgaagattccgttataagttgtgtctatattcttcaagtcgatattgcctgctccactgaagccaccgatataagcaaacttgtcagggttattcagcgtggtgttaaaagtgagaagaccaccccaggaaagtccggccattgcacggttgtcccggtctgtcaatgtccggaaattagattcaatgtgcggaatgatttcatgtatcaaaatggccgggaattgggcaccgaattttgctctggcatcggcaaggctttcgcccggcttgtttttaaatacttcgatattgccgttgtccattactacgatcatgggtttggccttaccttcggcaatcagattatccatgatgaagttcatcttaccttggttggcccagcttgtctcattttctcccataccgtgctgcaggtacagtaccgggtactttttggaaggattcttatcatactctgcgggtgtgtagacgaggcatctacgccattctttacgaatgtcggaataataccagctttggcttattaaaccgtgaggtacattcttgatagaataatagtctactcccttttctggaatctcaataccgctaacccatttgcccatgccgaagaagggtttgccattggggtcggctgtacttaccccgtctactattatctgatagtaatggaaaccgacgacctcaggcttttccgaaacaagcgaccagtatccatctgcttctttggtcatttcaccccggaagctgatttctactttttttgcgttgggagcaaaaactctgaaatgtactcgccggtcttcacctatccgggggtattccgcgccattgatattatgttcattaggtactgtacccgcaggaaattcttcttgttgggcatacatagttaagggaaacaccgctaaaaatagaaaaataaagttcaatgcgtttttcataatttgaatgtttaaaataatatatattgattacctattttcactatcatttgaatagaagcggggcgaattgatataggctttcgcgccatacaggccaggtatgtccgcccggagtttcgaagtatgtatatttgatgcctatctggtcgaagcgtttcatcattatctggcaattgttgtaagctatgtcttctttacctcccatggaaatccaaaattgttttagcttcgtattatagtcgtcttttttattttgtagcattttataatatttttcggtgtcgttaccccctccaaaaggagtaggattagcccaccaaccggaactaaatactcctaagtaggcaaaatagtcgaggttggggatgcctgcgtttaaagtttggatacctcccatagagagtcctgccaatgcacggttgttacggttggcttttacacggaaatttttttctatgaatggaatgcattctttaagaagttcgttttcgaaatcgttagtgttgccgtctgtcatgacgataatcataggttctgctttcccttttgctattaaattgtccatgatgatgtcggtacgtccttgattagaccagccgcgttcatcttcacccccaccgtgttgcagatagagtacagggtaagattgcgtagatgtatcgtagccgggaggacaatatacgaacatacgcctccagttattggctgttttggagaaatatcgttttatacggatatccccgtgtggcacatttgctatatggaaacgtgtatcaccatccgggtaaggtatttccacgccacttgccatcatactacatccgtagaaagattcgctggcaggatcggcaacggatactccgttaataatgagaaaatagtagtgaaaaccttgtgtaagcgagtcggtaatacaactccattcgccattagtattgcgtacgaggtcgtatttacgacctaaatcgatttgtactttttgggcgtcaggcgcttttattttgaattctatacggttgccgggtaaaaggcgtgggtacgtggcattgcggacattgagctcactacgtttgccgggcagtgtagattcatcttgtgtacggcggttaggttgtgccaggagagctcctaaacacacggattgaagtaatagaaaagtgaaaattctgttcataaattctgtgtttttttgttgttgacttcgcaaagatagctgcatttcctactcttttctttgtacttttaaacactttccttgcatttttagataatataggtgtgtacgtcctttattttctttagttcatttgattctatatgttgtatagttgtgtattacatacatatttattgttgtattttaatttgtacaaactttcaatacgcaatatgttgtatgtaacagtatgaggaaaaacattttattctttctttttatattgtttattgttgtattatctttgtagtaaagaatcatagtatatgaaaaacactttattattaatatttgcttttctgttatcggagttctccaatgtagcagtgtcccaggatttcgctttctgtaatattaataatttgtcaggcatttccatgcgtgaagtaactgctgtagtgcgtgatgatgacggttttgtttgggctgcttcacgtactggggttttgcgggttgcgactgacgattatcagctctactcgcttccatttactacgactgatgtgatgcagatcaagatggcttgtcgtggcgggttgttggttgttgctactcaaaatggacaaatattccgttacaaccgtgtattgaataagttcgacctctggtttacgttttcatcattattggggaatgaggattgggttactaatttgttaatagatgttgatggaaaagtatggataagtactagtactggtatttttttatggacgggcgaagaaattgtacgggcatttgataatatagcaggtatttctaatatgacgctattggaaggttgttatgcattagcttttgtacaatcgtccatataccgtatcaatacccgtaatcgtacgaaaactaaattgcagggccatcttccttatattatatcatctgctcgctatgatgcgcatacccatcgtgtttggataggtacctataatgcgggattgtggcagtatgatcttatcgatcaaatgctccggaaagctgcgattccacaatttccgaaacttattgtgcgggatattctgatacctgatactacttcgctttgggttggtgtcgatggtggcggtatatggatacttgattcggaagcttgtcaagtacgacaggtattacgtgaaaaccttgataacccttcttctttgcgtggtaatagtgtttactccttgttggtcgatgaccaccgggtatggacagctactaatagtggagggttacagtatacagaaataacacgttccaacgtggaacatttagtacatggtatcaataatccgcaatcgttacataataatgaggtaaaccatatcgttaccgatagtcggggaaatctttggattgcgaccaatgacggtatcagtctacgtgaggcttatactcataggtggaaacagttatataggggatgccagcaggtattcttatcgttggccactgataagaaaggacgtatttatgctggaacttatggtgaaggactctacgtattggatgaaactacaggtcgtaaactgcatcattatacaagccgtgatggcaatatattcggtgcgggtggttttgtgtttgcaacctatgtggacagcgagggcgatgtgtggatgggaggcgttaaaggtaatgtatactgttgcaatgccatcgatgggaaacttcggacatatgatacacaacctgtttattgttttgcagaactttcacccggacaaattttattgggatgtgcatatggtttgctactgatggataaggaaactggtaaattagatatccttttatctggttatactgtacatgatattgctgttgcagaccgtattatatgggtctgtacttcaggaggggtgataggtttgaatatgcatacagccgaacaagtacgcattactacacagcaggggttaccaagtaattatactaaaagtatactattggctaacaataatttgtggataggtacagataacggattgtgttgttataatctttttcataaacaaatacggacatttgctactcaaccacagttagcaaatgtgtcgttcagtgttaatgctgcttgccaattacctgacggtcgactagctttcggcagtaacaatggagttgttttattttatcccagcaaaattaatacaattcatccttcgggacgtatctatttttcggatatacatgtatcgggacgctctattcgggaaacggttgattttaatttatctgttcctatcgacagtctttctacattgcatttgaattatccgcaaaactcttttacattgtcggtacttccgctaggaagcgtcagtaagtctgtctccttttcatggaggttagtggggcaggatgaaacatggagtacttataccactaaccgatatatcaactataccaatttaccggctggaaattatacgctttgtatccggttgtacgatggtagcctgctgtcacagcggcaactttctattgttgttgagcctccattttggcaaacggtatggttccggttattggtggtaactgtaatcattagtttgctgtttcttgtcattcgctattatgtacagtatttgcatcatcgttactctaatgagaaaatacgcttttttacacgtatggcacatgatatacgtacttcattgatgcttattaaagcacctatagaggagttacataaggaaaaatctctttcgcagtggggaaccaggtgtttaacactagcttctgaacaaactgcacggttatccgacacggttactcagttgcttgatttcgaaaagctggatgttggatgcgaacagccgttgtttaccgactttaatctaaccgatctcattagacgacgtaccggaatatatgcttcatatgctgccggaaaacaaatagatattaaggttgaccttatgccggaggattattgggtacaggctgatgtgcgtatgctggaaagggtggtcgataacctgctttccaatgcagtaaaatattctacttctggagaacttattgaagtgacttttaccggaaaggcgactgaatgggtgctgcgtgtcaaggattatggtataggaatcagcaaagcggcgcagcgtaagttgtttcatgagttctaccgcagtgataatgcagtgaatgcgcagattgtaggttcaggcatcggcttgttgatgacaaaaagatatatttccattcatggtggaaagattaccgtaaccagtgaactcggggtagggactactttcgatattacggtacctttacggcttgcttcccaaatgaaaactgccgatgtgcccgtagcagataaaattgagatgtctgaaaacggagatttggcggtacacgatatgcatatccttattgtagaagacaaccatgctttatgcgagttcatggtacatccattgcgtgagcattttcgtgtaactacagctaatgacgggcagcaagcttgggagatgctgaatgacttgcagcccgacctcattgtttccgatgtggttatgccgcgtatggatggattcgaactttgccgtaaaattaagtctacttacgaaacatctcatattccggtaattctgcttactgccctttccgataaaaccaaccaattacacggattggggctgggagctgataattatttagttaagccgtttgatatggcgttgttagcaagtcgcataacttctatcattcgtaaccggcgtacagtgcttcagaaagctttggaagcaaagcgcgatgatgtacgttctattgtagccaatcgtatgaatgatgaatttatcaagaaagctgtcgagtgcgtacgtgccaatattgctaacgagaacttcggtaaagaagagtttgcctctgcccttgctttgagtcagtctttactttataaaaaaataaaggcacttactaatttatcagtagtagaattcattcgttctatccgattgaactatgctatggagaaacttcgttcgggagaatataatgtgacggaagtgagtgagatgtgcgggtttaacacatcagcttatttcagtaaggtctttaaagaatattttggaaaaacacctacagaggttatgcaaaactctgctttataagttaaaattgagcatgtgataaagtaagagctgaacttcgggaggagttcagctcttaatctcactgtttattcgccacttggattttgctttagattaggattaacggaaattgcatcaaatgggaatgcgaagtattcatgcttgccttttatgaaacctgttgttccactgttggggtttgaatactctacatagatacgatgcttaggttcgccttttgtgaaaaatgcatcgtaagcagtaggtatgtttttaccattatctttaacaccatctgtatcgccccaacgcaccatatccgggaaacgaactccttcaagccacatttcgaaactcttctctttttttacatcttccaatgtaagttgagtagaaacataatcggaacctgcacgattttgaacatcctgaagacattgaagaccaagaccatctgcatcgtctgtttgtgcacaagcctcagcatacatcaacagaacttcggcataacggaagatcgtgagatttttgaatccccaactaccttttgtgttatcctctttccaagcaacgaatttattggcaaaatattctccaacaccataaagacctgtcttgtccttaatgccaatttgatcggatgtttcaagttgtgcacgggttaatcccttgcctttggttccattccactccatttcgtagagaaattcgtcagcggtgaggaaggttgatttacggcgataagaatcaccgtcattggccaacatacgtgctgcaaagtcttcacgaatggcatgtcccccccaaccgtcaacacctatgaatgaaggcatggaagctaacttgtcagtccgccagttccaaaattggataaacatccagcctgtacgttgaatatagttactccactcaccgatgtttgcattttccaccacattagcttgaaaaatcatttcttcgcagaggtctcctgatgcgtggaatagatttgcccagcgattaccgggtacaagttcgtattttctagattggataacttgtttgaggttattttttgcacctgcataatctcccataaagagacgagccttacctgcaagggtaagagcaaagcccttggtaacttttgaagcccccactttgtctgtcgggcttgtgcgttcatcaaggtcatttaccacagcttctgcctctgatgcacaccattcgaggagtttatcatgcccaccttcatagttagtgggtttgatatctgctgagagaacatggtctactaatggaggacaattccacccgatagcaagtgtgaaatgtgcccaagcacggagtgcgcgagcttcagcacatacacgtttcttgatgtccgtagtaggttctatattatcaagaataaggttacagtcataaattactccataaagcccccaataggcattcttgataacttcgttctgtgagtcataacgaaactcattgagttgtgcgccaaagtcattgtcgccataataattacccgctgctagcatgtcgtcaccgggttcattgaagagtacaggaagagcgatgtaaataccttcgttaccagcaatgttcaaacagaatgattggtagaggttgttaagcgcattctgtgcgtcatcatcggtctggtagaaactttcaaatgggatgacacctttttgctcaatgttgagacgatcctcacaagcgctgaagagtaatgtagcacttaaaagtgaatatataatctttttcataatgaatatacttttttgagttttttcaagtaaaacttgtcccggttagaatgagaaacttgcaccgaatgaacacttcttcatggtgggatacgaacctatgtcgaagccagcaccaccatttctgcctgtggttgcagtttcaggatccattcccggataactggagaatgtaaagaaatcgtccaaagacacaaagaagcggagattcttgattgccactttctgagtgagtttcttgggcaaagtgtagccgagttggagttgtttgatcttgaagtaagaaccgttgaacatagaagcgcttgacccccaaaaattaaggtcagtagctacttggctcggtgcaggcatggaggcccctttgttctctggagtccaagcattgtccatatagtatctcaatgagttgcgtagcgggctgtctgcacgatagagaatgttgaaaattttattgcctgctacgccggtaccgaatgccgtaaagtcaaatcctttgtattcgagattaatagtaatgccgtaagtgaactttggaatggcactgccgatgtctgtcatatcctcgtctgtcaattctgaagagttcacaattttaccttcacgattgcggaatcggggggcaccagtttcgctatcgacgccgacatagtcaaatgcacggaagtaccagatggaattcccttcttcaaatgcagtatgtactttgttgtttgtgccgtctacaccacctttgctggctgtaatgcgtgggagatcgtcataaaggtaagttacttcatttttcaatgtagagaagttcgcattgatactgtatgcaaggtcaccgatatggtctttccaaccggcttcgaattcaaagcctttgttatttactttaccagcgtttacggtggtttggtttgtataaacctcgggaaccggattgatttttacaagaaggtcttttgtgtttttgttgtaatagtcaagacttaccgtcaggcggtcgttcaggaaacgcatgtcaaggccgaggtccaactgttcggatgtctcccatttgagatttggattggcgagtccagaaggataagaaccgtagtattgttcggggttgtctccgtactggtaccaggctgcattgtagctaatgggtgcggtgtatggatagttgttgagcacatttacattaccgttacgtccccaagatgcacggaacttcaagaaggagataatatcgctgctgatattttctttaatgaatttttcattactgatagtccaacctacggccaaagaagggaatttcccccaacgtttgtcaattggcagtttggaagtatcaaatgcatcagcacggtagttgatttgcaagctataacggttgtcgaatgtatagagcagacgaccaaagtaggagagactggttgaaatacccggaaggtttccgatgctttttgttgtagttgaagctgaatttacatagtcgagatacttaaaattatcagcatcgccggagagtattttattaccgcctgtaccggttgctgaagctgatacattatccgaacggtcttctgtataggacataccgatcataacgcctatgttgtgtttatcaaataatgtcttgttaaagtttgcaaagttttcccattggtagtagtggctgttattagcgttggccgagatggaatagttatcggctttggcttgtccgttcatgtaatagggttcggagtagtcatggctattgctttgtgcaatacggtaggaaaaacgagatgtcattacaagaccgtcaatgggagtcagatctacgaaagccgttccgcgaacggtgaaaccggaattcttgtagttacggcggtcaagctggaggagtggattgccattgtcgtccatttggaattttgaagtagcgtagtatttgccattcggggcaacaagaattttttcggggtttgtggcgtatacgtctttcatacctgtggtaaaatcatcaacgctatcccaatatacgggagttagggggtcgagcaagagagctggtgcaagcatggaaccataagcactttggtgagtgatgttgcgggttgcccacttttcaatagaagtgttggtgccgacttttatccatttatagagttgatagtctgcattaagttgggcggtaaggcgtgtgtaagtgtctttcttgccgcgtacaataccgtcattgtcaatgtaatttatagaagtaaaaaaatggcctttgtcgttgccgtcttggaatgtgacagagtgttgggtagcccagctagtatcgaaaacttcctttatccagtctgtttcttgcggattgttgtagtcaacgccattagcttcacacatagttttcatatcataacccgacatttctttgtatttaatccagtcttttgcaccgaacagttcaggtgttttgccaaggcgttggttaatggctttgaaagaatatgtaattttgggacgaccatttgcgctgctaccagtctttgttgtaataaggacaacgccattaccggcttgggcaccgtagattgcagctgaagcggcatctttgaggacttccatagactcaatcatggatgggtcaaggtattggatgttgtcaactttcaaaccatcgacaatcaatagcggaccaagttggtctgagtttgatgaataaccacgaatacgaatcttcgctccttcaccgggagcacccgatgtgttcagaatctgaacaccggcagccttaccttgaagggcggcgccggcatcaactgttgctaagtttttaatatcatctccaccgactgaagcaattgctcctgtaaggtcgctcttacgttgaacgccataacctacaacaactacttcatcaagcacttttaagtcctcttgcatacggatatcaattttgttacgaccattgacattgattgtctgtgtcttgtaacctacaaaagatacggtaagggtcgcgttgctattctgtaacgagatagagtagttaccatccatatcggtaatacatccgttggtcgttccattttcaagaatagcaacaccaatcattggttcagaatcattagctgagacaacagtacctttaactagggtttgtgccattgctgaagtgcaacagaaaacaacaaacgccagtaaaaacaaaacttttgttttcataagcatagaattggtaatttttaatgagttaattagtattagatttgtaatgtagatatctacaacatcttcatttgtagaacttgttaattgcactttttcttctttttaatgttttttcattggcaaagtgtttttttatagtttaataaaagtaaataatgaaatttattatataatattattgatgtagcaaaaatgtacgcctataaatattatagcttaatgcgcagatttgtaaatatttgtattggaaattgctaatctagaagataaagttgaaacgtaaatgctgtcattagttctcatttgattattagcctgagaatccatcccacctgatatgagaaaggagattcttcatcgctccactcttctgaatgatagaatgcacggtttatcagaactttaattttaccttctagattagtgaaagttatttcgatactccttctttagtctgcaccacagtttgcatagtaccatctggattataatgcaactcgtccacacatacgctgcgtcgtcctattgctccggcatgtccgtcaagggtcaggacagcgttgtggtagaacagataccattgtccctggaactctataattcccggatgaatggtgaagctgttttctgccataccggtcagttcgccttgcggtgtccacggaccctccatgttgggagcggtggcataagatatattctcgcgaccttgtccgaaggatgcatacgtaaggtaatacaagtctccgcgtttatgaagccagggaccttctacgtatcggggcaggtctaccacctcgatatcgccgtcgatttcggtaaggttaggcttcaacttggcaaggaaacaagttccgtttccccaagaaagccaggcttgcccattctcatctattaaggcggtggggtctatgtcgttccaccagccgcgcggaccgttgggagtcatatcgtcggtaacgagcggctttccgattgcatcggtgaaaggccctgtgggggaatcgctgacagctacgccgattgccttgctgttataaggctcgccggcttgtacggtagtataataatagaatttgccgttatgctctatcacctgtgctgcccatgcctcacctatgccccatttaaagtccgtgggtttcagtacgacaccgtgatcggtccatgtctgcatgtctttcgtagagtaacagagccattcggtgatgttgaattccttaccgccgtgggcagtgtcctggccttcgtaatattcgtcgtgccctacatacagatagagcgtgccattgtgtacgagcggagccgggtctgccgtaaacttgtctttaacaagcggattacccgtgttgcggaaggtaggcaacttgggttgttgtgcgcatcctgccaataggcaaatggcactgaaaataaaaagtaaattctttctcatatgtattattttattaatagtataatcaaactctctggcatgatacccgatgcaaaaataggcctgcaacgtacttgccggcttatatttttagatattcagtttacagaattaggtatatatcggaaaaatataagccgttttctattccagtaaccggttcaccgcatgaaccagatagatataatcgggagccagtgggataacatactcattctcgctccagtgaaactggtagtcgtcccggttctccgggaagtccggtttcagcaggcggatacccggtacgataccgccggggatgaacgagtgatcggcacggttattaccataagccaccctcttgggctgggcgcctactcccgatacgaacgaacggttatggtaggggtggcagccgtaaatatagtttaaattgcggaacaccagctccgggctgcccagttcggggaacaacttaagaatttggtaattgatgataccgttgcgaagtatcatggcattgccggcccaactgttcaggctgatgccgataccgaacggatttagcgtttccagcttggtctgctgcgctatatatgcctttatttgcggttttacctgctgtttgaaagtatcgtccatgaagggtgctaggcggacgatgagtgcagcgttccggttaaattgtctggtaagttcaggaagcaactcgtctacccgtgctttgtacatggcattgccggtggcacgccacaactcgaaggcagcgtggcattcagaggcggtgagctgctggaagcggttgaaaggcgtcggggattcctcctctttgccggctttgcggttgtgctcgtctttccagataaactccgctatccgcaaagcctcgctagcgagcgaagggttgagggcaggcaaaacacgtgctgaggcagctagtgcggcagcagttccgtaattgagggcaggtgtacggttggtgaacgccatgcggtcgtctgcgttgcccgcagtaccgtcggtcttggttacggcatcgcccaagtggcggtattggtacaggtgcgattcgttgatgcccggaatggcatatccgatagcgttgacctgtgcggcgagctgcaatacgccatgctctatttgctgcaatacgtcaggcttgccgtcgggtaggtgtatctcggtataatgtgcctgttggtcgacagtcgtttcatcgtgggcgggagcgaactcttcccagatatctgtcaatgactgcacggtttgctgctgcgagggcgtctggatgtcgaaatcgccggcatcgaaccagccgcctacattcagtccggggatatgctgtccgggtttgaacctgttgtccgtgctggcgccttggctccagccgtcccagtgcgaatagttcaccggtgcttggcgggcgtcgtccagatgagcggcaccatgccatacgcggtaagcttcacgaacgaacatatggtccatttgtaccggcataaagacatccagcgtaggataccaggcacgctggtacacattggcatcgattgggaacgggccgcttgtctggtcgccgtaagccagtttgtagatacccggttcctctacctgcgaaaagtcgaattgcaggtaattatagcgggtgtacataccccatattaccggtttgctcgataaggcagccgtcagcgagccgtctgaattgaccttgtaaagcgtgatgtccgaaagcggcttgtcgttcttgtccagttctatcacggccattttctgctgtgcaggatgataacccacttgtgaataactgatagtgggagtacgcaaccagcgggtattggtttcggcctgtatgaaccattcggctatcttgccggttttgcctgccggcagcaacgtgcgcacaacgaaagtaccgttttgctgtttgttgcgcccgtcaaaaagcatcagcttgctgtccggtagcgtggtacggatagtgatatgtttcgacggagcatcgggagctatctcgattaccgtaccggcagccattggcgtcggctccacaataccgttgataacggtcatgttgtcggctgccgaggtggggaatagtcccggcctgccgtccattaagtaagagtgtccgaagaatacgggcggaaagaactccatgtttagtccggccacccctacgagcgagtcgggcagtaccttgtctgccgatacgctgaggtagaaaccgccgtcgcgtgcttctccggtcagcgtatatgcaaaggcatactggggatattctaggcttacatcaatgcgcttggccgctttgtccacggtacggtttatgaatacgggcaatttgtcccactgccccggggtagggttgaggcggacatcaccgttggtagcggtgcgcagtccgtgatgaatgatttcgacggcgcttattttggaatcgtcgaacatagcatcgtacttattgctgaaaacaaaataattcagtccgcgggtttcgaaataactggagtcattcagcatcaggtcgttgacttgggtgaaggaaggagaaccgtcttgcctacaggcgccgaacaatgcgaaccctatgagcggtaagataaccttgccatataataaggaaaagagcgaatagcgttttttcatgaaatgctgatattaaaaagatttgtactatgttattcgaaacttatccagtctactgccaccggatgttctccggtaagaatggttttcaaactttggacacctttgggcgcattgcgtacacttgtgcttatttccgcccattgcccggttggttttacggacagaacggcgattgtcacccctttgtctccgatagtttgtaaggttatcgtgcctcctttttctgaacgtacgcgtgctttgagccgttttacgggtgcagtgccgaagtcgacattgttgtacaccgcccacgtgtctgtcctgtggaataaaatctgccatccctggaatgtgtctgtcgggtccaggtagtctatggacactccgtaaggacttattgcagagtagcggtcaagctggattttgctgcgtgcatcagtcatgcccactccacgcaaggttggcttcacttttttgatagtaccgtctgtgttgaagaaaagtgagtcgatacgtaccgaacggttcttgtcgaagttgggagaataatcgttatgatgatagaaaagataccactggccgttgtattccttaatggagtggtgattggtccagcagccgacaggcgattcgtccatgataattcctttgaaagtgaacggtcccatagggctgtctcccatggcataagccaggttttcggtcttgtcctgtacccaggggaaagtgaagtaatatttgccgttgcgtttgaatacatatggtccttccttgaagccttcgggcagcccttgaacctgtatcggttcggaggcaagctccttcatgtttggctttagtttggcaaccgacataccgcgtcccgaccaataaatatacgcttctccgtcggtatctacaaggacgcaagggtcgatgccggatatgccttttatgggttcggcttctggtgtgaaaggtccttccgggttgtcggcggtagctacgccgatgttgaagccgcgcctgccctcacctttgggcgtactgggaaagtagaagtaatatttttcgtttttatatacacactcgggagcccacatggagtaggagtcgggctgtacccagggaatttcgttttgggagagaataactcccaggtcagtccagtgggtcaagttggtcgaggtaaatacatgatagtcggccatgcagaaccattctttcagatgttttactgggctgggtatgtcgtgcgaagggtagatatataccttaccgttgaatacccgtgccgtggggtcggcagaaaactggttcctgataaccgggttctgtgcctgaagcataccggttgtggcagctgccgtagcgagtagaaggaaaagttttttcataatattatttaattgttgtacaccacaaatgtagtggaagaacacgctttttttcttgcacttttggatacgacttttatacttttaagtaaaatgtccggtaatgagagaaatagcaggatataattgcagttttctttctctccatttgcgataatgtttatttttcttttggatatgtacgatgccctgttgttgaatatgatgctttcctgaaatctacatttttcttgtcgtccgacacgggaaaagtaatgatataccgtgcgagaaattataaaaaagttcgggcggctcttatggcccttttcttcgagtatccggaacaggtaatatatattcggaaaggtaagaccctcgcgagccaggaggcggcagaggaataagccggatataactccgggagtattaagaaatagaaagtattcggtaaccttgtctggcatccgctggtagagatatgtattgccctgaaaaaggattagcatttgcaattcgctgtctgattacaccgcatataactgttttatgggtttgtggctacaaacattaccataaattaatacccccgttgccctacatataagataaatccctatctttgtggcgctttttaactgaacaaagatttcgaattaattaagatacaataaaaaatggcacaggaagacgtttttaagaaactcgtatcacactgcaaggaatacggattcgtgttcccttccagcgacatctatgacggactgggagccgtatacgattacggtcagatgggtgtggaactgaaaaataacatcaaacaatactggtggcagagcatggtgctgctgcacgaaaacatcgtaggcatcgactcggctatctttatgcaccctacaatctggaaagcaagcggacacgtggatgcgttcaacgaccccttgattgataaccgcgactcgaagaagcgttatcgtgccgatgtattgattgaagaccagctcgccaagtatgacgacaagataaacaaggaagtggcgaaggccgccaagcgtttcggtgaggctttcgatgaagcgcagttccgcagcacgaacgcccgcgtactggagcatcaggccaagcgcgacgctttgcacgaacgttttgccaaagcgttgaacgacaacaatcttgaagagcttcgccagataatcctggacgaagaaatcgtttgccctatcagcggtacgaagaactggacggaagtccgccagttcaacctgatgttcactaccgaaatgggttccacttcggaaggtgcgatgaaggtttacctccgtccggaaacggctcagggtatttttgtgaactatctgaacgtgcagaagacaggacgtatgaagattcctttcggcatcgcacaaatcggtaaggctttccgtaacgaaatcgttgcgcgccagttcatcttccgtatgcgcgagttcgagcagatggaaatgcagttcttcgtaaaaccgggcactgagctcgactggttcaagacttggaaggaaacccgtttgaaatggcataaggcgctgggattcggcgacgaccattaccgctatcacgaccacgacaaactggcccactatgcaaatgccgctaccgacatcgagttcctgatgccgttcggctttaaggaagtagagggtatccatagccgcaccaacttcgatttgtcccagcacgagaaattctccggcaagaacatcaagtactttgacccggaaaccaatgaaagctatactccgtacgttatcgaaacctctatcggcgtagaccgtatgttccttagcatcatgtcggcttcttattgtgaggagcagttggagaacggagaaacccgcgtggtgctgaaattgcctgctgcgctggctccggtgaaactggcggttatgccgctggtgaagaaggacggtctgcccgaaaaggctcgtgagattatcaacgacctgaagttccacttccactgccagtacgacgagaaagacagcatcggcaagcgctaccgccgtcaggacgctatcggtacgccatactgtgtaaccgtagaccaccagacgttggaagataactgcgtaacgctgcgcaaccgcgatacgatgcagcaggagcgtgtggctatctccgaactgaacaatattattgcagaccgcgtaagcattacgtctttgctgaaaacgctgcaataagataaaatgtattttgtttgtcactgccgttcagggcgtagcgaaaaagctgtgccctgaatgccgggagacaaatgctgaataatagtaatcccgtaatttataatcagatgaagagaccgttccttttgtttttacccttcttgctgttcatagcaggtgcgtttgtggcttgcgaagaagtggaggaggccggaaaatatgataactgggtaccgcgtaatgaagcttttattgattccattaaaggtaagaccggcgataatatcgtggcttcgcttgaagatgccgaaaagatggagattggcacgttgtatgccatatccgtgccgaccagcggtaccggggtcaatggtactttacgtcctcagtatgtgtattgcaagaagttgtggaaaacagatagcggggcatacccgttgttcacggaaaaggtaagcgttttctatcgtggtactttcattaccggagaagagttcgatggcaattttgacggtttcggagcgacagaccgcgaaattccgttgcctttatcagatcccttgtccgaaaactctcccgaatccaaatggcctacggcgtttaattctccttccgaatttgtggtatccaaagttattgcaggctggacatgggctttgcaatatatgcgggtcggtgagcgttggatgctgtatattccctggcagagcggatatggtgcaagcggcagttcatccggtgatattcccggttatacgtcattgacctttgatgtatgtttggaaggaattgcagactgattgattggatataaaaaacagaaaaggtggtaaagtttgttctttatcacctttttccgtttatatgcgtgtcatgtgtcttttctaaatctttttcctgagggctttcgcccatattttatagccttcttctttcaggtgtaatccgtctgttgtcaaatcggcacgtaatacattgcttcctttttcggtgaataaagggaagagattaatgtacgtcaggcccttttctttggcaagtgcttccagttgtttgttgatttcgggtatcagatttgtcttgcctgccagtcttttataacggccgaaactttcgttgataggaagcaggctttgcaggtaaagcctggtgtcgggagactctttccggatgcgctctaccgtcatgcgaatcataccggcgatgctgtcggctgtcaggtcgtgcgaaacatcgttcacaccgataagcaggaatagtttggcaggttgtcctggcaatatctggtgcaggcggtcgtacacacccattacctcatcaccgataatgccgcggttgcgtacgtgcttgttgccaaggcgggcggcccagtcaccaccgttttccgtcaggctgttgcccagcatgactatatctttgctgccgatggcaggttcgtccatgaactggagaaaacgtttgtaataatggtccgtatatgtgcgcggagcgggatacagagaggctgccactgcgttggctaccagtgagcgcaggcgtaccacgctgtgtccgtcttccggatgcacggcgttagtcagcaggattacagacgtgtcattgtcggggtcgattacgacagatgtaccggtgtagcccgtatgcccgtaggtattcggaccaaagaaatcgccggcattggatgcgtaggggctacatacatcccaacccggtgagcggcccagatctgctgtagcacggggtacggtgcgcatggtctttacgccttgcgggctgagaatgcgatgtccgttccactctccgccattttgcagggcggcgcaaagtatggcaatatcttcggcgcaggagaatacgcctgcattgccgctgatgccgccgttgagaatgcgtgcaagcgggtcgtgcacctgtccgcaaagaacctgtccgtcgggttgtttctctgtcggagcaatgttctccggtagaggaacggtatttatccacttgccgttcttgtcgcgtaggcaagggagataatcggtatgcttcatacccagtacgtcgaagacgttttcacgggcaaagtcgcgcaaggattgtccgctgacggcctctatgatgtgttgcagggtgatgaagtttaggcaactgtactgaaagccggtttgcggcttgaaatcgcgtttgcatccggcgatgtactccatcagccctgccgggttgggagaaccgtatttctgttccagctccgcagccggggcataaggcgggagtccggaactgtgtgtcagcaaatcggctatacggatcacctttttgtcttttccgtcttcgctctcccagtccttgaagccggggatgtagcggctcacagggtcgagcaggcgtatttttccgcgttctgccagaatcatggtgcatacggctgtggatatggacttgctgcaggatgccatatcgaaaacggtatttacggtcataggttccgtgtccggataaatccgtttgttgccgtatgccttcagataggccattttaccgttacgtaccactgcaagtacggcgccgggaatctctttgccggcgatggccgtttcaatggcttcatcggcatacatcagtttgcgggaatccagtcccgcctgttcgggagctacccgctgcaaaggctgtgcggtggctgcctgcagaccgaacagaagtacaaggatactggtaagtgttttcatatcttgtttgctataagtggattttcggacagaagaaccgggaacataaacagtgcggaagatgccgcatgcggcaaggcagagtctgttcttccgttcttttgttcttctgtctgaaaaccgggtgagatctctgtgtgctctgtagtgaatctgccaattgtcattccctggcccggtaagcgtctgccgctttcttcaccgagccgtgcatcagcaggagcgccttggcttttccgtagtcaagccccagttcctcgaccagcatacgcgtgccgcggtccaccagtttcttgttgctgagctgcatattcaccatcttgttgcctttcacacgacccaactgtatcattacggaagtggtaatcatattcagaatcatcttctgtcctgtacccgacttcatgcgcgagcttcccgtaacgtattcaggtcctacaatcatctcgataggtacatcggattccgcagccattggcgaatcgggattgctggtgatgcaagccgtcaggatgccatgctcgcgggcttcgtgcagcgcaccgataacgtagggggttgtgccggatgctgctatgccgataaccgtatccttgtccgtaatattgcgttctaccagttcttcccagccgcgttgcatgtcgtcttccgcattttccacgggattacgcagggcagtgtctccgccggctatcagaccgataatcaaggtaggcggcatgccgaatgtcggtggtatttcggaggcgtcgagcacgccgagacggccgcttgtgccggcacccatatagaaaatgcgtccgccctgtttcatgcggggtacgatttgtgtcactaatttctctatttgcggtattgccttttgtacggcaagcgccactttctggtcttccctgttgatgtcttccagtatttcacggacagacttcttttccaagtcgttgtagagcgaaggttgctctgagatttttacaaacataaggctatttacgagtttacggtttactatttacgattacttgtgatattctatcagaccttccatcgggctcttgatgaccgtacccagccggatacccatttcgctggcagcttcggccaatatcgtcttgtaatagaaagccacggagccgataaagtgtaccttgctttcacggtagttttcgtactgcatcacgttacgtttgaggaatgccttgaagctgtccgataccagcgtgcgtatgcagggttcgtccaggttctgtgcaaggaatggagagaggcttgccagaaaacggttggggaacggcttgcggtatacacggtcgatgatatcggcgggtgtcaggttgaactgcgtgaggaacttctccttcagttcggggggcatctggtttttcagaatatcgcctaccaacagcttgcccaatacggcgccgctgccttcatctccgaggatgaatcccagtggagatacgttggatacaatctgcttgccgtcatagtagcatgagttggagcctgtacccatgatgcaggcaatgccggcatcgtgctggcaaagtccgcgggctgccgccagcatatctgtgtttacttccacctctccctttacccggagatgcttggtgatggcacggtgaaccatggctatcttgtcgggaaatccgcatcccgcaccgtagaaatatacagcatccaatgcatcggtcgttaaccggggcaacagtgctgtcgcaatctcattactgatttcctcttccgattgaaagaaaggattggttcctttcgtaaatatctgccggatgagttgtccgttctctacaacacaccagtcggtctttgtagagccactgtctgctattagaatcatattattacttgttttgagtttatccgattatagtttgatataaatcttccgtttatagagttggtagccgatgcaccagttgatgccgacgaacagcaacgcatacgccagcgaaccgccggtttcgccgaatacgggcattaacagcactttgtacagaaatccgtgtatgctgatgctaccttcgccccacgggaagcagatgctgccgaagagaatgccgagcacaccgcccagcacatacatgaataaaggattgacaccgaacgactcgaagaagaggctccatttcttatagcctttcacgtcgataatccagatgagtagcgccaggaagctggaagccaatccgcaggtagccagtacgaaggtaggcgaccatattttcttgttgatggggcatccgtaactcagcaggaagccggcgaatgtaaggatggtaccggctaaaaacagtttgataagatgcgagttcagcatactttcacggctttcatcagccttgcctccttcgagcatcatacggcctacgcagaagcccaacagtacatgggctatggcagggatggtgcttagtaagccctccgggtcgatgccgttatccttgtacatatgtgcgggggtaaggatggcacggtctacaacagaaaggacgttcgtatcgttgtaggcaaatccattgccacaaaccaacaggatgaagtagcctgtcagtagggtagcaatgagataggggatgttgcggtgcttcatggtcagcgcaatgatagcggtagcaccgtagcagagggccagacgctgcatgacacccaggatacggatgcggtcgaatgtccatgcggcttcccacagttgggcgccgaagccgatgccctccgtgggagaagtccagtaataacagaacctcgagaaccagccgatacccataccaatgaggaagatgagtatggtacgtttcagaatcttcatgccggcggcacggctgaattcgaaattatactttttcagggagatgtatgtggaaattcccatgatgaacatgaagaacggaaatacaaggtcggtgggggtaagaccgttccattccgcatgacgcaggggggcatagatatgtgcccatgtaccggggttgttaaccataatcatgcctgcaatggtgacaccgcgaaggatgtcgagggcaaggatgcgcttgtttgtttttactgtactactcatgatttttgtgtgttaagttagttgttgagtttaacggttgcgggttgggtacattcatctaccaggtagactatggacacatacggaataccggagttggttgtcagcccgatttcacaggtacggctgttggaatatccgatgcttacgccggctgcttctatctgggggcggagtttgcgcagggcgtatgcgttcagttcgggatatgtgaagccgcggtcgccggcaaagccgcagcagcctacttcttcgggtatgatgactttggatgagcagagacgtgccaaggccgtaatcgtatcggcaagccccatcttgcgcatggaacaggtgatgtgaactgccacagggcggtcggtaggggtgaataccagtctgttacgcaggaatgtatatatgaactctgccggttcgtaaagcttcattttatggatggtctcgcgcatccggtgcaggcacgggctttggtcgcacagcacaggatacctgccctgttcgctggctttccacaaggctgcctccagttcggcagatttgcggtcggcaatgtcaagcattcccttgctttcccagattgtgccgcagcaaagcttttccatgttttcggggaagatgacttcgtaaccgcctttttgcaacaaggcaatcattttactcgccaatgcctgctccacaggcgatttctttggcagtcccattgtctggttgatgcaactggggaaataaaccactttcaattgaccattagccaaactgtctttgtctgcgttcttattccgcagggtatcgttgtcaattgtcaattgtgaacttttaattgaataggctttgggcattgccggcgtccaaagggggatgccgagaacgttgtgcatgcctttggtgatgcagctcatcgctttggttcccaatacggaatgaccgaggttggcaagtcccaatacagggcgcagtgcactttttatgccggcgaagtgattggcggcgaaattgccggccttatatcccatgctgccttgcggcaattctttctggcggatgatgtgtgtcaggtcacccgtattgattcccataggacaggacatggaacagagaccgtcgccggcacaggtctggttgccgggatagcggtattgtttttccaacagggcgagacgttcgggggcttcgccgctctgtcgaaggcgggctatctccctttgtagcacgatgcgctgtcttgaggagagggtgaagccgcaggacaggcagttcacttcgcagaagccgcattcgatgcagcggtttactttggctgccggattttgggcatccaaaggaatcagcggaagcggtttgaaatttttgatatggcatttcggatcgtcattgaaaataacgcccggattcaacagacctttcgggtcgaacaggtttttgacggctttcatcacctcataggctgcatctccccattcgtggcgtacaaaaggagccatgtttctgcccgtaccgtgttctgccttcagcgagccgtcgtatttgtccgcaaccagtgtcttgacatcattcatcaggttttcgtagcgtttcacttcggcttcgctgctaaaagactgattgaggatgaagtggtagttcccctccagcgcatgtccgtatatacaggcatcctcgtagccgtgacgggctatgagttgctgcaattcggcggttgcttcgggtaggtcctcgatgtggaaagccacatcttcgatgaggcatgttgttcccggtttccgcgtcccgcccacggaagggaagatgccggagcggatggcccagtacttcgaatactcttcgggcttgtcggtgaagcatacgggtgtgtaggtctggaaagcggaaaggcattgttctattgcacggatgttctgccgaagttcttccgtgctgcgggctttggtctcggtcagcacggcggtcagtccggtctcgtctcccggttctacgccgggcagggtggatgaacatatttcgcccttatacttcaggaatacggggtcgcttaccgatgccagagatttccagtccagcagctctgctccttttacagtccactcaccattggcgccggttagttttttcatggctaccacagcacggcaagcttcttttatggtcttgaagtagagcatggcacttgctttgcaagggtagtcatactctgttttcatagtcacttgcgagaggaatgcgagtgttccctccgaacccaccataagatgggcaatgatatcgaacggatcgtcgaagcggacaaaagggagcaggttcagaccggttacattctttatggaatatttgtagcggatgcgttccgccagtttcccgtcggcacgcacttcatcgcggagcgtgcagatgcgccggatgaaatcgcggtgtgtcacttcgaatgcggcgcggcttacactgtcgccggtgtcgagtaccgttccgtcagccagtacgatgcgggcggagagaagcaccttgtcgctgttggcatgcgtaccgcagttcatgcccgaagcgttgttcatgacgataccacccaccatggcgctttttacggaggcagggtcgggagcgaatttccgcccgaaaggggccagcaattcattgacccgttgcccgatgataccgggctgcagggtgatttcttcatggtcgggagatatgctgtagccttcccaatgtttgccggctacaataagtatggagtcgctgatggcttgtccggataagctggttcctgctgcccggaaagtgacgggcaggttgtggctgccggcaagtttcagcagccgggagatttcctcttctccttccgaacgaattacgatttgcgggatgaggcggtagaaaccggcatctgttccccaagccagccgacggagttcgtcggtgtaaatcctttcctgcggaatgaattgtctcgcttcctgcaggaaagccatgtagttactcttttccataatgtatagatctttttactcctgtgcttcttcccgcaatccttgtcgcaataacttgtgaaagaactttatagggaagcacattcaatatacaaccgaatgatattcagtatgcgacttaccgttttttatacttgtcaaattatttatataaataatactgcttcgacagtttacggaactcctcaacgtctttgtaccaatagtcgcggatgtcttcccaacggttgcgcttgctgaagcgttcgcgtatctgttttgagccgcttaccttgtcgaacatggcgaaacggcctttatccgcatggtcaaatacggcacggtcgggatagagcgcggctacttcctgcattacgaggaactgtatctcgcttagcggtgctttgccgaaatccatgatgtgcacttgcacgccctgcagcaactctcctttacctacggagtagaacggtttcaggtacatcggtcggaagacgatacccggtacgttcagcccgttcaggtttctggcaagtttctcggcttccacccacggggcagcgaacatctggaacggaatcgtgtaacctactccgatagacatatagcccaactctcccaaaatgccgctcacgggatagaaaaatgcggagtgcgggtgcggaatgtgcggagaagaaggaacccattgcaatccggtctgtgtatagtccatcttgcgcttccagcctttcatctttacaacctgcaatttgcattgcttgccgtctttcagcatcttttccccattcagcatgaaagccagctcaccgcaagtgagtccgtaaaggtacggaattttaaattggctgacaaaggaaatgcagtcatcttccgtcagattaccctctatcttcaatccgcctacgggattggggcgatccagtacgataaattccttgttgttctcggcagcggcttccatggcaagtcccatggtactgatgtaggtgaatgagcggcagccgatgtcctgaatgtcgtataccagtacgtcaatgtccttcagcatctccggagtcgctttgcgtgtcttgccgtagagggaatagacgggcagtccggttgaggcatccttgatgtccgttacgtgatcgccggcatgtacatcaccgcgtacgccatgttccggaccgtagagtgccacgagattcacgttcggtgcttcgtgcagaatatcgatggtggatttcatgtgattatctactcccgtaggattggtaatcagtcccacacgtttaccttccaggcatttgaagttttgttctttcagcacttcgatgccggtctttatttttattttctgtgcgtatgccacgcagcaaagggtgcagaggatacagagaacgagatgttttttcataatgggtatctttatggttcgtttatcaatcttttatttcttgccgtattcggggtctatccgcctgtcggcaaagacggtgactatcacggtggcaatgcagcatgcgattaccatccagaagaagttggtatagccgatagcttcctgaatgtaaccggcaaacatgcccggaatcatcatgctcagcgccatgaatgcggtgcagatggcatagtgtgatgtcttgaactcgccttcggagaaatacatcatatagagcatataggctgtgaaaccgaagccgtagccgaactgttcgatagcaatcgccgttgatatggcaaacaggttttcgggctggcaaatggccaggtagacaaaagtcaggcagggaagtgtcatacatgccgccatccaccagatggatttcttcaatccgatgcgcgatgcgaatatgccgccgagaataccgcccaatgtgaggaatatcacaccgatagtgccgtatacgatgcctacttccgccgtggaaagccctaagcctcccgcttctttaccggcaacgaggaaaggcatgcacatcttgatgaggaatgcctcgggcaggcggtagagcagcatgaatacaatggcaagcagtacacccggtttggtaaaataggtggcgaaagtgcgtccgaactccttgaaaatagccttggcaccggctgttcccggagccaagaccgatttgtcggaagacggtttgggtatcatgaaaaggtgataaaaacttactgcactgaacataacggccgtaaccagcatcgtgatagtccacgacagcggaatattgtcgtatttcagttcgatggcaccggcaatggctacgagcactccttgtccgaagatagacgcaaggcggtagaaagtgcttcggataccgacaaactcagcctgctcgcccgatttcaatgccagcatatagaacccgtctgcggcaatatcgtgtgtggcggaagcgaatgccgtgatgataaacagtatcaaggttacggtgaacatactgataggagtcgtgcctgctgccatggttgcttcgtccggatgcggaatggtcagggccagcaggatgaaagctatcgacataagaatctgcatggaaactacccaccatcttttggttctgataatgtctacaaacgggctccagaaaggtttgatagtccatggcagatacagcaggctggtaaatagcgccatgtctccattgggtacacccatcttggcaaacatcagtacggagatgttgttcacgataaagtaggggataccctgtgcgaaatataaggtagggacccatgcccagggggatattttcttgatattgttcattctgtcaattgtttttctgttataggattagtcatatagttggtcgatactggcgccgatgtagtaatgcagcaatatctcatcgtatttgtatccttgttctcccattacggcagcacctatctggcagagacctgcgccatgtccccatccggctccggtgaggatgaaacgcccggggatgccggcttccgacacttctgcacggtctacgacaaaggcggagctgtaaaggtgtgaaggagaaagcgtccggcggatttccagttctttcccgatagtcagcgtcttcttcgtacctacgattttcagtttccaaaggcgtccggaggtgccgcgggccacgggaacaaggtcgattatctgcccgtagtctatgccggagcgtttcagtatgaggacagagagttcgtcttgagtatattctactttccaacggtagaaatcggtggtttcctggtcgtaattgttgagaacctgtgacaggattttcttatccgtggtattgcagaatgcttcgggagaagtacgtatccagcggtcggcttcggactcctgagtcaggtcgggcagttcgggagcagtcttttcatttcctgtcagataatcgcgctgtttggcaagatagggatatttgatatcttcccagcaatactggaactcttcgaatgctccgccgcagcatttggagaagcgggcatcgcatattctgccttctgagataagtacctgtccgcgggtggcggctatcgcctggcggactatatcggtggaagcgcgcgttatcccctgatagcgctggcagtggtcatccgcacatacgtcgaaatgggtatgagagtcgcgctcataccatttcaattgacagtcggcagttgacagttggcaattggctgcgttgtcttggtttgcgtttttattccgtatggtatcattaccaacaggcagttgtaatttgtcagtttgcaaaccggaaaggtttgcaagcagccagctgcgcgagataactgcatgtgccttcagcagttccagagaagcggttgcactcatctcgctggagatgacgctggtcaggtaatcctccacgcggatgacattgataccagtcagcttgccgttttctacgataatctttaaagaaccctggaagcgttggtcttctttgcgttcccagtggaagtttatcccgatagtcacatccagcaactcgaatgccgcaacggattcttgcaggggttcaaacactaattcgtcatattgcctgccgttccaaaggatcttaccttcgtcgtaggtaacagtctgcttgccgttgacttccttgccggatacgtggtagggggcaagcaggataaattctatctgtggctcgaataggatgccgacttctactttgggctctttcatacttgtttatttaaagggatgacggatattacagttgttcctggatgcgtttccgcaccttttgaaaatctgcgggagaaaggcatacttcacccaatatctgtgcgatgtcttctgccgttattttgatgaaatctttctcgacgggggtgatgaatactccgcctaagtctacggaggcaggactgctcagcaggttggcgtcgccttcggccgtataacatgccggacgatgcttggcacgaggaaagacaaatacaatccatttgttgtcttcgtacattacaaggacattcatcattggttcgtcttcaccgggttgtatgtccaatgagtgataaacggtgtcgaacagcttaatagccgtcttgcggtcggcagattcgatgacgagcgtagtgcgcggggcatcgttcagccaccatagggtggcctgaccgtagtcggctactttgcctgctacctgtctacgccagtcttgttcaataggcatgaagcctttgttgccggcctggaagtgggcgtggtcgggagcggaagcgccgcacttgggaccattgtaaaaaatggtgtagtcggtcagttgccgtgccaggtccagcatatccccgaagcggggagctatgcgctgggcgacatgtgcggtttccggtaccgtcaggtgacgggggaatatgggaaacggattgaccaatatgttgtagtgtccttcgaacgggatgcctttttgcactgccggcaagttggcggggcagagaaagcatttacgttccttaatggactttgcatctactttggctccggaagatacgatacgtgccggattgaactgtactttataaagggtgccgtttacattcagttctttcacctgcactccggaaagggcggcgtagttattacgcgccgtttcccaggaagcaagctgctcggttagaagattgtgtatggtctgattcataggtcatttgccgcttttcttgttcatagcaatgcgtgcctgcaactcccacgtgcggatacggtctttgtaaaggttgtgcccgttcattttgacgatgtccaatgaggcatccgagttgtcgtcccagcggcggcagttgtaaacaacgtcatagacacggcctatctggtattggcgggagaaattcagtccaagggcatagtcttcgccatagctcgtattgggcacttttacttcgcgcagtaccggagtatagaatgcgcgcggtgcacccagaccgttaatgcggagggcattgttacgcccgttgtccggtgtccactccttgtgatcgatgatgcccggagcaatcatgttcatgttgaagtccgtcatcatgtaagtacctactaccatggcgcagttctgttcgtagaaagcacgtaccatagtggccaatgtattttcatcggcatatacgtcgtcgctgtccaattgtacggcaaacttgccgcatttggggtggtgtacgcccatgttccagcaaccgccgatgccgaggtcgttgcgttcggggatgatatggatgaggcgctcgtcattcttatactcgtcgatggcttctgtcgttccgtcggtggagtggttgtcgatgatgataagattgaacttgaagtctgtcttctggtccagtacggaacggatagcatcgcggatggtgcgtatacggttgcgtacggggatgataacggatgcctcgtattcgaaatttccggcagagaactcaatctgcttgaactccggtttcaggtagccaccgatttctttcagatgttccgtgcatgccgcttccatttcaatctgacggttacggttcttcgggtcgacgtaatcgaatatcttttcgccgctcttacgtgtatcgttttccacttcactgtacagatattcattgatatgtacgaggtctgccttttggctcagcttcagtcgtaagtcgtaaaggccggcaaagttataattgcacttcatgcggcaggctgcctcttttagctttgaagtattgaaaaggagtaccgagccgaaattgaaatcgtctctcagcgagccgaactgatagtcgatgacaggagcattcgtctgcttgccgtcggctatctggtaatggtcggcatagaccattcctgcatccgaatcttctgcaatgtgcatcatgcgttccaaggcgaacatacccagttcaagagtcgtttctttggtgtatagcaatgtatattcagcatcggttttttcggcaatggttttcatggcagtgctgctgtagggcatgtctacggataaaatctcacagccgggcaatggttcgagcgtagggtctgtcgttactaaacggatgttgccgataagacctgtagcctgtaatccttgtactgtcttttcagcctgtttttttcctgcaaaaggaataaagcaatcaatcttcttcatatctgtaaggtattattttaaaattctcatttttttattttaaacttcagcattccggtttctccactcgtggcggtaaacagcacccggttgttgtcgagcggtaccactgtgcttatgagcgaattgcctgttttgtgtttccacagcactttgccagtcgcggcttccagcgcgaagataagtccttctttggtacttccgaatacgactccgtttttttctacctgcatggaaggagcatgctcgtagccgaagcctacattggatgcccacagtttgtgcggttggttacctttggtggagtagcatacgatactgtcgttcatggtcttactgtaaatacgttctttatcttcggacagtcctattgtctcacgtaccatggattggaaggtacgccatacggtattgcccgtttctatgtcaatggcggtcatggcacgttgcgggtcggtaatgaataccttcccatcggctgccaccggccatacggcggcaggggaaaagtgcatgcgcgtcagtccgcctgtccatttccataattccttgccgtctgctttatttaaagcgtataaggtattgtcccatgcgccgaagataactttattgtccgttaccaaaggtttggtctcgatgtagcctcttacgcctgcaaaagcccatttcacctctccggtacagatgtttacagcacggaaagtgtggtcgctggcaccgatataggcaatgccgttctctattgtcactgctcccaatacaggttcggcagcttctactgtccataacagattaccgttttgggcatccagaccatatatcttacaatcggcggaaccgaatacgacaattccttcgcttacggcaggtgttccgacaatcctttttccggattggaaactccatagtttcttgccgtttttaagggcataggcagtgaggcgtcccaggtcgtcgccaacgaatactttgtctttttccactgccggtgaacagtagatgccggctccggtttgcactatccattgctcttgtacttgtgcatactctttgtttacggagaagtcgggatatttttcggctttctcattacggtcatagtatgaatccgtcagcgagaatgcggcccattgtcttttcggttctccgatgcgttgtgtataaacgaggatagaatcttctgtaatctcataaatgccgtagcccggcttttcatctttgtcgcgcaggttgctgcgcatcaggatacccggaatgccgtcatagcgcaagtcgcggtcgcggtggtagtgtccgcctataaacaggcgtatgttgtatggtcgcacggcatccgtcacttcataccagttgtccacatcgccttccgtcatcggatagtgggtaacaagtattacaggtttgtccggccgggaattgccggcattgtaccggtccatcgtttccgtcatccagcggatatcctgagggacaacatggccgtatgccatacgcatcagcgggcctgaattaaaaccgaggaacaaaaaacctttatgttcgaattcaaatcgttcgccaccgaatatctctccgaaggcagtacagccggaatcgctccatttggtttcatggttacccagcactacgtagtatttcactttcagcaggtcgagacatgattttactttttccatggtggtgcggtcgccctcttcggcaatgtcgcctgttaccaatacgaaatcgatgctgtcggttgcattaatttgtgcaatggaacgcaataaatcttccgtaggattggggttgttcggacttaagtggatgtccgtcagttgtgcgaagcggaacacggcctgttgtgcctgcaccataaacggtagcaggcaggcaaacaggacgctggtgaatagtcttcggttcataaatgatgattggttttataaattattctttatttcttggtactgctgttgaaaaatgtcagaatagcgtccatcagagatgctctttcttctgccgtacgaagcgattcgaaagggaatcctaagacgcatgtcttatattcgccctgataggcaattccggcactcaggttattctccgaatagcgcattatggtatatgcttctttcgtagcaggctcgatggcgtcaggggactccactgcgtaagaatccgaattaagctcattatggtaagtatagtttcccgaaagagaagggaaaggggaagctacgcacttcgctttacccattgtggcggcttgtcctgtacgccacttatatttcagaacctccgtagcaaatttcttgtcttcttcattggcgggaatcaggcggttatcccataagtcggttcctacataggcgcctgatataaagatattgccgccttggctacagtaagctgtaatacagtcttgcatcggtttgctgaatgtcttgaactccaaaggctttattccgcctctgcctatcttggtctggcactctttgccgagaataaggtcggtgtatgtgtagtcgttcaggacaacttgtccgctttcaacagcttcatcactgcatgaaacgaaggagtaaccggccttcagtatggcagctccgtgcactgccggatagtcgaatgtatttccggcgataacctgtgtttcgtagttgccgtagcagtcgccgaaaccggatgcgtcatcgtccatccaggggatggaacggcggaactctttcatctttccgatgtagctgatgtctttgatataaggcactccatggtccaaatcgtccagaaaacctgcaagtagcgtgtcggcaggtgcaggggcgacaaaatcggcgggagcactgatgcggtcgaatccgttgatgaccaatactgcacctttgctgttgaaagcctgtcctgccgaaagaatttcagaagggaagctctcaccacccttgttgagggcggttaccttatagctgcatacgataccggcgggaagaacggtgcggtaactgtttttatccactactgtgccgttgtcgaagtcaccgttgccgatacgcgtataaacgatgtacttctcgggggcggctgtcggttccagcgggtcgtttacagctttccagctcaactcgatttcattttcaccgatcatgcgcaatgccatgtggtctacaggcaagggctgtactatataatccatacggtattgcgaacagagaaactgcaacattcctttgtagatagcgcggcttaccgtaaatcggaagcgtgggtcgataccgtaacgcatatcggcaaagttctggtgagaaagcaactcaagtaacatggtcggtacgcgtggaacgcgggcttcatagtatgattggttccatttgccgcggcgggtccatcggggttcatacagtgtgcggatatcgcgtacgatattggattgaatcaggtctgtcaggtcgtgagacaagtagcgtgatgccccattggcaaatacgccgttgtaggcatcggtctgatagatgccgagtgttccgatgatagagtcgttaagggtagttcctgcatccgagtggaaggcaaacgccaggtctaccggaatattcaaccccttttccgtggggttggcggcagaaccgcccgccaggtagttcacccatattccacggcttttatagtcatccgtgtaatcattctttccgtggctttcggaatatacgctgtccggaatgccggcccattgcatccagtaacgggcagcctcgcaaaaacggggataaccgctcttttggtattcggtgatataggacggttgatatgctgccggtatattctttgctgcatttgatgcgttgacggttttgtcggagcttttcaaattatcggttgccccttcctcagagatacggcgggcaatgtttcccatgccgccgccaatctttacggcatcggctgtgactgtttgtccggctttggcagaacggttgctcagagtcaccttgcaggcattgctttttccggcatcaaaaccgaaagttcccagatagacccaagtgccgccccccattttctggttgactttgaattgggataccccgcctttatgataaacggtataaagggcgtcgtcactgctgtttggaacagtctgataggatacatagactgcatattgtccgttttgaggtatttcgggaatccattcggccgtgctttcttttccttttttgacggtttctgcgatacggaatgtaccttctttaaaaggattttcaaaatctatgtattgcgggcgaagatgtgcgaagccttttcctgtgccttgccgccataccttgtcagcggtatgctcggtataggtagagttggtgttaaggcaaccgtcattgtcgataatgatttcggcagtctggcagtcgcgttcacgcggaagcagcacattggctccggcgttttccagcatcggaacaaggtagggcaatacgaagctctgtgtatacaggtcttccacggtttgcagacagcgggcgcgctgccattcccagcggttgagtttcggttcgtagtaaaagccgtggctttgccataaggcaatatgacggttttgcagtccgttggttggggtataaggtctggaaactttggttaccagaggcttttctacatcctggctgaatgtaagagcctttttgtcttttttcgaacgcaacgcctggggaatcagttcttcgatactatgtctgttggtgcgtagctgtagcctgtactttgcaaattcggtgggcaacaaggcgttgatacctttataaatttcggctacattgtcctcacggaaaggaatgtaggaacagttcatgttggcaaagagttgcagggtgttgccgtttatggcaacagagtcaacggtgatgtgtcctacggatatttcttttcgtgcagtggcatccagaaacttgcctatttcccggcgggtttctgtcggaaactcttgcgcaccgcccgtttgggggataagggcggtggcaagcatgctgagcaaaaagtggagtcttacactcatgatgatgatgtattaagttaaatgttctttttgtctttctttatcagtatgcagagtccgatgaaggtgaacagtgcattgaatataagcagctcatagctgaactgataaccgttgaaccatgcttccgagttcttttgcaggatgaagcaaagaagcggagagacgatggccactaacggtatgtatttgtcccgcacctgctgtttcatgaagatgccgaaagcaaacagtcccaagataggaccataggtgtagcttgccagaatatatacggcatcgattacactggtattgttcagcaggttgaatacaaaaatcgtaatacccattattacggccattcctatgtgtacccgtttccggatttttacgatttcctcttccgtccttcctcttgtgccgagaatatctacggtgaaggatgtagtaagggctgtcagtgcggatcctgctgccgagtaagccgaagaaatcagtccgataataaacaggatgcctacaacggcggggaagtaatttcctgtagcaattaaggggaaaagttcatcacttttctccacttgtattccttggctgccggcaaatatgtagagcagtacacccagcatcagaaacaacagaatgacgaagaattgcgaaatgacgctggtaatcatgttcttttgtgagtccttgaaattcttgcagctgaggttgcgttgcatcatgtcctgatccaatccggtcatggctatcatggtaaatgctccggcaaagaactgcttgaagaagtattgcttgctgttgacatcatcaaagaaaaatatgcgggacatatcgctgtcggcaattgtaccgagcataccggtgaaagacaaattaaggtcggaagctatatagcagatgcacaatacaaccgataccacaaggcagaacgttttcaaggagtccgtccagatgagcgactttacgcctccacggaaagtgtacagccataccaaagctacggtgatggctacattcagaataaacggtaatccgaatggctcgaataccagcagttgtaatgtcaggcagacgaggaacagccgtactgccgctccaagcattttggagatgaagaaaaaccaggcccctgtacggtatgaggacatgccgaacctattctccagatattcgtaaatggaaaccagattcatccggtagaataagggggtcagaacaaaggcgatgattaattgtcccgcaataaatcccagtaccatttgcagatagccgaagttacttgcggcaaccatgccgggcacggatacatacgttactccggatatgctggagccaatcatagcaaatgccaccacataccaggacgatttgcggttgcccacgaagaaacctgcattgtctgcttttctgccggcaatgtaagaaactgtgaagagtattgcaaaataggctgcaatggtgatgataacggataacgggctcattgtattgattgggtattagtgtttactggttaataggttccggtttgtatgaataatcattcttgataaagcaaatagggcttacgctgttccttgaacttttccacatcgcctttccagcggtttttgatttcttcggcgctctttccttctattatcatcttgcggacatagtctgttcctaccagcaattcgaagaacggacggaagaagtggtcgcctatgttcaggttcttataagcgtcaattacgtagctcagatccacaccgcgcttccaaatttcttcatcgctcatattactgaggtttacgccgtggcatagcttgttcagttggggcggatttttggcgccgggaacacttttgggagtaaaactgtaatcatagcctgtcatattgggatgtccgtatacctgaaacgggagtgaagttcctctgcccagactgacgggagtggcctcaaaatagcaggtagccggatacagatagacggctttcatgttcggcaggttgggagaggggggaatgggtaatgtgtattttgtctggtgcgtataattcttgcagggtatgacggtaaggtcgcacacgcgtgaggccggtaaccagcgttctccgtttaccattaatgccaattcgcccagtgtcataccatgtacaatgggaataggcaaccaacccactccggatttgtatttcatgtccagtatcggtccgtctacataatgtccgttcggattggggcggtccagcaacaataccttgcggttgtactcggcgcaggcgtccatcagccggcacattgttatataataggtatagaaccgcaagcctacatcctggatgtcaataaccaatatatcaaattttctcatggatgcttcgctcggttttttgtctttcccgtcgtaaagagaaaggatggggacgcccgttttcttgtcgaccgaactggatacgtgctctcctgcatccgcatctccgcgaaaaccgtgttcaggtgaaaaaatagctactacattgaatttgttttccagcagtatgtccagtaaatgcttgtctcccaccattccggtgtgattggagaagattgcaatccgttttcctttcaggattggaaaatactctgaagtttgttcatcgcctaagacaatgcgctctttttgtgcctgacacagtaatgaactacatagcaggatggttaatagtagcagtttcttcataatagtattacttaaggagaatttgtatggaacaaagatactttttattttaatatcaaaaacacttatttgggaatatttagtattataattattaatttacaattacgacaaaacgctcttatctggtattcaggtatatataggaaagaggtgtatcgagaagaaaaactttcgttcttgatacacctcttgttgtgagttatgcttttttttctgttaccagagaacggtttgtgtcaatttatatcctttagcattgtactcgttgatttgagcttctcctaccggagccagatatgaacgatcgctgaaatcgtctcttgcttcggctgcttccggcacatagaaacctgtcatttcatcggcgttggttccgtcatagactatgtatttatatccgttaccatcgggaactgctacggtggtgatgcctatgttgtcttcttcaagataattgggcagttcttcctcaaggttcacccataagccgagcattgtgtccggatatgttttgttgttcatataatgcagtttcttccaacgtttcaaatcaagcaaacgggagtgctcgtatacaaactccatgcggcgttcgcggcggatttcccaaatcagcggatctacttcgtaatctcccgctaccaaattgcctttgtctctatctgggtcgaagtcggcagtgatgtcacttaacatcataggtgcggtttgttgcaggcctttttttattgccgtttcatcgagaggacgcttgcggatttggttgattgttttttcgatgtcatcttgaatgatagggtcaccgcccatcaaagccagttcggctttggcctccagccagtttaacatgacctctgccagtcgcattaccggataatcattggtattagttatacttttatattgaggaggataagtcttgccaaaataggtcgggcctacgcggtcaatgaatttccagctataaagcaaggtacctgcctggatacgaggttcatcccagaatgtagcttcaaaacgcgggtcacgggttttggccatgttcttgacatcaagttcgtctgctccggcaacagttgattttttgtacaccttaccgtcattgcagatgaatgatttggctaatgccaatgttgcgccaccttggctttccgtaccgttggagtaagaagccacacagtgagttacattgactccggcatcatagtgtctgtacatcagtacctctttattgctgcttaggtctgttgagccgaacagacttttgaaatcaccggaaatctgccattggctgtttcctaataccttgtctcctgcttccttggccatagtcagatacttctttgcaagttcagtatcgttcttatgatatttctgccaagttccttcgaataacatcagtctgctgacgaaaccggctgcaataaatctgttcagatattgggctccgtcattttcacggatattatttaatgcaaagtcaaagtcattgtacacatgttccatgacttcgttgcgtggcgtgcggtctttatacatttcatcggtatctgcatcgctaatggattttccataatagggtacatcaccaaaggtttctaccaggcggcagtattcaaatccacggaagaatcgggctactcccatccagtggttataagtttcttcttccagcgcacttttatatttctccagtttgtcaatcattatattccatttgcgtacccaggcaaagttccagttgccggctgcgtattgggaaatccaggagttggcgaggtcgctggtgttgtagcttccgcggctggtgggaacggtattctcaaaagaggtctgttttccggatgaagcattgtcatcagaaaaattgtatcctctcaaaggagcgtatgcgctgccccagctattgttgtaacccacaaaataaacggggtatgcttcgttgacatagagtcggtattcgttatctgtctttccatacgtttcgtccagtggctttgtcaattccggacgttccaggatagagtcgcacccgcttgtcataaaggttgcggcagaaagtaaagcaaatatatattttttcatataattcagtttattagaagttcaattgtacacctactgacacactcttgaaagtcggggttcctacaccggtacggccgctgttatagttctctgcattgaacatggagtaaccggagattgcttccggatcaataggaagtccgttcaggttgtcaaatgtaaagaagttttctagcgccagatagatgcgtgccttttgcatgcgtactttctttatgatattttccggaagagaataacctaatgtgatattcttgatgcggaaataagacatatccagcagatagcgtgactgtttgtaatagttgtaagcatcgttcgatccggattggttccatggacgtgcatagaaagctcctgtgttctcttcagtccagtagtcacttgcgatagcgtcaggaatagcaccgtcggcagtattataaccgggaatggcaaggaaaccgttaccccatatctgacgtttgcctacaccttgcataaagatagaaaagtcaaagcctttataatctgcgcccagacggataccgtattcaaatctcggtgtttcattaccaattatttccttatcgcccgggtcttctacagtgccggcgccattacccagttttccgtctccattcaagtcggcatattttacgtcgcccggaccaaatttgaagtcaccggattgcaggaagtcctgatatactccgttcgggtctttcagtttgttcatttctttagcacccggagtgcctgctgccacttcttttccgttcaaagcccatacagtaaccagttcgccgttattgtcatatacgaaatcatctttctgatacaaacgttctgttctatagccccatatttcgccatatttcttgcctacataataatcgctgattaaacgcgtatcactgtattctgtaatttcagtttgggcatcagacaacgtgaacatggcattaatgcctaatccgttgttgaaacggtggttgtaatccaatgaaacttcccaaccacgtgttcttaaagaaccgtagttgcctttgggagcggctgcaccgaatgtataggcaatgcccgaacccggtacaatcatattacgtgtatcgcgttgataccagtcgaatgttacaccgaaatcaccgtggaagaaacgcgcatcaaatcccaagtcgagtgtggctatgtcctgccatgtaatagaagaagcaacggcagaaggagtaccgcgatagaataatttctgaccatcagcacccagccagtttacttgtcctgtgccgagagaggatacatacaagccgttatctacggtttggtcgccaatgataccccatgaaccgcgaagcttcaatgagttcaatgcgggttttgcccattccataaaagcttcttcacttaagcgccaaccggctgagaatgaagggaaccaacgccatttcataccagaggggaacttggatgtaccgtcataacgtaaattggcttccaacaggtacttttctttgtaattatagttgatacggccgaagtaacccatttgaccttcccatttttggtttccgcttgcggtctgagtgccaactgcgaggtcgaactgcgggttggtgatatctgttaaatctgtaatttgtgaccagttgtcttcatagtcataagtcaccaggttcataccaagcagaaacttgaagttgttatcgtcgtttatttgccagttgtaatcggttgttgcattgaaggtatggcgacgtgctcctgaagattttctgtagatatggtcgggatttgaaccatggggagtatattcttcatacggaagtttgtatgcgggcattgcaccttcggctgctgcgtctacttgttgtcccaggttgtttacataaatctgattgccgttggcatcggttctcggtacaccggcactccatgcgtttgctgcgctatatcgtgttccgggtttcttgataactcctgtttcgttggcatatgtatagtcaaaatcaaatttccagtctttggtcacatttacggttgtacccaagcttatgttgaggtaattatctacttgtgaagctgtattggcttgttttgtttcagaccacggactgcgcaagtcgtttccgtcttcattgacacctaacggcatgttaggaccccagcgatacaagtacagccacgggtcggcagtagtggatgaggtagaataagggtatctcttgtcacgtgaggagaagatagaccccgcacgtatagtcaggtatttgttgatttcggtgcttaaacgtacggatgcgttgtagcgtgtaaaatcgtctttcttggcaggcttcatcataccgttctgatgcagatatcctaagccgatgttgtaagttgtcttgccacttttgccgttgattgaaacgttgtgtgagtgagtcggtgcccattcgcgtatcatataatcatacgggtcgaaagttctcagaccgatatttcgtccattggcatccacataccagtctcgcccatatacataagggtcgtcgggacctaacttgccgccatatttgttttgccattcgcgggcacgctccaatccggattctgtcataaagaatgaaataccgccggtggctgtttttccggagcgcttcattgcttctacgctatattccaaagcattgaactgtcccattttcatctcttttgccatgttttggaaagagagattgccctgataagaaacattgaccctatcactcttggcgccttttttcgttgtaatcaatactacgccgaatgctgctttcgcaccgtaaatagaagcagatgcagcatctttcagtacagaaatgctttctatatcatcggggttgaccatttggatagaaggtatttctacgttgtcgagcaaaatcaaaggtgtagcttctccttcgatggaaccgatttgtccgcgtatcttaataatcgggtcagaaccgacttcgccgcttggtacctggatggataagcccggggtggtaccttgcaaaccacgaccgatatcggcaataggacgtccttccaatgtctgattcacgttaacggaagcgactgctcctgtcaggttctcttttttctgtgagccgtaacctacgactactacttcatccaataattcagtgtcgtctttcaacactacccgtagattaggagtggcctttatttcttgagtggtataccccacaaaagaaatctgtaaaagtgctcctgctgtaacattcattctgatttttccattgatgtccgtaatgccgccattggtagtacctttttctacaacgttggcgccaatgataggctcgccttgggcatctactactaaaacatttacagcgacagactgcatctgctctgttacgccatggttttcatgggaagtagatcgggcagcaaaagtgttactgctgccaagaaacagtgcacagatagccactgtcatgaggattttatgatttttaattcctctttttttgcgatcttcattcataagtgattgatgattttgttgttaataaaaatagtttttcagttaggtaaaaaaaagggaggattaaggggtaaaatgaactgtatatcctctaagtctcttcattgcttcataggcatttcttcaatttaagggttcataaatgatatgttgtatctcttttttctctaaaaatccaagttcaccgggaacttgg

SEQ ID NO: 4079 - DNA, 19186 bp, Unknown
  gut microbiota DNA sequence
tatgaatccctcaggtttttacgttgacccgaagtttttaagattttccgcagatttacagcaagttgcgaaggtggaaaagaaaaagcgacaaccgattttgctcgtttgtcgccttctgtcggaatgaggcgactcgaacgcccgacccctacgtcccgaacgtagtgcgctaccaactgcgctacattccgatacctttttcgaaaagtggtgccaccaggaatcgaaccggggacacaaggattttcagtcctttgctctaccaactgagctatggcaccttttccgtttgcgggtgcaaagataaagatatttttttatactacaaggctttttgaggaaaaatattagaaaaatcccctttgtagcttttaaaacaagaacaaaggggatatttgtattagttatgagtatagatttctacgtaattgcttaatctatattcggattgatactgtgccagtctttaatgggcggcaatacgcccattcctataacttcgtcgcgtagtttacagagatgggcgtaactttctttcagtttagcctcttcttcgggagtacctttcagctctttgtagtgcacaccgtccttattgatttcggtttccatagccatcatgatatggtcgaaaccgtgactgtgtacatatgtgcctgctggccagcggaaaggctttccacccatggcggcagcaatcatttctatggaaatatacgcagggctttggaaagaagaacgaccgcgcaaagcgataatgttagcgccgcctttggtaactttggtctgtatttctgcccattcttcctttgtcagggcaggagtgccgatgatatccagcaacggtttcccatctactttggcggtagaagcatatacagccatttgttcgccatgtccgccatatgtacggcagttctctatcttatcgggagcaatgccgaaatgtttggaaagttcgctacgcaggcgggtactgtcaagggctgccagtgttgtaacctgagatggcttcaatcctgagtacaataatgtaatcaggccggtaatatcggccgggttaaagatgacaaccacgtgcttcacatccgggcagtaagctttcacgttcttaccgaattcttcggcaatggcggcattgccttttagcaaatcctcacgggtcatacctgctttacgggctgcaccaccggaagacactacatatttggcatcggtcagagcctctttaatgtcggatgtgaatgtcaggttcagaccttcgaagccgcagtggaacatttcttccgccacaccttccagaccgggagcataagggtcgtataaacagatgttcggggtgaggtgcatcatgattgcagtctgtgccatgttggagccgatcataccggctgcacctacaatggtcagcttttcgtttgtaataaattccataattatattatttaaaggtgaataataaacgcttttgtcgattgttacgttacaaagataaccgttttccagaagagttgtttatataaaaaagttatcttttagagcgaaaagttattccttatctttatctttgtataaggtaggacgcggctcggcagtacccgcgctcaaaagcgggcttttggcttggtattgcgctcacctttcgctatctttgcgcaggatgccggaataggctgtgttctattgcgtatcgttcttgttataaatattacgaaatataatttgtatgagtatagagttaggaaagttcaatactttgagggtggtgaaagaggttgatttcggcatgtatctggatggtggtgaagaaggagaaattctgcttccgtcgcgttatgtgcccgaaaactgcaagccgggagatgaactgactgtgtttatctacctggataacgaggaacggttggtagctactacactgacaccattagtacaggtcggtgagtttgcctgtttggaagtggcatggataaatcaatacggcgctttccttaactggggattgatgaaagatttgtttgttcctttccgtgaacagaaaatgaagatgcaggttgggaagcaatatgtaatccatgctcatctggatgatgagagttaccggattgtagcctctgccaaagtggaccgttatctttcgagagaaaaagcgccttatgaacctggtcaggaagtcagcatacttatctggcagaagactgatttaggttttaaggctattattgagaaccgatatagcggtttgctgtatgaaagcgagatatttcaacccctgcatacaggcatgacattgaaggcttatgtaaagcaggttcgcgaggatggaaagattgacctgatacttcagaaaccggggcagggcaaggtggaagactttgctgctaccttattggattatatccgtgagcagggcggacacatcactttgcatgacaagagccctgccgaagagatttacgatacattcggtgtcagcaagaaaacctttaaaaaagcagttggcgatttatacaaaaaacatctggtatcgctgcaggaaaatgggattgaactggcaaaaaaactctaatccctacctgtaatagggttttccctataacatattagagagaaacagaaggatgggggaaaatattcccctatttttgtttttactaaaatgatggaatataaacttgtaaagaacgctgccatgaaacgaatattatttatgttgtttgccgtgataatgagtactgctgtctgccatgcggccatgagcaacagtaaagtgcgtaaagaaacacgctttcttacggataagatggcttatgaactgaatctgaatacggctcagtataatgatgtatatgaaattaattatgactttatttcaggtgtacgttatctgatggatgatgtgctgaggggtgaagaatgggcgttgaatcggtattacgattatctggatatacgcaatgacgatttacgttgggtattgagccgcagacagtattcccgtttcatgcaggctgcctacttcttccgtccgatttatgtgagtggcgggcattggtctttccggatttatgttacttataccaatccgaatcatttctactatccgcgtccttatcattatcgtacttactgtggcggacataaccgtgttcattatcataatgtaagctattaccggggcagacataactatcctacctataacggctctttccgtatccgtgataataaatcgtaccatacaagccggcgttcggatttcggttcggttcatatccgtcccaattccggtacgcgccctaataacgtggaacagtccaatcgccgtcctgctaccaacgctccggtacgccgttccgatactaagaaggaagtaaatgctcctaaacgcgggcagagtattcagaaggaaaacgaaagcataagacgacgcagcaactcttcttcatcctctacgcgtacaacacgttcttcttcccgttcgtcagaaagaggtaaagaaacgtcaagacgaaattaaacgcttatccatgtgtatttataactgataaacgggggatacttcaatatacctgatgattttttcaggcacggaattcacggaaaaagaagtaaagaaaatctgtgttttccgtgtagtccgtgcctgaaaagaaaataaataaaaagtgttcatctccttacaaacacacaacaactaaaattatatttattcgataggctctcctttataaaagtccagtatcttggtacggaacaggtactcgtatttggcttgtagttcatcggattgtgctttcatcaggttctgcttggcctcattgtattctacggcgttcgctttcccgttttcgtatttctcgctcatcagcttaaacgatgcttcgcttgccgaggctgccgcgctgctgcttgtgtacttgctttcggatgctgccgcattgtaccatgcctgctgaatttctttgtagaggtccttcttggcattatccagttgcaaggagtagttttcacgttgcaggcgggctgtacgtacccggttgcgtgtagccagtctgttaaagatgggaacactcagattaaaaccgatgtatttgttgaaattatcactcatttgctggctgaaagtgcgattgattgtcgaataataattcgtaccgagactcccgctgagagtcagttgcggatagtaaccgctttgggcgattcggatactgtgtttacttccttccagacgatactgtgcagcttgtattgaggccttgcaacctaatgctaactgatatatttcgtccggagaagccaatgggataagttctattgttgcggcaggattttccaagaggaaaccttccggtgtttccagttcgataagctggctgaggtcgagcaatgccagttgatagttattgcccgtctgtaccgcattcatctcatcctgcgctacacgtgctttggcttcggcaacttctgccggagaggctttccctacttctgccagccgctctatgcggttgcattgttctttgctcagctctacttgtcctaaagaaacccggtgcagttcttcgttgaacagtacctgtaagtaggctgaggctatattgatggagatatcttctttggctttctccaagtcggcaagagcggcttttaggtttaatttggccaaagcatactggttgggtatctcgagtccggtaaacagtggaatactggtggaaacggacatatttgtaccgtgactgcctgtgttgacatatacggtggagtaatcaccggtactctcgtccttgatagcggtctgcgtgcgtccccagttccagttttgtccggcactggcattaaggttcggcagtcgtgcccatttggcggtattcacttcaacattgctttgttcggctgcattggctgtccggcgaatgtcgatattatgctcgatggcgtagtctatacattgccgtagcgaccagcggtcttgcgcctgaacttgtatgcaagccagaacggccatatatataagtatctttttcttcatggcgtttttgcttcttctaagtataacggttatttatcttttttctcagcgccacgcactttgtctttggcagtcaggccgcttttgacggcaattttgataccgtcgctcatgcctacttctatctgttggcgtttgaacttctgttgaggtacactgtcggtcagtacatatacaaaggtgctgtctctactgaactcaaccgtactttccggcagggcgagcgtcttgagggcacgttccagcacaatttccgcattggcggaatagccggaacggatttgtacgctgtccggcgcctggatggccgctttgatttcgaattggttggctccgttttcttctacgcctttcggagatatgtattccagtacggcattgaacgagaggttttgcaaagcaccgatagttagctttaccggcatgccttcgtgtacgcggcctacctcggtctcatccaggttgccccggaagatgaggtcattcatattggcaaccgtggcgattgttgttccatcgttgaacgtattgctcatgataacggagttgccgactttgataggtacatccaaaattagtccggtaatggtggaacgaatcaatgtgctgctgaatgaagcgctgttcttggtgataccttcctttacgatttccagattgtctttggctgtttgcaattcctcccgtgcctgttttacgttcacttcccccttttcgtattcttcgttgctgatgagtttgtcattaaacaacttctcgacacgggcaaagtccgtttcggcttgtttggcattgatttctgccagacggacgcggctttcggcagagttcagcgtgcccagttcggggataacctttactttggcaatcacttcgccttgcttgacgctttgtccggcttctttatatacttcggaaatgataccggatatttgcggcttgataagcacttcatctctgggctccacctttccggtggctacggttgtcttttccaaatcggctgtttccggaacgatggtctcatatacctttacagtgggctgggatttccggtacaaaaacacgaatgtccagataaatatggcagctactaccgccagtgatgcgattttcagatacttctttgttttcatctttattgtattattgttttatttttctatcgttttatcagtctgtcaccttgccgttttttactcatcccttatcgcttcgataggtttgatggccattgcgcggtaagcaggtgccagtcctgccagcatccctaatgcaatgagaagggcgcaagtgccgatagccagtccgaaggagacttgataatgggtcttgatgactccgggatcattcgctgcgctttccagtatttgcagtataagtacggcaaaagagatacctgccatgccggctacggtagtcagtaccatactttccgaaaggatttgttgcagaatatctttgggacgggcaccgatggcacgccgtatgcctatttccgtagtgcgttcctttaccgttaccatcatgatattggatacgccgatagctccggcaaacaaggttcccaagcccaccatccagataaggatgcgggtacctgtcatcagtgtgtccatcatggaaaacatggcttctgcattgaggaacatgattgcctgtttgtcgtccggcgagatgtaatgggcggctttgatgcgatgttctatttccggttctacgtccttaaccttcactcccggcttcatgataaaacagactacatctatcctttgtcccagattatatgtctgctgcatcgttgtgaagggtagggtaaccgcttccgaagcctgtccctgtatgttcacattaccctcggaagagcacatgccgataacacggtaataaatgccgtttaccctgatatattttccgcaagggtcctcacccggcttgaagaggctttcgtacacgcgtttgccaatgacgcataccttgcgcgcctcacgtatatccacgtcattgataaagcggccgtacgtcatttcctgatgttctatctgttcgtattcggggtatagacctttgacgctgcattcgtatttgttttctccgtaaacggctgtctgtccccataaggcaaatgaaggagtggccgtttttattccatcgatgctgcgtacccgttccacatcttccatttccaggtcccaccagcgtcctttacgaaatcctttgtaggcctcgcttgtcttttgcgctgcaataaatccggagtttgtagcgaacccttcaaattgcgctttcatttgttcctgcatgccttgtccgccgccaataagtgccacaagcatgaagatgccccagaatacaccgaacgccgtcagcagactgcgtgtcttgtttcttgttatcgtaacgaggatttcctcgcatgtatccatgtctattctcataatcgtttaatctgctctaagtgcttcgataggactgatgcttaccgcctttttagctgggaagaatccggcaagcgtacctgcgacaatcagggtcaatgtagcctgtatggcaatgccgatatccactgtggggtccgagaacatcctggcttgaaacatacccgcatccgctgtttgtgtgccgaaggcggaattcatccattccgttactccgatgcctgccaccatgccgatgtagccgaaaaaagtggtaatcgtaacgctttccacaataatcagccgaaggatggaaaaaggctttgcacccagcgctttgcgtatgccgaactcgcgtgtgcgttccttgacggtaatcagcatgatgttcgatacgcctacgatgccgctcagcagggtaaaaatacctatcacccaaatggcggtacgcaacaagccggctacgttctgtgtctgtatgtattgtgtaaagcggttccatatccatattgcgccttcatcttccgggttgaaacggtggttggcggcaatgactttacggtactctttctcaaaggtttcgttggccgcttcgctcgtcaggtttttggtggtgaagatgatgttgttgagtttatcgcctttgttatagatggtttgcatggtggagaaggggataaaggccaggctgctttggtctccctggtcttcgtacaatccgactacccggtaggctacaccgcctgcattgacaaaccggccgacaggttccgtacgtgactttccgaaaagaatttctgccgactttttatgaagaatgataactttccgccgttctttcacatcgttccggttgataaagcgtccgcttgcggtcttgatggcttcggactctacgtagttcgggtgtacgcccatcagcgagatattgatgtattcttgtccgaagctgatgtttacatctccctgccgcagggtggcgccggcagtgatgatattgtcgggaaagtatttttcggttgcggcgaggtctttgttttccagttggatacgccgtccttctttcaagccttcgtacgattgggtggtccagccaccgcccaggcggatggagttcaatgcgcgttcggatgcgttttgttcgaaagcatggatgatgccgttgcctgctcccagcagtacgataagcataaagatgccccacgccactgcaaaaccggtgaggaacgtgcgcaacttgttacgcttgattgtaccgtatatttcttgccaaaggtctatcatgattactgtaagtgatgttataaagcgataggagattaatgtaatgacgcggcagtgtccgttatttcatgaaaccgtccttgccgaatggcgatgcgtcgtgattcaggttctcttcaatgcttcctatcacaccgtctttaatgtggataatcttgtctgtctgattggcaacgccgctctcgtgggttacgaccacgatggtcatgcccgtttcatgcaagtctttcagaatttgcatgacctctacggaagtcttgctgtcgagagcaccggtcggttcgtcggcaaggataatctgggggcgggtaatcaatgcacgggcaatggctacacgctgcttctgtccgccggacatttcgttgggcatgtggtgagcccactctttcagccccaggcgttccagatattccaacgccatagcgttacgcttccggcggcttactccttgatagaagagaggaagagccacattctctaccgcatccttgaaggaaatcagattgaatgactggaagataaagccaatcatacggttgcggtattcggcggctttgttttcgctcaggttcttgataagcgtaccgttcaggtaatattctcctgtatcgtagttgtccagaatgcctaagatgttgaggagcgtggattttccggagcctgacgctcccataatagagacgaactctccttttcggatatcaaggtcgatgcctttgagtacgtgtagcggtgctccgttattataggtcttgttgatgtctttcagttgtatcacgtttttcctgtttatagctttgttcttattgattttaactattagacgcagcaatgtgacgaaaagttgcaattgacgtgaagttttttaaaaaaagattttgcagtgtcgtttttctttgtgtaatttgtaaccattaatgttataactaaccctttaaacaaaaaagtaaatatcatgaattcaaacatggaaaaaccctatgtagtggggattgacataggcggaacgaacaccgtctttggtatcgtagatgcacgtggcactattcttgcaagtggttccatcaagacgggagcttatgatgaggcagacaattacgtagacgaagtatgcaagaatcttcttccgctgattatcgcaaatggcggtgttgataaaataaaaggtatcggtatcggtgctcctaacggcaactattatagcggtacaatcgagtttgccccgaatcttccgtggaaaggagtaattcctttggcagccatgtttgaagaacgtttgggcatccctacggcactgaccaatgacgccaatgccgccgctatcggtgaaatgacctacggtgctgcacgcggtatgaaagatttcatcatgataacgctgggtacgggtgtaggcagcggtatcgttatcaacggacaaatggtatacggacacgacggttttgccggagagttgggacacactatcatacgtcgcgaaaacggtcgtctctgcggatgcggtcgccacggctgtctggaaacttactgttcggctaccggtgtggcgcgtactgcacgtgagttcctcactgcacgtaccgaaccgagtttgttgcgttccattccggccgaaaacatcacctctaaggatgtgtatgatgcagccgttcagggtgacaagctggcacaggatatttttgactttaccggtactattctgggagaggctattgcagacttcattgctttctccagtcccgaagcaattattctgttcggtgggttggctaagtccggagattacatcttcaagcctatccagaaagctatcgatgataatatcctgatgatttacaagggcaaggccaaattgatgatgtccgaactgaaagactctgatgctgctgtgctgggagccagtgcgttgggctgggagttgagagatattaaataagctcagtctttgattgaaaatatagccgccctgccggaatatgatttctcggctgggcggtatttttttgatatacgtcaaacaaagttttcaaccgtatcaaacgtttttttcactataatgaaaaatctttattaatcccacgaaaaaagaaaatgcttgtagaaaatacaagtttgtttgtactccttttacttttcgcattttttattcatatgggatagcgggcgaagggacatttgtccgttccgtaagacgaataattccattccgtgggatgaggtatttgagacattaaaaaagggaaaccaaatcaatcggcttcccttttttatttagaaataggagtttgggattaaccgttaactcttttttctttaattcttgctttcttaccggtaagagcacgcaggtagtacaatttagcgcgacgaactttacccactttgttcacttcgatgctgtcgatagccggtgattcaatcgggaaaatacgttctacacctacagtaccagacatcttacgtacagtaaaacgcttcttctctccatgtccggcaatcttgataacaacgccacggtacaactgtacacgttctttgttaccttcgacgatacgatatgctactgtaacagtgtcacctgccttgaagctagggtgttgtttgccggtagcaaatgcttcttctgcaattttaattaaatccattgttcttattattaaattgtttgatcgttacaacgcaacataccaggcttctcactcggtgtcctgacagcgattgcgcgaaagcggtgcaaaggtagagtttttcttttgattgacaaagagatgtactctttttcttttttgccggatggaaagaaatgccgttcctctttgggattacagcaaaagaaaagtatatttgtagcaatttaaaaatggatgaatatgaagaaatgttatttgaaaatcgtctcaggaacagcgttggcagtgatgtttttgtttgcatcttgccattcggcctacgaagtgacaaaagccgaagggcgcatgcagccgatagactctacctatgatgttgctcccgatgcggaagccatggcgttgcttgccccctacaaggcgaagatagacagtatgatgtaccgggtagtgggcactgccgagatgtctatggataaaggagctcccgaaagcctactttccaatctggtggccgatgtgctgcgcggagcggctgcgcaggtgcttggaaaacctgccgatatggggcttgtgaatatgggtggattgcggaacgtgctgacggaaggccccattacttgcggcaacatctacgaaatactgccgttcgagaactcactttgtgtcgtaactttgaaaggtgtttatctgaagcaactgtttgagagcattgcggcacgtggcggcgaaggagtcagcggtgtgaacttgcggattaccaaaagcggaaagttgctcggggctaccgtagccggcaagccggttgtcgacgacaaactgtacacggttgccactatcgattatctggccgacggcaatagcgatatgaccgccctgattcaggccgaaaagagagattgtccgccgggtgcgaccttgcgcggtctgtttatggactatgtagagcaacagacggcagcaggcaagaagattacttcgcgcatggaaggacgaatcaccgtggaagattaagaacagaaaactaaaaaagagaattcgatgaaacgtatatctatatattgcctgctaatgttctgtgcattgctgacagcatcggcacagcagaccaagcaattggtcattctgcacacaagtgacactcacagccgtatcgaaccgattgacctgcacgctgccgacccgtatgcaggggcgggcggtgtggtacgccgcgccacttttctgaaagatttccgtaccaagaatccggatgtcctgctctttgactgcggcgacatttcgcaaggtactccctattacaatcttttccggggcgaggtggaagtccagatgatgaaccttatgggctatgatgccatgactatcggtaatcatgagtttgacttcgggctggataatatggcgcgtttgttccgtatggcccactttccggtggtatgtgccaattacgatgtcaccggaacagttcttgagggactggtgaaaccttatgtagtcctggaacgcggaggtataaaaatcggagtgttcggggtgagccccaagatggaagggctggtacaggccgataagtgtgaaggcattgtatacaacgatcctattgttgcggcgcaagaagtaaccgaccttttgcggaccaaggaagggtgtgatgtcgttatctgtctttcccatctcggcttccgtcttaaaaatgaagtctgcgatgagaagctggcggcggcaaccaggggaattgatgtaatattgggcggccattcccatacttttatggagaaaccggctttctgcctgaatgcggaggagaagagtattccggtattgcacaccgggagaagcggcatttttgtaggagaattggatttgacactgacgaaggaatagcggatgaaaaggctgttactgtttatactggttataatgggatgttgcgggcgttttgcttcggatgcgaaacgttgtccggctacacctaccgttgtttcccccgtagagccgttgctggtgaggtcggtagtggatgatgtgcgatgcaggcagtgggtggattcggttttgggcacactcagcctgaaagagcggataggacagctttttatctatacaatcgccccctatcaggacaagggcaacaaggagttgctgcgcaaggttgtcgaggattataaagtcggcggtttgctgttttccggcggactgatgcaaaaccaggccatgctgacgaatgaagcgcaacgcatggcggatattcctctgttgattacgtttgacggtgagtgggggctttccatgcgtctgcggggtacacccgtctttccgaagaatatggtactgggatgtatacagaacgataccctgctctatgagtatggcagggaaatggcaaggcagtgccgggaacttggtgtacaggtgaattttgctccggtggcggatgtcaacatcaatccgaagaatccggttatcaacacccgctctttcggtgaaaatccggtgaacgttgccaataaggttatcgcctatgccagaggtctggaagacggcggagtactctcggtatccaaacattttccggggcatggggatacggacgtggattcgcataaatcgcttccggttttaccgttcacgcgcgagcgtttggacagtgtcgagttgtatccttttagaaaagctgttcaggcaggggtaggcggcattatggtggggcatttggaagtgcctgcttttgaggcgcagcgcggattgccttcttccctttcccgcaatgtggtttatgacttgctgacacgcgaattgcagttccggggacttgtcttcacagatgctttggctatgaagggagtttccaaacatgagtcgctctgcttgaaagcattgcaggcggggcatgacttactgctcgttccccggcgtataaaagaagaagtggatgccatactggctgccgtaaagcgcggtgagttgacggagcaggcggtggaggagaaatgcagaaaggtattgacttataaatatgcacttgggctgaataagaagcctcttattcgtctttccggattgggaacccgaattaatacgccctatacgcgggatttgattcgtcgtttgaatctggcggctgttaccgtgctgggcaatgcggcgaaagtgctgccactggatccggcgattaaagatgttgcggtgttgaatgtcggggaagcagcggagatgcggccttttatcaagcagctttccgaatatacgcatccggtagagttccaattgggaaaagatttaccggcggcaggacgtaaggctttgagagataaactgtccggatataaacgtattctggtatgtgttaccgagcatcgtctggcggcttatcagtctttctttgcggagtttgctccggacgttccggtggtgtatgtgtgctttattcccggcaagcaactgccacagatacgtcagggcatatcggcagccgaagcggtggtattggcgcattcttcgaatgatgacgtacagcggcaggtggccgggatactttatgcggatgccgtggctgacggccggctttcggcaagtatcggcagtttgtttgccgccggagaagggatgaccttaagtccgcagacaaagtctcatttcattcccgaagagcatggcctggattcccgctttttggcacggattgatacgattgcccgggaaggcatacgggaaggagcctatccgggatgtcaggtagtggttttgaaggacgggaaagagatgtataataaggctttcggtacttatacatatacaaccggaaataaggaagcagttccggtgacaccggcatctgtatatgacgttgcatctttgacgaagacgacagctaccttattggccgtaatgaagctttatgataaaggccgtttaagcctgacagaccgtgtgtctgattatcttccctacctgcaggatacggataaacgcaatataacggtcagggaactgctgttccaccagtcgggattgccttccaccttgctgttctatcaggatgccattgatgaggatagttacgagggtacattatttaaggcacgaccggataaactgcatcctgcccgtatcgggcggcagacgtgggctaacccgaattttcgtttccgtccggggctgacgtcgaaagtacgtacagctgaatgtactttacaggtctgtgacagtctttggttgaataagtctttcaaaaaggagtatctccaaaagatagcggatgcgcctttgagggataaacggtatcgttatagctgtgtgggcttcattctgctgcagcaggtggttgaggcacgtgcaggaatgcctatggatgagtttcttgctcaagagttttatactccgatggggctgaagcgtaccgggtatcttccgttacggttcttgtctaaagaggaaattgtgccttcgtccgttgaccctttcctgcggaaaacagttttgcaaggatttgcacacgatgaatcggccgcttttcaaggcggtgtttccggcaatgcgggattgttctccacggctgaggaagtggcgcagatttatcagatgctgctgaatggcggtgagttgaacggaaaacgttatttaagcaaggagacgtgcaggctctttaccactacggttgccaagggatgccgccgtggtttgggcttcgataagccggatgtgcagaatcctgcgaaaagtccctgcgccctttccgctccggcatcggtgtacggacatacgggctttaccggaacttgtgcatgggtagacccggataacggcttggtgtatgtattcctcagcaatcgtatttatccggaggtgtggaatgcgaaattgctgaaatcggatattcgggaaagaatacaggaagcgatgtatcgggctgtgttgaagtaaggcaatcgcatcagaataaaaaaaggagatgccggctaacttgaaatcgttaggcagcatctcttttttttgaaacaattaatttattctgttaagttttaggtgtgtatgtcagaatgcaataccgatacgcagacctaagttgttcataccgtccacactgtaagtgaagaggtcgcctttgttggtcccgtagctgtaataggctgcgaagtgcaggcccggaccgtaagcccacgggtaaacgttgaaaccgatttctggagatacgtagaatccccatgtatctttattggtttcaaatacattgaaagtggacttcaactgtgcatattgtgtaccgagttttacgcccacatacggttggaatgcaccgccacggttccacgcataacgtgtggcaagaccgaaaggcaactggaatacggtatgctgctggtcggtattcaaactgccgctcgtaccgaccggcaaggtctgacggctgaaatattcatggttgctatgataagccaggaagcctcccaaagcaaagttggacgtcaggaagtaaccgccttcaaagttcatcccccatccgctgcctttgtcggcaaagtggttgtttaaggggaaattgaactgccagtcgatgttggcataaccgttatcggtcatctgtgcctttgccggcatggcgaagacaagggcgagggcggcgattgcgaatgccctcaaggatatatatttcaatgttttcatacttgttcttgttttataaattcaacaatagctttctatcaggatagaagaagtcggtagtttatctcggctgggcactcattctgttaagataggcagattgtgtaaaagcctggttcacgccttccactgccattttggtgttgaaagatgtcgagccgctcaataacccgctcatgtagctggtccacagtacgggaagtttttccttttcgccttggggagcgtcgaggttcagcaattcggtgatgaaggaaccggtactataagcatagtttacggcatacggatagtaccatccgccccagttaccccagtaaggagcatcccaatagcccgggtagttccaccaccattcggggcgtccgtagtccgtaaagtagtaagtgctctttacgtaactcacttgcaaaccgaggtcggcgttttcgcgattgtctgtacggacataaccgcggttgttcatattggcaacgtatgcgctgagaatttcctgtgcactttcgtctttccaatattcggcgtctttactgttgccgataacaaggatgctatccggtaagtaataagtttcgaaagctttgaagtctgctttcgtgtcataattggtataaaccagatacttgctgtccagcttatccatgtcggggtctttttcgcaagatacgaatgctattgcgaagaccgctaataataagggaataaatttcttcatacttctataatgtttaggttaaatataaattcctgccctattggtaccttaggcttttggagaaagaacaagataaaaaataaaaggttcaaaaatagatgtgttaaatgtgcggtggactataaagaaactggtatgttttctttttattcagatgggtatgaatggcttttcagactatcattgccagttcgttggcataaccgtgccatataagtggcacagttgtgccaatgaataggcattattgtgccaataaagtggcacaataataattcaaggcggtggaattagctggttttaaatagttgttaccgttttgggactggttatatcaaaaagactatctcaattttcattttgagatagtctctttcatagcatacgagggtattggcgactattttacaatctgataaatgttttttaattcttctgcagagaaagcggtattatcaatcgctttcagattatctgccaattgtccaacagaactggctccgataataaccgaggtcaccaagtcgtctttcagtatccatgcaagcgccatttcggcaagtgtctgaccgcgacggatggcgagttcattcagtgcttttatctttttcaagacttcatctgtcagcgcttcttttttaaggaagccgcctttggcgatgcgtgaatcatcgggaataccgttcaggtagcggttggtaagcaatccttgtgccaaaggggagaaagcgatgaatcctgtaccgttttctttggcttgcctcaggataccttcttcttccggttcgcggttaaacagattgtatttaccttgatagagtaggcagtgcacatcccgctcttccaagtatttatatgctaattctgctttgtctttagggtatttggaaatgccgatgtatagcgctttaccttgtcgtacgatgtcaacgagtgtttgaagtgtctcttcaagaggggtgttggggtcgtaacggtgggtatagaagatgtctacatattcgaggttcatccgctttaaactttggttgaggttgctcatcagtgattttcgggaaccccaatcaccgtaaggacccggccacatttcatgtcccgctttggtagaaatgaataattcatcccggtagggcataaatgatttcttcataatcataccgaatgtttcttctgcagagccgcaggaagggccgtaattgttggcgaggtcaaaatgggtgatacccttgtcgaatgcgtaatgtgccattgatagcgagttggcgaaggtattgacatcgccgaagttgtgccatagtcctaaagatatttcaggtagaaggatgccgctctttccgcaacgacggtatttcataccgttttcgtatctgccgggggcgggagaatagatgggagttatcatatctgttggttttagttagactttatattatat

SEQ ID NO: 4080 - DNA, 109849 bp, Unknown
  gut microbiota DNA sequence
ataatgaaggtgtgcattttgacacaccttcgttttttgttgggtttgtttgcatatcaacagcggtaatgttacttttgcaagaaagaacccatttagtcaatgaagtatgaaacaaggtaagaaatacatttctccgggagcatggttctctatggtttatccggcagactggaacgaatttgaagacggggaaggctctttcctgttttataatcctaacgagtggaccggtaatttccgtatatcggcttataaaggagatactgcatacggcagggaatctgttaagcaggaactcaaagagaatacttcggccacacttgtgaaaataggtcgtctggattgtgcgtacagtaaggagatgtttgaggaagaaggaacatactacacttcccatctctggatagctgggatagacgatgttgcttttgaatgctcgtttacggtgcgtaagggagagccggtggcagaggccgaaagcatcatagcttcattggaagtccgtcgggccggtcaaaaatatccggcagagataattccggtgcgcctatcggaaatttaccggataaacgaagcatacgagtgggtatgtaccactgtaaaagagcagttgaagaaagacttccagggacaggaagaagatatagccaatatgcagcaggtcatagacagcggcagcataggcgccaagaaaaaagaggtatggttgtcgctgggtattacgctttgtgtgattttggctaatgaagtagacggtttggaatggcgtacgcttatcgacggcaatcgtgaagcccctgttctgacgagtgttgcgggcgataccgtgatagatccgatgaaattggtatggagcaaagtcaaagtcggagagccctgcaatcttgcagaggtttaccggaatttactttcatgacaagccatttcccgattcatattgccgtctgcatggcaatttctcaattttaattctcaactctcaatttaataagttttggcagcagtaaattcaatccttcaagtggaaaacctgactaagtcgtttggcgacctggtactattcgagaatatatcctttggtttgtccgaagggcaacgggtggggcttattgccaagaatggcagcggcaagtccacactgcttaatatcctttccggaaaagaaggctatgacggcggtacaatctctttcagacgtgatatacgtgtcggctatctggaacaagaccctcaatatccggaagagctgactgtgttggaagcatgttttcatcatggcaacagtaccgtagagctgataaaggagtatgaacgttgcatggagacggaagggcatcccggtttggatgaaattctggtgcgcatggaccatgagaaggcctgggagtatgagcagaaagccaaacaaattctttctcaactcaaaatccgcgatttcaatcagcaggtgaagtctctgtccggcggacaattgaaacgtgtggcgcttgccaatacgcttatcaccgaacccgatctccttatattggatgagcctaccaaccacctcgaccttgatatgaccgaatggctggaagattatctgcgccgtaccaacctcactctgctgatggtgacgcacgaccgctacttcctcgaccgcgtctgctcggagataatcgagatagacaatcgccgtatataccagtacaagggcaattacagctattatctggaaaaacgcgaagagcgcatcgaagccaagaccgtagagatagaacgcgccaataacctgtatcgtacggagcttgaatggatgcggcgtatgccgcaagccagagggcataaggcacgttaccgggaagatgctttttatgaattggagaaggtagccaagcaacgtttcaataacgataatgtaaagctggatgtaaaggcatcctatattggcagcaagatattcgaggcagaccacctctataagtcctttggcgacttgaagatactggatgatttctcctacatcttcgcccgctatgagaagatgggcatcgtggggaataacggtacgggaaagtccaccttcatcaagatactgatgggacaggagttggcggatagtggtacgctggacatcggcgaaaccgtccgtttcggctattattcgcaggagggtttgcagtttgacgagcagatgaaagtcatcgatgtggtgcaggacattgcggaagtgatagagctgggtaacggcaagcgtctgacggcatcgcagtttttgcaacatttcctctttacgcctgaaacgcagcacagctatgtctataagctgagcggtggcgagcgccgccgtctctatctgtgtacggtgctgatgcgcaatcctaatttcctggttctggacgagcctaccaacgacctggacatcgttacgctgaacgtattggaagagtacttgcagaacttcaagggatgtgtgattgtggtgagccacgatcgctacttcatggataaggtggtggaccacttgctggtgtttaacgggcagggagacatccgcgatttccccggcaactatacgcagtatcgcgattggaaagatgtgaaagccgcccaagagaaggaaaaggaaaaagaagcggctaaaactcaggaagaaaagactgcgaaagtgcgtctgaatgaaaagcgccgtatgtctttcaaggagaagcgcgaatttgaacaactcgaacaggagattgcggcattggaagccgaaaagcaatccattgaagaggcgttgtgcagcggtgcgctatccgtagaggaattgacggagaagtcaaaacgcttgccggaactgacggacttgattgatgaaaagaccatgcgctggctggaactgagcgagatagagtcgaactgagaactagctccggtttttatcggcagactgatgaggcgccggaattaagaatctaactaaaatatacgagaatgagcagaagcaagaatctgacgaactatcatagtcacagcctgtattgtgacggacgtgccagcatggaagatttcgtgcggtttgccttgagcgagggatttacttcgtatggcttttcatcccatgccccgttgcctttttctacggcatggactatggagtgggaccgtatgaacgactatcaggccgaatttcatcggataaaggaaaagtatgccggaaagatagaactttatctcggcttggaaatagattatttaaatgaagagagcaatccgtctgctgcccgttttcgtgaactgccgctggattatcgcatcggttccgtgcacatgctgtataatgaacggggcgaagtgatggatgtggatgttccggccgatgttttcaggcagatagtagataagcagtttggcggcgacttggagcaggtggtgcgcttgtactacggacggttgaggcgtatgctggagttgggcgggttcgatgtagtgggacatgcggacaagatgcactataatgctgcttgctatcgtcccggtctgctcgacgaggtttggtatgatacgctcgtgaaagagtattttgaagacattgccgcacgaggctatcaggtggaaatcaataccaagtcttaccatgatttgggcactttctatcccaacggacgttatttcccgttattgcgtggtttgggtatccgcgttcaggtcaatagcgactctcactatccggagcggattaacagcggtcgcccggaagcattgcgggcattaaagcaggcagggtatgaaactgtgatggagatgtacaacggggtatggcaggagatgccgatagtgttataagaatcctgtaaaacagaaacccggtagtttgttcctcaaaaattgtattaagacgtgcacctgatgctctttttaggcacagatttcacggatttcccgtgcctaaaaaaagcacacagtgagcattctctatttgggcatattctctttacttgtatatgctgttatttcttcaacaggaactcatcgatagcctttttgtaggttgccttatcggcagctccgcggaataactggggttcgccctgcatcggaataaagacaaacagaggaatactggtggcgttgaacaaggctgccagttctttctccttatccacattgactttgtatattacgattttcccggcatattctttcgccagttccttcataataggcgctgtcatccggcaaggtccgcaccagtcggcatataagtcgatgatggcgggtttgtcgcctttatatttccactctttggacttctcgtaatcgaatatatccttgatgaacatggctttgttcattacgattacgctaccctcctgggcagtcttttgcgtttcagcttgtttctgttcggctccaccggtgcaagcataagtcagcatgcttgagaagatgagaaccgccatggttatgattttcttcatgtttcttaattatgagttttgttcgataatggctttaagttccttaccgctgattacccccgaatgacgccacaaagcttcaccctttctgaacaggataaaggtaggaaccatctgtatacgatagcttgcagccaattcttcatgctggtctacatcgatttttgcaatacgcgctctgtcgccgatttcgcctttcaatgcttccagcacggggtgcatggctttacaaggtccgcaccaggtagcaaaaaagtctactaaaacaggtttttccgattgtattaattcttcaaatttctccataatctttgtcttatatatagtttatgaatatataacggataaacgaagaaattgttcgccgtcaattgtaaattagtaataactaattactttttgtcatgtccggttccgcttcgctaatcgtcagctccttgatgatgtgcgaagcaccggcatacttgtctatgataaacaacgtatagcggatatccacacaggcggcacgttgcgaagatggacggaaagcgatgtcacccgtcagaccctcgtagttgcggtcgaaagccgtacctatcagttcgcctttggcattgaacaccgggctgccggagtttccgcccgtattgtccgtgttcacgatgaagcatacgggcatctcgccgtcgggcatggcatatcgtccgaaatcttttgtctggtacaattgcttcagtttggcaggcaccacaaactcccaattgtcggggtcttccttttccattgccccctttagggtggtgtaatatccgtattccacaccgtcggcaggtttatacggcaatacgcgtccataggtcaggcgcagggtggagttggcatcgggatatataggtgtgccggcttcccgcttcatgtccatcatgccttttacccataccttgtgagcggcattatagttgcggttggcatccatcatggcaatggtagtttgcaacagaccgtcggtgatggagtatttgagcagtgtcatccagtcgttgccaatcttatacaagctgggtttgcggatgaacttggcgaaattctccttgctgccgaagatggaatattcgaagcaggcatcgataaaggcatcgctgtctcccttgaaacgcttgtcgataactttgaaaataccgatgcgctgttcggcaggaatgtatttcatgtaggtttgcagcatcttctttcctacaattcgctccacttcggggaaggggacggacgcaaaatacttgtcggcggcaacttgcagactgtcggcggcggtttttatccgggttttatccttgcttttcagggcagaaaccagggcggcggtactcggaatccgcatgaagtcgagtcccgtaaccaatgcttcctgaatggcctgctgatgatagagagcattgcggcgatgcttcacgatgccgcgtatttggtcgaaagccttttgataagaactgtcgttcagggcacggccgcgtgcaaggagctgttcctgctgtgcgcgtttcgtatctagtattttcaggcggacaagcccttcgttcatgccgatggcattcttccagtaattagcggatgaggcgtatttacttgcatagtggatgcgcacggcatcgtctttcagcatttgctccatgagggctttctggcggacgtcacgcacgtggtggcgcatgaagttggtggtttgcatacgttcttccacttcgtcggaaatcatgtagcgccagttgcgtccgggaaatcccatgacaaacgtgaagtcgccttcacgatagccggcgaggctgatggtgaggtgcttctttacctgcaagggcacattgtcggggttgtaagcggagggttggccgtccttgccggcgtagatgcggaataaggagaagtcgcccgtgtggcgcggccacatccagttgtccgtatcggctccgaacttgccgatggaagagggaggagcacctaccatgcggatatcgctgtaggttgtctttaggaacaagtaatatttgtttccgccgtagaatgctttcagttctgctttatggccggatgtcagcgtgatgccttgcgcggacaggaaacggtcggctatcatggcaaggtatttgggcgagaggtaatttgtgccgttcgggtcagagtctatctgtaactggtcgtttacgtagtccgtcacgtccattatctcgtcgatgtaggtcacagtaagtcccttgcagggcagctcctcgctgcgggacattgcccaaaaaccatcggtcaggtaatcgtgctccacgctgctgtgttgctggatggctccatagccgcagtgatgattggtcagtaccagcccttctgccgagataacctcacccgtgcaaccgccgccgaaatgcactaccgcatctttcagggctatgctgttggggttgtatatctgttcggcagggataagcaggccgagctctgtcatggcaacctcgttctgctgtttgaggtcggtaagcatccacattccttcgtcggcgtgtgccgaaaggatgccggatgtaaggaataatgataatatgattcgtctcatgtaactatgcgttagaaggtgttctgagagaggggaaattcaatatacgactaaataggattcagtatacgagtgaatggcattcagtatacgaccgaatgccattcactttcatacccttttggggatgggttcccattactcaatgatgttcatttcttttatcagatgtccgcagtctcctagtttttccagaatgaagagtacatagcggatgtccagtgcgatgcaacgttgcaggttgttgtcgaagttgatgtcaccactcaaggattcccagttgccgtcgaatgcacagccgataagctgtccttcaccgttgatgacgggactgccggagttaccgccggtgatgtcgttggtagtcaggaagcaaacgggcattgtgccgtcggccatggcatagcgtccgaagtctttattgaggataagctccttcagtttggcgggcactacgaattcgcggtcttcggggttttctttttcaagaatgccgtccgtggtggtgtagtaattgtagtgtatggcatcgcgcgggctgtatgctttcacattgccgtaggtcagacggagcgtgaagttggcgtccggataagagggtacgggcagtttcatctcgcccagtccgcggatgtatgctttatgcagcaactcaagaccgttgctcagtgccttttcttctatggaaacggctttcagcttttctatcttcgagcgggagtaagctgtggcagggtctttttcgatagcctttaccgtaggtttcttcatgaacttgtcgaagttggtgcggttggcaaggatggagttgtcgtacatatcatctacgaaagcattgtagtcgcctttgtacttgctttggatagtctggtagaaaacgggcaactgttcaggttgcagtttttgggcgagagcgggcaggatggctttggctacggcacggtctacttcgtggtcgtagtctttgttgtggatgtcgttgaacacctcttccaactgtgctttggaagcagcaagcaaagagtcgtttttctctttcagcgccgtctttatcttatgcataatcatgtacgggcttccgaattcgatagcgccgctcaaggcttcgtacaagtagttgaactgacgggtaaccggcattctcttggcaatgatttcgtcgattctctctactacaccctcgtattcggttttacctttggcaaattcggcaaagttcttttcctgtttcgcttttgtgcccagcacatcgttgtcgataattgccttgttcatgccgatggagtttttccagtagttgctgcttccggcaaatttgctggcatactggatgcgggttttgtcgctggcatccatgtacttgcgcagtacatcgaggcggacaccgcgcatgtcaatcatggcctggttgtctgcttccatgcgttctttcacttccgaccgggtgaggtaacggctggtgctgccggggaatcccataatcatggcatagtcgttttctttcagtcctttgatggaaatggacaggaatttcggagtcttcaaaggtacgttgcttgcattgtattcggccggttctccgttggcatcggcatagatgcggaacatggagaagtcgcccgtgtggcgcggccacatccagttgtcggtttcaccgccgaacttacctaccgaggaagggggagcggctaccatgcgtacgtcactgtacactttgtaatagaacaggtagaatttatttcccgcatagaaaggaagtgctcttacctcgatgcccggtttgcctttcaaatcactcttttccagttcttctttggcaagtttgccgaggaacggggcggtcaatgcatcgacttccgtcacttctccggctttgactttcgcgtttacgaggtcggtgatgtctacaatgcggtgtacgaaacggaatttcaatcccggagtaggcaactcttcattgcggctttttgcccagaaaccgtctgtcaggtaatcgtgttccactgagctgtgctgttggatagcaccgtagccgcagtggtgattggtgagaatcagtccttcgggtgagatgatttcgcccgtacaaccaccgccaaagatgccgacggcatccttcagcgatactccgttcgggttgtataaatcatcggctgcaagtttcagtccttgtttcttcatcatgtcgatagagttctgctgcttcatcagttgcagtaaccacattccttcgtctgcacgtgccgagcagactgtcagtacggcgaccgccgcaatcaaatacttcgttactttcatcttttttgttgttaatttactatatgatttttaattgaatcttccttcccggatagcatccatgatgttggcaggcggacgctggttcatcagctcttgcttcatgaaatccatgtaaggagccacatgcttgaagaatttccggtagccggcgcacaggtagttcagtccgggttcgccgtcggcagtatgtgcaaagcggtttttaggacattcaccgttgcaggcaaacagccattcgcactccctgcactgggtggggagagacttttgcttcatctgtccgaaggcttgctgacgttcgctgtacatcatttccactagtgttttctgatagatgtttcctagcttgtattccggaaatacaaagtggtcgcaggcatatacatcaccgttgaattccattacaccggcatgtccgcaggtctttgccatggaacatacgcccggctgttcgcccacccagttggcaagggtggagtcgaagagctggatatagtaagtacctacatcctgtttcacccattcatcgaacagggtacagaggaagtttccccattgttccgggctaacggagaagtccgccagttccgtagctttttccttatcggtcagtgaggccagatggcgtccgtcttggtgcggcatgatgcgttctacgataggagcgaactggatataatgagaaccgatttctttgaagaatttatagaattcaaggggatagtcggcattgaagtcatttactaccgccatcgcgttccattctactccgtgctttttcaacaggttgatgccttgcatcactttgacaaaggatggtcttccaagcctgtttttacggtattcgtcatgaaactcctgcggcccgtcgatagatacgcccaccagccaattgttctctttgaagaactcgcaccattcgtcggtgagcagtgtgccgttggtttgtatgcagttgtcaatcgtccgtccgttggcgtatttcttttgcagttccatcgcttttttgtagaaggccagcgggcgcatcagggtttctccgccgtgccaggtgaacaatacttgaggcattgtttgcgaattgatatattcttcaatgaacttctccagcagttcatcgctcatcacgtgttttggattgtttacatacagtttggacttctccagataataacaataatcgcatgccaggttgcatacagcccctacgggcttgagcattacataaagaggtttggcaaaaggagcataggttgacatgtatatttctccgttttttatatttatgattgtgcaaaaatacgtaaaccaaatgaaaattcctttctttctatcccgtttataaggaatattaatacctttgccacgtataattcataaatcgtttcctgcatgattagaatgagtgtaaatcgtattttgcctcttttgcttttactcgtgtttttcacttcttgtgcccgaaaatacaaggtggaaggcagttcttcagtgacaagccttgatggaaaaatgttgtttcttaaaactcttcagaacgggcagtgggtagctgtcgattctgcggaagttattcatgggcttttctcaatgaaaggtcctgtagattctgtgatgatggtaactctctatatggacgatgaagggattatgccgcttgtactggaagacggtaagatagaagtctctatttcaaatacgcaattggcagctaaagggacattgctcaatgatcggctgtatgagtttatagaaaaacggaatgcactggaactgcagatagaggagctcgaccgcaaagaggcgcgtatggtgctggacggagccaatttggaagatgtccataaggagctggcgaaagaaggggaaactcttgttgaagaaatgaataattatgtgaagcagttcatcattgacaacaatgaaaatgttttgggtccaagcgtgtttatgatgatgtgcagcacattaccgtatcctgtcatgactccgcagatagaggatattatgcgaaccgctccattggcattcaagcagaatcagttgataaaggaattcctttcaaaggcgaaggaaaacatgcagttgattgaggaacaccagcgcgtcaggcaaaatgcttcaactgatacttccgccaataaaccgtaggcagtgcggatgaaagacttcaacggtcttgatcttcgtttttaaccattcctttaaacttctccggaaggctgctttctactgctgtataggcttccgccatagttgccttgatgttctccactccttgtcccttaggggcaatcggttcatgaatcgtcagtatcatgcggtggcggtgtatccacttgcccgtgcggggaagtatctcaaacgaaccgtcgatggtaacgggcactaccgccagctgcagttcatctgccaattggaaggctcctctcttgaagtatcccatgtgaccggtgaatgtgcgtgctccttcggggaatactaccaatgatactccatcctttaaggaagcctctgcctggcgcatggtggccagtacttttttaggactggaacggtctacgaagatatgtcccgcgctttcgcatgctttgcctacgaacggaatctttcgcaggcttttcttcatcatccatttgaagtttctgcccaagaagccgtaaatcaggaaaatatcgaaagaaccctgatggtttgggacaaacacataggaagtacgtttgtgaagtttctcgcgtccgtttatctttaccggaatgagcagcaggtagcaaatcagttgtgaccatattttacccggataatatccccagaaatgagcgccccccagtaacgaaccgataattgtgaccaatgcggtaaggacagtcaggaccaataaaacaggcagtgcaaagcaaatctggtaaatattgtagagtatcttcatgggttgtggattttattgccacaaagataggtcttttttatattctgtcactctttctcgctaactaattttatgacggtgacttcgggccatgcaccgaagcggaaaggcagacctacgtatcctataccgacatttacatacagggcgcgtttgccttcgtagtacataccgctccattcagggtagatgagagaagataacgagtgtccgaatatttccatctgcatggcgtgcgtatgtccggaaagggttaactctatatccgaatcaggcaaaacttcgcgtcgccagtgcgtagggttatggctgagcagtatacggaacatgccttccgtgccttgcatggctttggataaatcggcgaattgtgagaaaggcggttcgccgtcgttctcaacacctatcagcgctatgctgtcgccctgatgatataggatgcaatgctcgttattcagcattttccaacccatatctttttgctgtcctattagatactccaagttggctgcttcctcttttctgttatgccagcggtaatatgtcccgtaatcgtgattgccgaggatagaatatactccatcgggagcatgaagcagggaaagtgtctctttgaaaccgtccagttcgtggctttgctgattgactaaatcaccggtaaagacaatgaggtccgcttgctgttcgttcaccagcgtaaccagacgccggatagcttccggatttcctaaccaactgcctatatgtatatccgatagctgaagaatgcggtaaccgtcaaaacctttgggaatgttgggcgagcgatattcgacattctttacctcaaagcgcgtgataccggcaatggctccgtaaaggatattggcaaaaccgattatccccaatatcaatccgagaagtgtgtaaggaagccggtgggcaacgaaaggaaaacggggattcctgaacggcgtatggaaaatgatgaatgacaaaaggcggctgattccccgcatcaatatgccaaacagcgaacaaagcatgaataccgtcttcgggacggcaaacagcattacggtcactgccagcctgccgatgccttgcggatggcgtgaaagcgcattgtcacctgtcatatagatgtaatacatatatatagctaccagtacaactgtaggaagccaatacacactgcgccaaagtatgttacgtgttctctttacgatgtacaccaagtagatgtacatgtccggtaaaagcaggcataagataagtatgagagttattcggtgcatatgtctttcaattcttctatgttctttttaatgctgtcgaggtgtttgtaaacgacttttttatatatgaaataaataagaagtgcatccaggatgatgtagcaaccgagcaagacggcttgtatcatgagaggcagtgtatagtaatccattatccagaagaacagtatggtgaagataacggtccaggtagctactgcccatatttcgtaacgggtccagttacggaatctggtcatgcgtcggctcacttcggctacggacatttcgtctatgtgggtgttcttgttccaaaggtaggttttccagtcccaccacataccgctgagaatagttacggtaatgaaaatcagaaacagaattatcttgttctgcaaatgctcgttgaaaccgaaggtaggcagtaagaaccacaccagcaggatgacagccaatcctaccgcacctgttccaagcgagaagcgttgcaggataacgagtcgtcccaaactgtgccgggtatttgttttataatttgcaatcagttcttttatctgtttctcatcggcaataggttccttttgcaactgtgcatccagggcattccatgattttttcagttcgtccagttccatatattaatcctccttattcatcttttttagtttgtctttaatacggttgagtttggtggccacgttggttacggtcagtccggtaatctcggaaatatcttcatagcttttttcttccagataaagcaggatgatagacttctccaactgtcccagccggtttatcatccggtagagttgctgtaacatggcttgcgtttcgtcgtcctcttcgctgcagtcggcttcctgggtgagggtgacaatctccggaatgttcttttctttccgtatgaagctgatacaggtattcaaggcgatacggtaaatccacgtcgagattttacattcccttctgaatttaggaaacgctttccatatattgagcactacttcctgatacaggtcattaagagtcgcgttcggagtggtgtacaggtaacacaccttatagatgacgcgctcatattcccgtatgacggacagaaactcttgttctacattttccattgtgtatgcttgctcgaatcgcttttattctgtttgtcgtaagagaaaccggaaaatcacacttgcaacatttaactctttaaatttgctgccaggaactttcgcatttcctcaatcggtttaccgcgccggcaggcataatcttccaactggtcttcaccaatcttgcctacggcgaaatagcgtgactggggatgtgaaaacataagaccacagacagaagcatgcggatacatggctccgttttcggtgagcgtaatgcctatctgtttcatatccagcaattcgtccaatataaagtttacggattggtcgggtagggaaggatagcctactgccggacggatgccctgatatttctcaaccagcaaatccggaatggaaagcgattcatcgggagcatatccccagactgtcttgcgcacatattcgtgcatcttttctgttgcggcttcggcaagccggtctgtcagggtctgtacgagaagatgcttataaggatcgtctttataatatccttcgctctccgcactgacggaagatgcaaaaagccctatcgtatccggcactccggatgaaagaggccgtatgaaatcgctcaggcagagaaacggacttccgtccggatgaggtgtctgctggcggagcagagggaacaccgtatcttcgatgatgagattgtctccctctgcattggcactgcatagcctgtaaatacattgcaccgaaattttctcatccaaccggttgagtactctgccggcttccttaaacaattgcatagcctcggcggctttggagcgttcttcttgcggaaaagccgcaagccacatggcgcggcaggaatcgcaaccgtgaatgttggcgattgctgcaaacttgggttgaaagccccaggcatggaaaaaataaatccaattgatataggggcttacttcatggattttataattgatagttggcaattgataatctctatataaggttatgctctgaatagataatactatattatgctcctgctgacggataatcaaaccgcagctcttcaccgcggtaagaatcgttcacagtattgccgttgtaaataagatgtccgttggcaaacgttttttctactttccagttgaacgtatgcccttccaaaggactccagccgcatttgctcagaatcttgtcggtagtgacttcccagggagagttagggcgtaccagcactaaatccgcctgatagccttcacggatatatccacgctggcaaataccgtatatccgggcaggtgcatgacacattttctgaacaaccgtttccagtgagaacactccttcgtctaccagttctaacatactgacaagggagaattgtatcataggcataccggacattgctttcaaagccccgccctctttctcgctcaacaagtgaggggcgtggtcggtggcgataacgtcaatcagtcctgagttgacagcggtccgcagtgcttcccggtctgtttttcgtttaacggcaggattacactttatgcgtgcgcccaaactgttgtagtgcgtcagcgtaaaaagtaaatgcgctacacatgcttcagcggtgatgttcttgtttgccaaaggttcgtcactgaacagttgcagttctttggctgtggaaacatgcaggatgtgcaggcgcgctccggcaatctttgccaaacggacagccagttcggaagaggcataacatgccggaacggaacggatactggggtgggcactgacgggaatgtcatccgctcctttatatttttgcttgtatttctcgatattgttttttattgtttcctgatcttcgcaatgggcggcaatcagcatatccgtaccgttgaatatattcagcaggctgttcattttatccaccagcatattaccggtactggagcccatgaacagcttgatgccgcaaacgcggtgtttgtccagcttgtcaaattccgtatagttgttgttggttgctccgaagtagcaggaatggttgacgatacacttctcattcaacaagtcgagtttggcattcaaggcatccaacgttacggtcagcggattggtattgggcatgtccataatggaagtcaccccgccggcagccgctgcacggctttccgtcagaatatctgccttatgggtaagacccggatcacgaaaatgcacatggtcgtcgataatgccgggcagcaggtagcagcctgttgcatcaattacttcttcacaaggggcggaaagaggcttccagttggtaagtacttcggcgatgcgcccgttttctatcactaccgagccttgtacgctttgtccttcgttgacaatcgtagcgttgtgtatcagtgttcttttcatatctttagttttttaagtctggatatttatggaacaggctgttccatttcagccggataactccgaacacggcttctccgaaaatactgctgttcatcttggatgttcccagttcgcggttgatgaagataaccggcacctcctttacattcgctccgcatttgtaagcggtgaatttcatttctatctggaaagcataccctttgaagcggatgccgtccagattgatggtttgcaataccttgcggcggtagcatacaaagccggcggtagtgtcatgtatgggcaatcccgtgataaaccgtacatatttggaagcgaaataagacatcagcacacgtcccataggccagtttaccacattcacgccgctgacgtagcgcgagccgatggccacatccgctccctcttcggtacaagcccggtagaggcggggtaggtctttggggttatggctgaaatcggcatccatttcgaatatatattggtagtcgcgttgcaaagcccatttgaatccggctatgtaggccgtacccagtcccagttttcccttacgctccaccataaacaggcggtggggaaattcgcgttgcaagtcttttacgatggcggctgtgccgtcgggagaaccgtcttcaatgacaagtatgtggaatccgtgttccagggcaaaaacggcacggatgatattctcgatgttttcccgttcattgtaggtggggatgatgacaatactgtctgatgtctgcatattcattgaaaatagatggagcttgttattgggaacaaaagtagtgcttttctattacttacagataaaactaaggattatttatgtatttttgcaacggaaattcgttatggaacatttatgagtttacacagattatcggtttctcttaatctgtgtgactttgtgtaatctacggtgaactaaaaaagacagcaatgattattaccgaactacaacaattatacgccacccaccccaatgtagaaggcatgtgcaagttgctaaaggacaattccgtccgtcatctctattgcagtggtttgtgcgcctctgccgcctcactgttttcatccgtgctggtgcagcgggcggaatgtccgtttgtctttatcctcggcgatttggaagaggcgggatatttctaccacgacctgacacagattttgggaaccggacaggtgttgttttttccttcttctttccgccgtgccataaagtacggccagaaagatgcggctaacgagattctccgtacggaagtgctgagccgtttgcaaaagggagaagaggggttttgtgtagttacctatccggatgcgttggcggaaaaagttgtatcccgtaaggaactgggagataaaaccttgaagcttcatgccggcgaaaaggtggatatggactttgttacggaagtgctgcgcagctatgggttcgagtatgtggattatgtgtacgagccggggcagtatgctgtgcgcggcagtattatcgacgtcttttccttttcgtccgagtttcctttccgtatcgacttttttggagatgaggtggagagtatccgtacttttgaagtggagagccagctttccaaagagaagaaagaggagattgtcattgtccccgatttaagccgtagcttggagcaaggggggaatggtggcatggtttctttcttggattttctgcggccggataccttgctggcgatgcgtgatttcctttggttgcgggagcgtattcaggtcgtccacgatgaatcgcttaccgcacaggctattgcagcctgcgaagccgaagaaaacggtgcaatctctctggaaggtaagttgattgatggaggagagtttactttgcgtgcccttgatttccgccgcatggaattcggtacgaagcccaccggaacgccggatgcgacagttgcattcagcaccgttgcacagcctatcttccataagaatttcgacttggtggcagaaagtttccgcgactatctttcccgcaactataccctctatatatgcagcgacagtctgaagcagaccgaccgtatccgcgctatctttgaagaccggggagataatatctccttcacacccgttgaacgtaccctgcatgagggttttgccgacgatacgttgcgtctctgcatctttaccgaccaccagcttttcgaccgtttccataaatacaacctgaaaagcgataaagcccgcagtggcaaggtggccctgagcctgaaggagctgaaccagtttacccctggagattacgtggtacataccgaccacggcgtggggcgttttacgggattggtacgtgttcccaacggagacactacgcaggaagtaatgcgcctggtctatcaaaatgacgatgtggtctttgtctccatccactctttgcacaaggtttccaagtacaaaggcaaagaaggtgaagctccccgtctcaacaaattgggaaccggtgcgtgggagaaactgaaggaccgtaccaagaccaagattaaggatatagcccgcgacctgataaaactctattcgcaacggcgcgaagagaaaggcttccaatacagtcccgacagtttcctgcaacgggagctggaagcgtcttttatttacgaggatacccccgaccagagcaaggcgactgccgacgtaaaggcggatatggaaagtgcccgtcccatggaccggctggtatgcggcgatgtaggattcggcaagaccgaggttgccatacgtgccgctttcaaggcggtggcggacaacaagcaggttgccgttctcgttcccaccactgtccttgcctaccagcatttccagactttcaaggagcgtctgaaaggtttgccttgccgtgtggaatatttgagtcgtgcccggacggcggcacagactaaatccgttgtcaaaggtcttgcggggggggaggtgaatatccttatcggtacgcaccgcatcttgggcaaggatgttaagtttaaagacctcggcctgctgattatcgatgaggaacagaagttcggcgtttccgtcaaggagaaactccgccagttgaaagtaaacgtggataccctgaccctgaccgccactcccattccccgcactttgcagttctccctgatgggtgcgcgcgatttaagcgttattcagacgccgcctcccaaccgttaccccattcagacggaggtgcatactttcggtgatgagattatcactgatgccattaacttcgaaatgagccgcaacggacaggtgttctttgtaaacaaccgtatctccaatctttcggaactgaaagcgatgatagagcgcaacattcccgattgccgtgtctgtatcggtcacggacagatggaacctgccgaactggagaagattattctcgattttgtcaactatgattatgacgttttgctcgccaccaccattatcgagagcggtatcgacataccgaacgccaataccatcatcatcaaccaggcacagaatttcggtttgagcgacctgcaccagatgcgcggccgtgtggggcgcagcaacaaaaaggctttctgctacttgcttgctccccccttgtcctcgcttactccagaagccaaacgccgcctgcaggccatcgagaacttctccgatttaggtagcggtatccacattgccatgcaggacctcgacatccgcggtgcgggtaatatgctcggcgcggagcaaagcggttttattgccgatctgggctacgaaacttatcagaagatattgtccgaagccgtacgtgagcttaagacagacgaatttgccgacctctatgctgatgaattgaaaggcgacggtactatcagcggcgagcagtttgttgacgaatgccaggtggaaagcgatctcgaactgttgctgcccgccgcttacgtcaccggtagcagtgaacgtatgctgctctatcgcgaattggacggattgacgctggacagagacgtagatgctttccgtgcccgtctcgaagaccgtttcggacctgttccgcccgaaacggaggaactgctccgcatcgttcccctacgccgtcttgcagcgcgtctgggaacggaaaaggtgttccttaaaggcggtcgcatgacgctgttctttgtttccaatccggacagcccttactatcagagcctggctttcggcaaagtcatcgcctacatgatgaaatatacccgccgttgcgacctgcgtgagcagaacggcaagcggagcatggtggtgaaggacgtcactaccgtggaagaggctgtgtcggtgttacaggagattgtggcgatgcaggtggaagaatgattctattggcttacgactttattctaaattccggaacatgagttgacatcggccatgcgggcaaaggagcaatatgctcgtggagaatatatctttgtttattattgatataatgagagaagtcttcaaaaacggattcgatatgctccgttcttgaggacttctctgtatataagcggtaaccggatatcctcaactatttgagtgcatccgtaaaatggtctccgtactgagcggtattgtaaatgattgcccacaatgaagcccatagtattccgcggccgtagtatttgttgtcggtggtacttgccagcgcactataagtcggtgtccaggtattggtatgctggctgtcgccgataactataattcgcctttgcaggtcgacagacaaggaacatccgtaaccgggcacttccagtacatgggttactccggtaggcgtgtcaaagcttccgcttatcccgtctctataaaacaaggcggtgaagtcaatggattgcgacggattgtaattgctgaacggtccgtttttgacaatataatcccatacaggatcgttggaatgagttccgacccaaattgcagatacgctactgttgctcttgtaggtatatcccaatgaggcgatcttggtgaacaaggcctgattatccgcgacactgttgtcaagagtgattacggcaattctgttcttgccgggactgctcttgagccaagtaagcaggttgtcataataatttgcaattctgcttgtgtatgttcccgagaagagaatgttcacattgtccggaatgtctgcgcctactcccgcattgttattgtcgctgttcggcaaagtcggtactgccggagtatagactattccttgaggaccgaagaatgtgccgtaattgccgtattcgcggaatgtgctgaaaatgccgttgccgagtgaaccgtagccaccggaaagattggcggtgttaattgctatgggctgaagcaccgttcttacgatagccagacggattgttactgccgttccggccaaagtgagttttacattataggtgatgttccggttggcgtccttgtacagtgttttgggaaaattgaccttgaatttggtactcatggtgtattcgcttccccaagacatctccgtaccgttttcgccggtcatttttatattgtacgcatgagccgttgccggttcgggttgttccagttcggcaatccatcgcatcccgctaccgccttgcagagttataagttgggtctcgtccgcattttcggatatgtaaagcgtgttgcccggaactcctgtaccgaatgacattggttgctggctgatgtcgattacatgagacttcactccgggagaggctttcaaagccagatagagccgggctttcaggatactgttgccttcattatgacttttggcctttacggtgatacggttgagcttgggatcggacgcatcgtgcgtgtcctttacttcaaaggctgccgcatcgttgccttcaagcacgtattcccattcgttgacggttgagccgtctgccgtcaatccggggttgacaaggaacgaattggtattgttgccggtgattgtcagttcaccgtcgtattcaaagtcgatggaagcaatatccggtgtcagcgtaaatccgggcacaccgtcctgaatcagtaacatggtgccttgtaccgaagggtcttctttcaagctgaccaccataaaaccataacgcggactgatacttgtgttgccggtatgggtatagatgggaataatgttgtttacagctttactactgtcgtaatcggttacggcggcggaacccgtttgggcaaaagagaagaatgcaccggctcccgggggatagatgcttgcgctccactctcccgaactctttactgcaatgggagatacagccacaccggcggtattgccaaaatgggaaatggttttcgggttcagttccagatagaggtctccgccttccaactgtaccacgtctatggtcgctttcagattgccgaaagagagttctacgattccgctgcaccggtcttttacattgtccagtgcagtggccgatacggtcagtgttttgccgttcagagtggcggacagaccgttgtccagcacctttttgctgatggataacgtcccttcgccaaaagtgaatatgcccaaatcataactgccgccattgggggtgaacagaacttttttggaaggtatggccagaatgttgtcaccatcgaattgcaccgtgccgtggctgtccatatcccagtagttgatggagtaacttaaagaagtcagtgcgcctttataggcttccagttcggtggcatatccttctttctttacggaattgacggtgagtttgtacacattattgcgtttgagcgactgtcccgattccagcgggtgtacattgacgcggtgatacgatgccgtaccgctctgcttgtttcttactttgatgatgaggcaggtagtcacctggtcgttctgtttgggggcgggtacatagttttcgtatgcgtatagttttcctacaatgtcggcaccggcttcgctctccactccgtagagtcttgcaattcgtttcgccgctttgtcgaaagcagtaggctctccgttccacacaaagagggaagggtatccgttccatacggaaacggattcaagcgtatatcctgccgccgagttatacacgtcgaaacgggcaacggaacgttgcaatactatgctgattttagtatcttccgattcttttctaagcgaagcgctcataagcaatgcttcgctcactatcggttttgtaatatattcggggatatctgcggatgtacctgccataaaagcctgtacttccgcccgggctgttttgaagttgctgttcttaatggcgtttttccagtcgtccatactttgcgaaccgtctgtgggcagatagttgcttcccatattggctacagctaaaatatcataagcatctgtcgtttttagtcctatatccgaaaagtcgaatacaatatcggtattcatctccaagggagagccggatgcagaggtcagttctttccagcctttgaatgtgccggtaccgttaccgtttgattcgaagaaaatcaaatcgagcgtttttatattctcttccccggcttccggtgcgatggccgcacgtgtagccaatccgctggcggggtcttgtacactgaagctgatagtcagttttctgttttcttgtggaatgagcccgctatcgtcttccaaattgcaagacgtgaaaacggccggtatcagaagaaaagcataccataatatttttctcattatgttgattgtttttattgtaatgatgttatataattattctcctaaatcggtgctgatgtcgccatccagttcccagtcgttctgcccttgattatacaggtgtatttgtatttccagtctgattcgtccggaaagcagtacgattgtatcggagttggtaccggcggagtttttatcgtagtctcccaaagccgttattttcagtccggcaggatagccgtcggcatcgttcacaaacagggcttcgaagcggttgttgcggatgccgtttgcgatgtttgtggcaggcccgtttaggtccgttttaaaagccatggtaatagcttctgacaggatgttgcttttcatgccgatagtaacagcagagtttgccttgcggtataataccgcttcacgcttttccgtccacaagtagtaattgccgcttgttcccatctgtccttccgtcatgtcccattctatgatgttgacattgatatggacggaaggctggctggcggctgtttccttatccgtatatcccggaccgtcggcagaattgatattgaatacatacttcttgttccgtatgattttgatgagcttgtctgcatcggtatcttcaaaatcaacggggtaatagcctttcgttcctttgtattcggctccgatgacgaggcgggtatgcttcttgtctgcagtttcgttctccgtatcgttgtcgtacagataaagcttgttggcaatggaacggttggtgctgttgtagctgtccgattccaaagtcaggccggtctgcatatctgcgggtgaagaggcttccagagcctgcccatctgtaacattagcagggacattgcctaagaagcccttgtcgggcacatgaaacagggtgatgtcttttaatataaaatagtcgatgccattggctacatacacatctactgatgcgaccgaacgggtcaggctcagtagcggccaataattgattacacggtcgtttacatcctgcttcttcagcattccccacatgggcaggctggtaaaagctgtattttcctggagcagcctttgagggtttgcatcaaccaaggtttttcgaaagacttcccaatccgcctgctgcctgtattgttcttccgtggctttatcgggaagcatttccccgatgaagctacggcaattggccaagaaataggcatcgtagtctttgcctacgggaagagtcgtccgcaactttccgtttatcttgaaagtcgcccgccaacatataaactttccgttggaatcgaaaagcaatatatccagattatcgatgatgttttcgtccggagtggctgacgggacattgcggggcgttctgtccgctgcaacagtaatttccacttcggattcgtccgaagcgtacgtaatgggagtttcgtcttcaatccttgactgacacgaccaaagtcctgccaatgcgcatattgttaatagtataaatgattttctcatatttttaccctttttttattaaagtacagtcaccgccttacgaatctgccatgagccgactgtaataattgcttccattttcgtcggtctgattacaacattgatttgtgcgcctcgttgcgcttgagtctccgtatctacgctcaggcaggctgctccgtcttcaagaatcgtgacaacaatgttgtctctctgcccggttgccgaatcgacggaagcaggcatgaccttgttctccgcaacgtattcattgctgctctctatataggcgaagctgtcttctatcacaatcctgctgccgttttgtttgtcttcagcaatattgtatgaatgggatgaaccgtaaatggctatgctgagtgttccggggtatcgggttgcgaagctgcttccttcttctatggtgacggaaatgctgcataactgtttttggacatcgacactgagaatacggttttcctgtcggttgtgggtaaacgccatacttctcaggaagagttcctgcatggaaccgttataggcagatgacagcctcgtggcatgttcgcccatactgaacctggcggtggaatagctttcatcgtcatgcaatgcgggggaagtctttttgatatcctcgttgcctgtcaatgtccatgccacaagataggcatttcccgaataggacaactcaagagggtaaggcttaccccctttgatgttttcataggggatatgcctttcatccatcttttttccctggccgtcatacagatataattctatgtcttcggctatggtttggtcaaagctggccgtgttgccgtcatacgtgaagagcagattcaatgagccctcgtcacaacctgtgtgaggaccttcatgggtacatccggtgagggataatgccattgatattattagaattactttcttcacgatatttgtacgtttataggtctacatcttgggttctgacatcccacttggctacttcaatgtctattgtaatgctgctttcggaagggtcgataacaggtccttcttcttcggcttctttcggagtaccccaccctacggtagtgatgtcctgcatcgtgatgcggtaaatgctgttacggaatattttccaagcgtcgtctttcagaagattgactctccagtagcggggcacatctgaaactcctgtgccagagaatgttcccttgatgatgaaagccacaacttcatctttgtcgaataccgttgccgcctgtccgttgctgccttgcagcatggtaggaatgttttcgtatacatagaccggtttgtcgtagccagccggcaggaagccgtttgatgtttcgctgttatcatcgctttttacggaatatacggtctctacagttgcaccgtcggggctgaatgtagttttgaagttggatgcagtggcaaaacgttcccagtttgtcaggttctcgtattcaaaagccagtgattggttgaagccgttgattaccatgtaacccttgaatgtccatttcaaatcgtttggaacgatttcggaagtgccgagtcccaatattttaagcaactcggcatcgggtatttttatttcgttggtaggggctaccttggggctttcaaccttactcagcaaacggcgtatggaaaggcttaatttgtttgtctcgccttccactacattggccgtcccttctgccgccatggcaaacccgagggaagtactgatgtccgaacgggagtttgtgccatccaaagaaagctctttgtatgagctgctctttttgaaatcggccaaagaggcaggggcgggtgagggttcacctaagttttggttggcggcagtaaggatggtcagactgccggcgttgacaaggaatgtgtattgattgtcggatgccacgcttgccggtttataatacttctggaaagaaccgtcgctgttgaaaacaaagaactccaatgagttgatgtcgttttcgttggttgcgcccgtttcttctcctgtcagtgcacgggtgtcggcatttccttttatattgacggtaatgggggttaactcacctttgctgggagtcggatgattgtctgaatcattgcatgacagcaatgtgaatgcagttgcggaaactgccaaaagatttcttaatttcataattaaagttttgttaagttattagaaaagtgaattgtatactccctgtcgggagtctttttattttatattcttatttttttcgtaaaataccttgatacaggtgcttgaacggagtgccggaaagaagttcttcagcatataacggtaagggactccggctttcaggtacataagttcgttctttctgccacgtttgcccgagcttccctcgacgggagtgacactgagaatattgagtaccgtttccttatccagcatatcggatttaccgaccatctgggacaaaccgtaccagtctatcttgccgttaattacttcgaatgtaccggagtcgagccgggtgtgccgcatcagatactttttcaatgcagcggcgcgaagcgttgcaaagtcggagtttatgcggatatcgccatcgggagacgcataacctgcaatcaggatatgactgatgcgactgtcgggagactggttaatcttcaggatgatatcgaccagtaaatccagattccgactgttgttccggtattcgggaagcagggttgccgaaccagttttaaataaaatggaaacagcattgctccggttttcttcatcaaattcgcttctcgtggactcgtcagccagaaaatcgtagtcttgagccagcttttcggcagtagtaagaacaggtatgacagtttcggcggtatcggtaaattgtacgatttccacatccgggtcctgaagtattctgttgttgacaacggctgttgtcagtatggcttgtttggcgcataatttaatgttgctttcaaaggcaagtatgcttcctcgcatccagtcttcgtatttcatggttgcattgtactgtaatgcaggggacatcctcttccttttgccgattattgcaaaagaggggaaccgtgcttgatgaacgccatcggaaattaccggagtaaccgtaatgcgttccggctttcgggtattgaaccaggcggaagcacaactgaagctgagctctatactgtcacctgtattccgcacttgaatttgagtgatggacaggtgtcttccctgagacccgctttctgttgatgcccgggcataggcaggtatcagtagtgaaatgaatgaaatgatgataataataggattcattaggtttatatttctccggattatttaatgttgtagattaatgaaatgcctatttgggtgggcccgaaataggtcttttcagcatgttcggacttgttacagcaccagtccctgttatctgtcttgtcgaatgtgaattgcacgattcctattccaaggtaagcctctatgccccatcttttggagaatgcccaactgtatccgtaattgattccgattcctgctccccaaccttcgtagcgatagttcttatcgagcatgctgaataggctatacccggcgatattgtattttgtggcaatgccatgaatgccgataaaatgtccgtttgatgcttcacaaagccaatacctcacttcgggttgcactaaccaatgtaccagcttgtcattatcgccttttttcccttcacggttccatggattatagctgccgactatgttgaggcttatctgcggggttattcctatttccaaacccagattgggagttaaggtagcagcgtacaggagatttgttttgagagccagatttgtcttttccttttttattttttcccatgaggcggttgtgtcgatgtcgatcatcacttcattggtcggcggactgttttgcgcttgtgtccaagagtgtgccgataatacccctatgagcataagcagaagtttatattttgagtatcggattctgtttttaattgtacgctgtatcattgctactgactttttgttaccaaccgattgcttttaagagagtgttggagtccggaaagccggatacgatgtccggttttcgtacttttattattactaagttcaagagaaatttaattggtcagatggtattattgcaaacggaacaattagcttctaatgatatgcctgtatactaatttttacaaatagctatcaggcaatgtcatctatcaacatcgataactattcatttgttttatgaaagtaagtttattttaatagaaaagaatgttttaacttattgaaagttgcctgtcacaggatatggatggtccggttgtcggtgctgttatttcccgtacagcttgtcaatcaaatcttttcgtcctatccgtcgcagttcattgataatatttctccgttcttcgggtttgtaccagaagaagaactgacgttgtgccaatttctcgcgctgggtcttggcactgaatacgggttccagtgtataggggtggaaaccagtgtaccatgcttcggtagcaacggtcatgggggtaggagtaaagtcctgtacctgttccagatgaaagtccagacgcttggtgatgacggcaagttccgccatgtcttcttccttgcagccggggtggctggagataaagtaggggatgagctgttgtcgcagaccttcttcgcggttgatacggtcgaatatctttttgaactctccgaactggctgaatggtggtttgcgcatgatgctgagcacccgttccgaggtatgctccggcgcaactttaaggcggccgctgacatggcggactatgagttcgcgggtgtattcctgcgtgcttttgttggttttggggtctttgctttggtgcagcagcaggtcatagcgtacaccgctgccgataaatgattttttgatgccgggcagactgtctaccgcatgataaatatcgagtagcggactatggtctgtatttagattaggacatactttggggtggatgcacgacgggcgtttgcacttcttacacatggcttcatcgcgtccccgcatcttgtacatattggcagaaggaccgcccaagtcgctaagataccctttgaaatccggcaattccattactgcctttacttctttcaatatgctttccttgctgcggctgacgataaacttgccctgatgtgccgaaatggtacagaaagcacaaccaccgaaacatccgcgatgaatgttgacggagaacttaatcatatcgtatgcgggtatgcgtttgcccttatatttgggatgcgggagacgcgtgtaaggcaggtcgaaagaacggtcgagttccgcttccgtcaagggcgcacaaggcgggttgacaacgacagtttgcctgcctacggcctgcaagatacgcgaagcagcatatttattactctcttcttcgatatggcggaagttggaagcctgtttcttcttgtctttcagacattcttcatgtgtgaatagggtgatatctccttcttgcggcagcacttctttcgtaagataagccaattgggggatgtcaagaatcggttgttgctgtttcagttttcgtacaagttccataatgggtttttcacccatgccgtatatcagtgcatcggcaccgctgtccacgaggatgcttgggcgcacacggtcttgccagtagtcgtaatgtgtcaaccggcgcatgcttgcttcgatgccgcccagtatgacaggtacatcgggatatagctttttcagtatttgggtatagacaatcgaaggatattcgggacgcatgtccggacgtgcgtcgggagtataggcatcatcgctgcgcagacgtttgttggcagtgtatttgttgaccatgctgtccatacagcctgcactgacaccgaagaagagacggggacgtcccagtttcttgaaatcccgtaagtcatctcgccagttgggttggggtataatcgccacacgcaaaccttccgcttcgaggatgcgcccgatgacggctgccccgaatgacggatgatccacatacgcatcaccgctgaacaaaataacgtccagctcatcccacccgcgaagttccacttctttcctggttgtaggcaaccaatcagtcagtctgtactctttcatgggtgcaaagatacggaaagttttaattacttacagaattgtaccagcatttcctctccgtcataaatctcccggaagccgattccctgttcggcaagatactctttgaggtcattaaaggcggttgcatcgtccataatgatttccagtttctcgccttttccggcttcgcacatggcctttatggccggaataagaggactgtacaggttctgtccgcgtgtgtcgatggttctcatttattttcttcctcttctatgattgtttgttgggaaagccattgcaggtagagcttgataagctgctgtaatccgaaggctttcatattgttgtggtagataacatcgatgcagaggtcgagcaggtctttgctgtcctcttcctgggcggcgatgagggaacggatattcagtttgagtttgtcgagtacggtttcgtccacgatgccgttactgtcgatgagatgacggaagagaccgtatttttcgatagtggcaaggttttcttccgatatttccaagttgcgggttccgctgggattggcttgtatagtgtacatggcgttaatgttttaatggttaatattcagtgattcatattttctgtaaaagcaaagataagtttttcaccacagattatacctatttcaccggattatttatcaagattgccattattctctgtgcacccctgcattaccggtggaaaagaaatgcagaatggatgccataaccgctgttctgccggcttcttcccggatactttcaaagggaaatgacatgatgaatgtgcggtagtcgttacctttataagctacggcagcaggaagatttctcccggtataggtcattacgggaaaggcggttgccatagggcggatacaatcgggggtcgtcacgggataagcccgttcattgggcaggcggggaatgctgaggatgcgccccaaaccttgtatgccgatatgttcgccggatacctgtaagctgctgtcgaaacggtatttcaggatgttttgggtgaattcccgattgccttgcgagtcgttcatgtcgctgcctatgtatgcaccgctgaccagtagattgccgcccgaccggcagtaagctgtcaaggcacgctgcatggacgaagagaaagttttgtaataggttgcccgtgacagattgccgtccgtcttttccagtcccagaatatagtctgctattggatattcttccaatgctacactaccgttttctacggcttcatcactgcatgaagtaaagctgtatccgccgacggtctgtatggctttaccgtgtataaagggatagtcgaatgtgtttccggctatttttatcctttcgtattcattgccgctttctcccaaacgttttccggcttctttgcggtcgaaattcagctggctgccgcagagtgatatatcatatagataaggtactccggggtctttcgtcaagtcaaagccggcttcgtcgggtgtgtttatcacagcagggctactgatacggtcgaaaccgttgatgatgagaacgcgtgctttttcgtgcttggacttgtatgcggcaaggatttcggatgggaagctttcaccaccccggttcacagccgttactttgaaggaatagacgatgcccggttctatcttcagagtgtggaaaggattgcttacgcgtacaccattgtcaaatccgcctcgcccgatgcgtgtatagacaatgtattcgcggggtgtggcagtcggttccaacgggtcatccactccttgccaggaaagttccagggtatttttcttcttaccgaagcggacggagaaattgtggacaggtaagggctgtacgacgtattctttattatgctgggtacagatatattgcaggatggatttgtatagggcacgacttgccgtgaacttgaatttggggtcgtgtcccaagcgcatgtcggcaaaattctggtgcgacagaagttctacaattctggaaggaacagcaggcaggcgggtctcgctgtagttacggttccacatgctgcggcgcgtccagtctgcattgaaagtggaacggatgtcctgttgcagacgggtgaggaacaggtcggcaaggtcgcgcgaagcgtagcggtttgttcctgccgctaacttgccatcgttgaaatgggtagtgtagatgccgagtgtacctacaatccggtcgtctgtcctgaaacccgcatcgctgtgcaatgccatactcatctcaagaggaactcccaatcccggttctttggggttgaatacggaaccgcccgacaggtagttgattgtacgcgaacgtacattgatatcatccgaaaggtcgttctgtcctttgtatccggcatatacggggtagggcataccggcccattgggcggaataacgcgcgccttccagataacggggcagaccgctgacttggccgccgcgcgcaatgttgcccataccaccgccgaagcgcacggcatcggcgcataccactcctttttcccggctttcattgctcaatactaccatgccgtagtcgttgcttcctttgtcgaaagtaaaagtgccgagatatacccatgtgccgccgcctatacgttggtttactttaaactcagcgacaccgccgttatggaatacaaggtatttggcatcgctcacgctgttgggcaggctttgataggaaacgtatacagcatattctccggtttccgggatgtcgggaacccactcggcaaaggctttgtttttcttcttttcagtttgtgcaaagcgggctgtaccgtcatgaaaaggattttctccttccgtgtagatacgcttctgttgtgcaaatccaggcagagcggttttttcccactgtgcttttctgctctttacttcaagatagagggagtttgtggtgtttcggttgtcgtcgttgtctacaatgatttcctgtttttgcgtgtcccgttcgcgaggggtgaatacgttggctcccgcattttccagcatcgggatgaggtaaggcaggatgaacgattgtgtgaattggtcttcggaggtacagaacaggcgcggacgctgccaaccccatttgtctttgttattgatgtagtattttccgtgactttgccacagagcgatatggcgtccctccagtccgcgggttatttcaaaaggacgggatgtacgggtcacccagggagcgtctttatagtgtatatcggtaaacaggcggctcttgtctttttttccgtttctgtatgtgttgggaataagttcgttgatggaatgtccgtctgtaaagacagtaatgtcgaagtaagttacgggacccggaagaatttctttgatgtcccggtaaattctgttcaccgtttccggccggaagggctggtaggagaatgtattatcggcatagatgcggattgtttttcggtggaaatcgataagtacactgtcgagccggcatgtaccgatattgacattgacagggatatacgtttggaaaaaggcctgcagccgttcccgaacggcctgttctacgtcttgtgaaaagacggaaccaactcctgcgagcaggaacaatatggataaatatagttttttcatgtccgatggttaagtaccgtacaaaaatacataaaaaaagagtgagaagttcatcacttcccactctcttgtttctatttagcaaacatttacagcggaatgtattctacgaatgcttccatagcttcgtaggatgccagacccaggctgtcgtacaatgcagctgtaccgcggttgcggtcttcgcttcgttgccagaacagacgttcgtcgttgcccaggaatggtgcgctctccatctggctttggtgcttcaggatagagttacgtttcgcacgtaattcttcgggactgatgggcactgccatttcaatgttctcgatttcccattcagcccatgcaccgcgatacatccagatgcggcaatctttcagccatttggctccttcttccttttcaaggtcgatagctgcgaatacggcatccgtacaaacacggtgtgtgccgtgtgggtcggcaaggtcgccggcaacgaagatttggtggggtttcacttcacgcaacaggttgcgtacgatttccacatcggcttcgctgatggggttcttctgaatcttaccagtttcatagaacggcaggtcgaggaaatggcagtgatccaacgggatattattataggtacatgccgtacgcgcttcaccgcggcgaatcagtcctttgatagtcaggatgtcgcgggtgtccatatcaccgtctttcttatctttcagatagttgcggatttcggtgtacttttcgttgataacttggtcctcactgttgttaaagagttggttgaaaccgttgatgaagtgcaggaaacggattacctcttcatcgcctacggcaatgttgccggaagtctcataggccacatgtacgtcatgtttctgttctactagtcggcggatagtacctcccatggatatgacatcatcatccggatgcggagagaatacaatgacacgttttggatacggtttcgcacgttcggggcgataagtgtcgtctgcattcggcttgccgcccggccaaccggtgatggtgtgttgcagatcgttgaaaatcttgatgtttacattataggcagaaccgtagagggcaagcaactcactcagaccgttttcgttataatctttgttagtcagtttcagaatcggctttccggtcagttggcacagccagacgatggcgctgcgaatcagtttgtcgttccattcgcaggaagtcaccagccagggacgttggatacgtgtcaggttggcggctgccgaaaggtcgatggcgatatgggcattgttatgggtttgaagataagaggcaggaattgtatccgttacgttaccttccacacattcttttaccattttggctttttcctcaccccatgccagcagatatactttcttggcggagagaatagtggctacacccattgttatggaacttaccggtgtgctttcaatgcttccgaacattttggatgcttcgttgcgtgagtcactgtccagcaaaatcaatcgggtggtggagttcaggcgtgaacccggttcgttgaaaccgatattaccgacacgtccgatacctaatacagctatatcaatgccgccgaaactttcgatacgttgctcgtacaaacggcaatattcgaaaatagtatctttggcgatagtaccgctggggctgaatacgttctgcatgtcaatgtctacgtggtcgagcagcatttcctttaaagaattgaggttgctgttcacagcgtctgaagccaacggataatattcgtaaaggttgaataccactacattgcggaaactcagtccttcttctttatgcatgcgcacaagggccgaatagacattgcgcggtgagttgccgccagccagtgccaatacacagaagcgtccggccttttgcttgtcacgaatcatctgtgcgatgtccaatgcaatttggttggctccttcttcgggagactcgtaaatgtctgtcggaattttctcgagacgtgtcagtaccgatcgctcgaaagcgttctccggtctgtagtacctgggggatactctattcagagtaatttgagaactaagattggttttcatacaatatttggttattaataaatgattaaagctgttcgcttgttcaaaacttaacaaaaatacgaaaaacaaagttcatccgcatgatgttgggataaattttatgataaagtatcggtttcaggcactaatttacccattgcccatactgctctaatcttcaaatcttcgtccattacgataatatcggcatctttccctttttggagcgagcctttacggtcgtatacacccatgatgcgtgccggtgtttcggataccattcgtgcggcgtctgccagaggtatatcggctttctgcaccattgtacgtatcagccggtccatagtagccacactgccggcaagggcggagtggtccgcaagcttacagactccgtcttcaatgatgacacgcgggtcgaaagcttctttgctgtcgctggccgcacatgccagggcatcggtgatggcgcacatccgttccacaccttttatcttgtagaccaggcgcaggattgtgggcggtacatggataccgtcggctacaacttccacagtcatgtcgtccatgaggtaaatgctctccacagtgccttcgtatttgtattcacggcgtttgtggaatccgggcattgcattatagaaatgtgtagcatgtgtgtatccggcttcataggctgtacgtatgtcctcaaattcggcttgtgtatgggctaccgaagccaaaatgccttttccggtgatatattttccgaactgcatggctccgggtaattcgggagcagcatcccaacgcttgatgcagtgccagttttccacgataggaatgtattcgttagggtcgggattcttgatattctcgggcatctgtccgcctgccatcgccatgttcagataatggccttcgaggtgcagacccagtataggactgtctttttccgccatcatcttcgtacaagtctctgccgcctgttcaatcatcggtacggtagaagaggacagagtagggaatatgctggtagttccgtatttcatgtgggtttggaccgcaccgcggaaagcgtcttcggtacattccataaaatcgcgtccgccaccgccatgtgcatggatctctacaccgccgggcagtacatacattccttttacatcaatcagttgtgcaccgataacggcgaggtcgcaattggttacttctaaaatttttccgtctctgatgagtacggaaccgtccttgagccaaccttgaggggtcagaatacgtgcgttgataagttgagtcaacataggatttaggggttagtgttaataaattaattgtttcagtcgtcagacattatttcaaaggacaaaaataactactttttaggtaagatgcactccatacatttaggtatttctattaaatactctaaaatttaatacgtaatgtttaaagaaatacctgtttaatatcttttaatcaggatgatggtaagcgggaactttattttcgttattttgttttacttatgataaacttaataaaacgatggattatgaaaacatggaaagtagaagcggctattattgccgttggtatggtactgctgggagtgataattaaatggggtataaatgattttatagataaagaacgtattgtcagtgtaaaagggttggctgagatggaagttcctgctgataaggtgatatggcccttgatgtataaagatatagggaatgatccgtcgctgctttatgccaatatggaacagaaaaacaaggcaattgtgaaatttttggaaagcaacggcattgctaaggaagaaatcagtattgcccctccggaagtgatagatatgcaggccgaacgctatggaaatcgtgatattgcttatcggtataatgctacatcagtcattacggttacttcaaaaaatgtagataaggtacggaaactgatgtcggaacaggctgaactgttgaaacagggtattgccatcagtggaggtgattatcgctataatgtggtgtatgaatttacaggcttgaatgatgtgaaaccgcaaatgatagaagaagctacgaaaaatgcccgtgccgctgccgaaaagtttgcaaaagactcagacagtagcctggggaagatacggaatgcttcgcagggacaattctccatatcggacagagatgccaatacgccttatattaaaagtatacgggtagtgactaccgtgaattactatctgagacgatagtgaatgaatccgcatctttccatgccggaaatttgtttctgaattcttgtagtgcggaaagttcaagagtagccgtagctgttccttcttcatggtcgggcacttgaatctgcatttcacctttgtatgagtagattgcgctgccgccgttataggagaagctattaccgtctttaccgatacggtttacaccgcaaacgtaactgatattttccaatgcccgtgcctgtaaaagtatgtcccagactttacgtcggggtacaggccagttggcaacgtaaatcaggaggtcgtattcattgcctgtattccggctccataccggaaaacgcaggtcgtagcagacgagtagcagtatattccaacctcgatacggaattatgatacgacggctgcctgccgtgaaattatctgtctcgttgcccatgcggaacagatgtcgtttatcgtaaaaataagcttccccttcgggagtgaggaaaaaggcgcggttgtaataggtagagtttttgtaggataatggattgctttcagatgaaacaaaattctcttcacaagctatgtagcttccggcaatagctatctgatattctgaagcccattggcgtagtgttgtaattgtattacctgttaccggctctgccaatgtgtcggtgttcatgctgaaaccggtagaaaaggtttccggtaaaacaataatctccgtcgctccgcgaagagcttccagcttttcgcgaagacggcgaagattgtcttgtttattctcccaagcaatatccatttgtaggatactgacacgcagtcggttcattttagtaaacagttgctatcggttgtcttttaatttattccaacggagaaattctcaggaatctttccgcgaaaatctttaaaatagagctttatttcatgcatgtccttctcaaagtctcccgttggcattattgccttggtggaagttatagtcttggtaggataatctataccgataagcatgataggaacttgtgctttcaacgcaatgaagtaaaaaccttttttccagtttgggttggatttgcgcgtaccttccggagtaatggctaaatgaaacagtttgcttccggcaaatctgtttgccatctggtctaccaaagatgtgttccggcttcggtctaccggtatgccgccgatggctctgaatatcaatcctaaaggaaaaaaaaaccactctttcttcatcataaagctggtttttcgtccgatggcaccataaaacagtttgccgataaacaaatcccagttggatgtatgtggcgctgcacaaatgacacatttgtcatagttgggcactgttacatttgttttccaacctaacaggcgataatagataaaactatatagtcttttcttcattcttattatttaagtttgccgatagcttcaatgattgagtctacttttgcattaaaatcagaacggaatttcttgtagtaaccttttacatttcccggttcggtatggctgatacggctgatgaattcatcttgcattttcagaatttcacccattagttcatcggctttcttcttgtctgttccgggtacatacagactgttcataaggcattcggcgaataattcaccggcaatataattgacgttctttttcaatgcttttctacttgccataatctttactttttatgtgaatgaatagtgttattttcggtaaagatagtgtttttcttcatgagttgagtggaaaaatgaaaatttatgtgtttttaatgagaaatagttcgtggaataattctacatttgtggagattttctacaatgtgagtgtggaaagcaggtggaatattactacttatatctatgttcatgtctgataactaaactattatataataaagaataccctttgtcctgctttggcattgcgtttgctttgaaatgggaaatagggttaaattaaataaacaaacaagcatgagactattttttacaaaaaaagaattaaagctgagaaagaaacgggtgataatgatgatagcctgcatgacagtgctgcttgccggttatctgatattgacttggcccaagaaaattcagccggaattacctactgttattgtagaacctgccgaagtgggtgatgtggaaatttttggtgagtatgtagggcgtatacgtgcacaacagtttgtggaagtccgtgcacgtgtggaaggctatttggagagtatgctttttgccgaagggacgtatataactaaaaaccaggttttatttgttatcaatcaagaccaatatcgtgcaaaggctgacaaggcccgtgcacagttaaagaaagatgaagcgcaggcgttgaaagccaaacgggatttggaacgtattcgtcctttgtatgcacagaatgctgccagtcagctggatttggataatgcgcaggctgcttatgaaacagccgaggcttctgttgctatgagccaggccgatctggaccaggcggaattggaactggggtataccattgtgcgttctccgctatcagggcatatcagtgaaagaaatgtggacttgggaacattggtaggtcccggggctaaatcattgcttgctaccatagtaaaaagtgatacggtattggtagatttcagcatgaccgcattggactatcttaaaagcaaagagcgcaatatagagataggccgtcaggattctacccgctcttggcagcctaatatcacgattactttggctgataatactgtttatccttacaaaggttatgtcgattttgcagaaccgcaggttgacccgcaaaccggtacgttctccgttcgtgccgaaatgcctaatccgaacagagtattgctgcccggacagtttacgaaagtaaaactgttgttggacgtacgcgaaggtgctgtggcagttcctcaaaaggccgttaccattgagaaaggcggtgcttatatatatgtaatgcgccgcgattcgacagttgaaaagcgcttcattgaattaggacctgagtttggtaacaatatggttgttgaacgcggactggcggcaggcgagcaggtagtgacggaaggtttccataaacttactccgggaatgaaagtgcgtgcacaagcagctgctcccaaaaaggaagatgagcagccggcagattctctgaataagaaagccgcttctgagaataaagaaaaggataagaatctctcaaagtaaaataacagtatgaaagtaagtttctttatagaccgccctgtattctcggcggtgatatcgattgtgattgtaattgtcggtatcatcggtctgactatgcttccggtggatcaatacccacagataacaccgcccgttgtgaaaatcagtgcatcctatccgggggcaagtgcgctgactgtgtcacaagcagtggcgactcctatcgaacaggaaataaacggtactccgggtatgttgtacatggagtccaacagttccaattccggtggcttttcggcaaccgtgacctttgatgtatctgccgatccggatttagctgccgtggaaattcaaaaccgtataaagctggcggaaagccgtttgcctgcggaagtcattcagaatggtatttcggtagaaaagcaggctcccagccagctgatgacaatctgtttgacttccaatgatccgaaattcgacgaaatctatctgagcaactttgctactattaacgtactcgaccttttacgccgtattcccggtgtgggacgtgtgtctaatatcggtagccgttactatgccatgcaaatctgggctatgccagacaaactggcaaatttcggattgactgttcaggatttgcagaatgctttgaaagaccagaaccgcgaatcggctgccggtgttttgggacagcaaccggtgcaaggtttggacattacaattcctattacaacgcaaggtcgtttgagctcggcaaagcagtttgaggatattgtggtccgtgccaatgccaatgggtctattattcgtcttcgcgatgtggccagagtgtcacttgaagcttcctcatatagtacggaaagtggtattaacggtgaaaatgcggcagttctcggcatttatatgcttccgggtgccaatgctatggaagtggcggacaacgtgaagaaggcaatggaagaaatcagtgcgaactttcctgaaggaatgagttacgagataccttttgacatgactacctatatttcggagtctatccacgaggtgtataagacattgttcgaagcattggttcttgtggtattggtagtgttcctttcactgcaaagctggcgtgctactttgatacctgttgttgcagtgcctatttctttgatcggtactttcggtttcatgcttattttcggtttctcgctgaatatattgacattgttgggattgattcttgctattggtattgtcgtggatgatgctattgtggtagtggagaatgtggaacatctgatggaaacggaaaaactctctccttatgaagcaacgaaaaaagcaatgaacggtttggcaagtgctttgattgcaacctcattggtgctctgtgccgtatttgttccggtaagcttcctgagcggtatcaccggacaattatatcgccagtttactattaccattgctgtatcggtattgctttctacagttgtggcactgacgcttagccccgtgatgtgttcgcttatcctgaagcccgacagcggaaagaaaaagaatatcgtgttccgtaagattaacgaatggttgaatatcagtaatcataagtatattggtgttatcagccgcgttatcaagcatcccagacgtttgatgagtgcattcggtatggtattgatagctattttcatcattcaccgtctgattcctaccagtttcttgccggtggaagaccagggatattttaaagtggagttggaactgccggaaggttctactttggaacgtacccgtatcgtgaccgatcgtgccgtgcagtatctggagcagaatccgtatgtggcttatgtgcagaatgtaacgggtagcagtccgcgtgtaggaagcaatcaggcgcgcagtgagttaactgttatattgaagccctgggaggaacgcaaaaataccactatcaataagattatggagaaagtggaaaaggatttgagggaataccccgaatgtagagtctatctttctactcctcctgtaatcccgggattgggaacatccggtggctttgaaatgcagcttgaggcacgtggggaagctacttttgaaaatctggtacaggcagcggatactttgatgtattatgctcagaaacgcaaggaattgacagggctttcttcttctttgcagtctgagattccgcaactctattttgatgtagaccgtgacaaggtgaagatgctgggagtgccgttggcagatgtgttctctacgatgaaagcttatacgggttccgtatatgtgaatgactttaatatgttcaatcgtatatataaggtatatattcaggctgaagctccgtatcgtgagcacaaagagaacattaatctgttctttgtaaaagcagctaatggtgcgatggttccgttaacctcgttgggtaatgcatcctatacaaccggtccgggtagtattaaacgtttcaatatgtttactactgcagttattctcggttcggcggcacaggggtacagttccggccaggctatggagattatggaacagatagcgcgcgaacatttaccggataatataggtgttgagtggagcggactttcttatcaggagaagaaagccggtgggcagaccggactggtgctgacgttggtattcctcttcgtattcctgttcctggcagcacaatacgaaagctggactgtgcctattgctgtattgctttcgttgccggtagctgcattgggagcttatttgggcgttgctgtatgtggcttggaaaatgatatttatttccagattggtttggtaatgttggtgggacttgcagcaaaaaatgctatccttatcgttgagtttgccaaagtacaggtggataatggaggagatttggtgcagtcggccattcatgccgcccaactccgtttccgtcctatattgatgacttcacttgcctttgtattgggtatgcttcctatggttcttgcaagcggaccgggatctgcaagccgtcaggcaataggtacgggagttttctttggaatgatttttgccattgtattcggcattgtgcttgtgcctttcttctttgttttgatttataaggcaaaggaaaaagtgcaacacaaaatcaaaaaagattgatgataacattgtaaatgaattctgattacacgcttatgaaaaaaaagaatatatatatacttctgttgctcgccccggttctttttgcatcgtgcaaggtaggcaaaagctatgtccgtcccgaaatggcattgcccgacagtttgatgcaacagcaggacagcatcagcattgccgatgagcagtggcaggctgtttatacagacaatactttgcgtaatctgatagcacgcgcattggagtataataaagatatgctcgttgcggccgctcgcgtgaaagaaatggcggcccagaaacgtatcagcgtagctaatctacttccccagttgaatgggaaaatagaggcagagcgtgaagttgaaaactatggcggacatagccgcgatgtgggtaacagctatgaagcaaaggctcttttgtcgtgggaacttgacctttggggaaatctgcgttggaaaaaagtagctgccgtagccgattatctgcaaagtgtagaatcacagcgtgccttgcgtatgacaattgttgcggaagtggcgcaggcatattacgagctggtagcactcgatacagaattggaaattgtccgtcagacacaaaaggctcgtgaagaaggtgtgcgtcttgcaagaatccgttttgaaggcggacttacttcggagacatcttatcagcaggcgcaagtagagttggcgcgtacagctacgcttgttccggatctggaacgtaagatttccatcaaggagaatgacatagcttttcttgccggtgaatttcctacacgtatagagcgcagccgctttttggaggagttggatgtgccggaatctttacctgtaggattgccgtccggcttattggaacgtcgtcctgacattcgtgctgcggagcagcagcttatagctgaacatgctcgtgtgaaagtggcctataccaatatgttccctcggttgtcgctgaccggtcagtttggattggagagtgatgtcttgtcaaacttccttcagtcgccttattcattgttgaacggagcagtattgactccgcttttcaattggggtaagaaccgggctgctctaaaggcacagaaagcttcgtttgaggcggaagttcatagctatgagaaaacggtgctgaatgcttttaaagaggctaagaacgcaattgtggacttcaacaaaataaaggaagtgtatcagttacgtctcaaattggaacgttcagccaaaacgtacgtggatttagcgcagttgcaatatattaatggtgttattaattatatggacgtgcttgatgcccagcgtggatatttcgatgcccagattggtgtcagcaatgcaatccgtgacgaactgatagcagtggtaaatgtttataaggctttgggtggaggctggcagatagaagaataagtttgcattatttcttcattcagtttgcatttcttgcggaaaagagcgaaatttgcgacgcttttaaacgaaactttattaacacctttaaatatttaagagaaatgactaaaagtgcattgcaaattgcaagggctgcttatcagcccaaacttccgaaagggctgacaggtactgtaaaagcagtggccggcgcagctacccagtcggttgccgatcaggaagaaatcaagaaattgtttcccaatacttatgggatgcctttgattaagtttgaaaataccgatgaaaccgttgatttccctgctatgaatgtgggtgtaattctttccggtggtcaggctcccggtggtcacaatgtgatatccggtatttttgacggtattaaaaagttgaacaaagatagcaaactgtacggtttcattcttggtcccggtggtttggtagaccataactatatggaactgacggccgatatcatcgatgaatatcgtaataccggtggtttcgatatcataggttcaggccgtaccaaattggagaaagaggaacagtttgaaaaaggactggaaatcttgaaagaattgaatatcaaagcactggttattatcggtggtgacgattctaatacaaatgcctgcgtattggctgagtattatgctgcgaagaattgcggtgtacaggttatcgggtgtccgaaaactattgatggtgacttgaagaacgaaatgattgaaacttctttcggattcgatacagcttgcaaaacgtatgccgaagtaatcggtaatatccagcgcgactgtaactcggcacgtaagtactggcatttcataaaactgatgggacgttccgcttcacatatcgctttggaatgtgcattgcaggtacagcctaatatctgtattatctccgaagaagttgaagctaaggatatgtctttggatgatatcgtaacaggtatcgctcaggtggtggctaatcgtgccgcacagggcaataacttcggtacggttcttatccccgagggcttggttgagttcatccccgctatgaaacgtcttatcgctgagttgaatgatttcctggctgccaatgcagaggaattctctcagattaagaaatcacaccaacgcgactatatcatccgcaaactttctccggaaaatgccgctatctatgccagtcttcccgaaggtgtagcgcgtcagttgtcattggatcgcgacccgcacggaaacgtacaggtatctctcattgaaacggagaaactgttgtccgaaatggtagctgccaaattggctcagtggaaagaagaaggcaaatatgtaggtaagttcgctgcacagcatcacttcttcggttatgaaggacgttgcgctgctccgtctaatttcgatgccgactactgctactctttgggttatgcggcatctgcgctgattgctaacggtaagaccggttacatgtcttccgtacgtaatactacagctcctgccgaagagtggattgcaggtggtgtgcctattacaatgatgatgaatatggaacgtcgtcacggcgaaatgaaaccggttatccagaaagctttggtaagactggacggtgctcctttcaaagcatttgccgctcagcgtgagcgttgggctgtggaaacagactatgtttatccgggtcctatccaatacttcggtcctgccgaagtttgcgaccagcctaccaagactttgcaactggaacaaggtagataaaatcttatagctaattgctgcatttgcagtaattggctatgtagaacacaaattacacaagagttgcgcaaatccgaatttgtgtaatctgtgtagtttgtgttttatttttgatagatatttgttacttcaatatacttgaatgccttctaaaaacagtacagtttcccggcgtaaacctgtatcccgtcgtacttcttctcgaaaaaagaatcagacggtgtctcgtcccatgcctgtatggttgcgtaatttattggcattttgtataatagcggtattttcagcaggattctattggttctttatccgtccttatgcttatcgttggaaaccttgttacggtttaaagggctacggcgtatgcatgccttgcaactatgaggtgcatggcattgatatttcccactatcagggtattatagattgggataagctccttcataataaagaagcgaaatttcccatacattttatctttatgaaagctaccgaagggggcgattatggcgatgaaacttttgtagaaaatttcagtcaggcacggaaatacggttttatccgaggagcttatcattatttcctacccaagacagatgcgcataagcaggctgacttttttattagtacagtacacttgtcaaaaggagaccttccccccgttcttgatgtggaaactacgggtaagagatctcctctggaactgaaatctgccgttaaaacctggctcgacagagtagaggcgcattacggcgtaaaaccgattctttacacttcctataaatttaagaaacgttatctcaacgactccatattcaacgcttatccttactggatagcccattattacgttgattccgtgaagtacgagggcaaatggcatttttggcaacataccgatgtaggtaatgtccccggcattgaagaagaagtcgatctgaatgtttttaacggcacgttggaagaattggttggtatgaccctgcaatagcttgctttccgttttcttccttttatcgttgtgtcataatacaaactttactgcggcccaacggtttttttccttatgatgtacgaagcgcagtccgttatgctccgcttcggcctgtattacaggaatatcatctacataaaaaccgctcatatatagttccgaccccggatgcatgcaacttacatatcgtttcatgtcgttcagcaggatgttacggttgatgttggctatgattacatcaaaaggttcttggtctttcaatagagaagcgtctccttgaaaaacggatatacggtctactccatttagctcaatgttttcaagagagttgcgtacgcaccattcatctatatcgacggctgtacagggcgcagcaccgcgcatacgtgccaatatggcgagaatggatgttccgcatcccatatcaagcaaagatttgccttggagatcgttatccagcaattcaccgataatgagactggtcgtttcgtggtgtcctgtaccgaatgccatttgagggttgatgactatatcgtattcagcttgagggatgtcgcgatggaatgtgctgtggatgacacagcggtcgccaatgataatgggctggaagaaattcttttcccattcttcattccagtctttgtcttccgcttcttggtaagcatattctacctgtgtatcaggtaagggaaaatcggcaagagcttctttgaggacagtttcattgtataaatctttttgaatgtaggcggcaatcccgtctgtttgctctacaaaactctcaaaaccagcttcacccagcactgccgataagacatcgttgacgatttccgtgcagggagtggtatggaatgtaaattctaaatatttcattggaatataattgtttgttaaatgcaaaaggcaggtataggagaaaatcctatttctgcgtatatttgttttggatacaaagataggtgcatttagggaaatccctataaatctttggggaaaatcttctgtatagagtaaatccctgcgttatctttgtggtgtgaaaaagtatggaattgtaaacccataaaccaaataaatatgaaaaagattgtttttttatcgctttttgcattgtgtcttccgtgggcactttcagctcaaagtgtagatgacgacctttactacgttccttccaagaaaaaagaggaaaagacggagaagaaaaaaactccggctgccgatgcggttgtagtaaagacaaatgctccgactacggtttatgcgtcgccgggcaatacgaccattgtagtgaaagaccgtaaagggaatattcgtgatgtagacgagtataatcgtcggtatgactctaaagactatgacttttcacaagagaatgatacgctttatatagacgaaaaagaagacgatggcctggatggagaatgggtgaacggttttgacggttcggaagatgattatgaatatgccacgcgcattatccgtttccgcaatccacgctatgccatcagtatcagcagcccgctttactgggatgtagtttatggtctgaatccatgggactggaatgtatatacggacggattgtacgcatatgcatttcctaccttcaccaaccgtttgtggtgggattggcgctataactctttcggttggggcggctatccctattatggctggggttggaacagttggtatggtccgggctggggctttggctggagcgtaagctggggcggctggtatggaggtggctggtggggacatcaccactatcatcatcactgttatcccggtggcggttattggccgcgtaatacatatacctatcgccgttcttcgggagcaagcagttatagaaattcttcttctacggttcgcaggaccggttcggctgtccgttcaggtgtgtcatcctatagaagagacggacaaagcggtacgaccaccagacgcgtggtaggtacacgtccgtcgggtacacgcagtggggtaactacccgtacagatgccgcctctacccggcgcagggtatatacccgtccaagcagtacgcgggtaggttcttcagcttcaggagtgcagggaagtagtagccgtgtacatgctacaggtgtaagacgttccgcagccggaagtccttctacttacaacaggggcagttctgcatcgtcaacacgcaattattcaaccggtaacagtagtagccgtcgctcttatacgcctgtgcaaaacaactcttccacccgtagttattcttcgggaggcggtagcagttcacgcagttattccggcggtgctacccgttcgtcaggtggtggttcttcaagaagaagataggtatagtattcaatagaaaaagatgagtaggatatgaaaaaaattataactttagctgttttggggatgttgggtgcagttccggtaagtgcacagaccgtgtacgatgcagccaacatcgcaaacaaggatttaaatggtacagcacgctttgtaagtatgggcggggctatgggtgcgttgggcggagatatttccactattgctacaaaccctgccggtataggtatttatcgcagtaatgatgcaatgctgtcattcagtctttcttcttatggtactgaaagtaattatatgggaagtaagatgaatgcagacaagatgaaaacctcatttgataatgccggttttgttatttcttcaaagataggcaatgctacggctttacgttatgtgaatttcggctttaattatcataaggcgaagtctttttataagaatatgtcgatgggaggtaatttaggcgattatacgcaaacggattatatggcggcacaagccggaggaataaaggactggtcgggcaatatttatacagatccggaagtaggatggctatccgcattgggatatgacagttatctgataaccgactttattgcccacaacggacagggagatgtcccttccggttacgttccctatatgaaaaacgggactcaggtaaagaatctgaacggtgatttaatgtatatcactccgggtgaatatggaggaatgtttttaggaggaaatggcaatttccggtcggaagagcgtggcggaattgaacaatatgatttcaatatttcattcaatattaatgaccgggtatatttaggcgtaactgtgggggcttatgccatagattacaataaatatactttttatagtgaagattatttggataatgccggaaatagcatcggacagaattataacctgcagagctggaacaagatacacggttcgggttttgatgtgaaattcggagccatcgtgcgtcctttcgaatattcccctttgaggattggattagccattcatacaccgacctattataatttggattataagacaaatgcccgtctggagtcgaatgtcttgaatgatttggatatagctaacgagtcgggtataggaagcggtgtgatcggtcaatatactgtggatacttatgatataatgaatggagacatggtgcgtcaattccacttgcagacaccatggacgtataatgtaagtttgggatatactgtaggttccagtttggctttaggggcagagtatgaatatcaggactattcgtccatgaaattcaaggaccaggaaggctattccgatacatttgggtacgaaaacagtactacttctatgctgaaaggggtgagcaccattcgtttgggagccgaatataaagtgattcctcagtttgctttgcgtgcaggatacaattatacctctgccattttcaatagtgatgcatataaggatttgccttataactcaattcagacggatacggattttgcaaataccaaagctttgagtaactatacagtgggtctcggttacagaggggctatgttttatgctgatttggcatataagttctcttcatacaaggaagatttctatccgttcattaatgcctatgaagatggaggccagttagtgataggctctcctgaagcgacgaaagtaaaaaatacccgaagccaggtgctgctgaccttaggtttacgtttttaaggggaagtgattccccgttaccgataaaaaaagacttgcagaaatttcttctgcaagtcttttttatattctaccgtattgtttcggattatttcttgaaatagcggttgtacagaccttcgaaacctttaccgtgacgagcttcgtctttagccatttcatgaactgtgtcatggatagcatccagattcaatgctttggcacgtgtagcgatacgcttcttgtcttcgcaagcgcctgattctgcattcattctcttttcaaggttagtcttggtatcccatacgcagtcacccagcaattcagcaaattttgcagcgtgttctgcttcttcccatgcgtaacgcttgaaagcttcagctacttcaggatagccttcgcggtctgcctggcggctcattgcaaggtacatacctacttccgtgcattcgcccatgaagtggttgttcaaatccttaatcatttcgtcatcgcaacctttggctacgccaataacatgttcgtcagcaaaaaccaacggaccgcctgcctgtgcttcttctacttcaacgaatttgcttgcaggagctttacacaaaggacatttctcaggagctgcgtctccttcatatacgtaaccgcagacagtacatctaaactttttcattttacttcagattttaattagttgaattagttattcgttattttggttaaatattcatttcccagacaacttttgcagatacctttatagtaataatggacttcttgcacttcgtgtccgttcatatccatttcttccacctgtttaatgttggcattgcattccaaatcatatatttttccgcaatgtttgcataagaaatgggcatgaggagtggtatctgcatcatagcaggtattccgttcgtcaattgtcaatgtctgtgcagcaccttgttcactaagtaattttaaagtgttgtaaacagttgttttagacaatgtgggaatggaaggggcaagtgccgtataaatttcatccaccgtgggatgtgtacgatgctccatcagataagtcataatggctatgcgctgtaccgagggcttaatgttatgattttgcaatcgttttactacatccatatcatctgcaattcaaacttgtaataattacatttttaattctcttgcaaagataggcacttcttttgtttatccaaaagattttagatattttttatcagaaagtgcggctatgcaaagtgaaaaggctgattcttttgtgtttattgataaattgccgtatttttgcaccctaatattaataggattcatatatgaattacggatatgttaaagtggcggcatctgtaccccgtgttagagtggcggactgtaagttcaatgccggacagattgaaaaagagataatcattgccgatgggaaaggagtgcagataattgcctttccggagttgtgcattaccggatatacctgtggtgacctttttgcccagcaacttctgcttgaagaggctgaaatggggctgatgcagattttgaacaatacccgtcagatggatattatatccattctcggtatgcccgtgcctttgaacggtgtactgctgaatactgcggtggttatacagaaaggtaagatattgggagttgttcctaaaacttatcttccgaattataaagagttttacgaaaagcgctggtttacttctgcgtgtgaagtttcggaaacgacagcccgtttgtgcgggcaaatagtccccatggggcggaatctgcttttcgagacggcggatacaaccttcggaattgaaatctgtgaggacttatgggctccgattccgccgagttcttctttggcattgcaaggagcggaaattcttttcaacctttcggcagacaatgaagggataggcaagcatgcttacttgcgttcgcttatcagccagcagtcggcacgttgtatcgcagggtatgtattcagttcatgcggttttggcgagtctactacagacgtggtgtttgcaggtaacggattaatttacgagaacggtacgttgctggcaggcagcgagcgtttctcgttcgaggaacaggtcgttatcagtgagattgacgtggagcatatacgtacggaacgccgggtgaacactacatttgcagcctgtcgcgccaattgtgcaccggaagtgccggtgcgtgtctctacggaatatgtcaattccaaagatttgaatctgacccgtgttttcgatccgcatccgtttgttcctcaaggagcagcgttggacgagcgttgtgaggagatattctccatacaggtgtcgggattggcgcaacgtttgctgcataccaatgccaagagtgcggtggtaggcatatccggtggtctggattccacactggcattgctggtttgtgtgaaaacattcgataaactgggttggaaccgtaaaggaattatcggcgtgactatgccgggattcggtactaccgaccgcacccataccaatgcggtggacttaatggcatcattaggcgtaaccatgcgcgaggtcagcataaaggatgtctgcatccagcacttcaaagatatagaccatgatatcaacgtacacgatgtggtgtatgaaaattcacaggcgcgtgagcgtacgcagatattgatggatattgccaaccagacctgggggatggtggttggcaccggcgacctctcggaacttgccttaggctgggctacgtacaacggcgaccatatgtctatgtacggtgttaacggaagtatccccaaaacattggtgaaacatttggtgaagtgggtggcggagaatgacattgatgagacgtcgcgggccacattattggatattgtggacacccctatcagtccggaactcataccggcggatgaaaacggaaatatcaggcagattacggaagaccttgtagggccgtacgaactgcatgattttttcttatattattttcttcgttgcggtttccgtccttccaagattttcttccttgctgcacgtacgtttaaagatgtttatgatgaagagactataaagaagtggttgcagactttttgccgtcgcttctttaaccagcagttcaagcgttcctgtttgcccgatggccctaaggtaggaagtatttctatcagtccgcgcggtgactggcggatgccgagcgatgcttcttcagaaatgtggctgaaggaagttgaaaagatttgagaattaagcattgaaagctaaaaggtcgtgtcaaaaagaaattatcaggttctttttgacacgaccttttagctttcagcgtttaactttttagtagtatctcttatatattttctggtactcttttccttttttgaatctttccagccaggcattcaggctgtccaagagtacgggagactgcttgctcactccccatgagtagaattgggtgaagctgatagccgtatttatgtctatctgcggcagactgtcggctgctgcgcgagcgatgctttcttcgcatacggcataatcgatatcgccatgtgcgacaagggcgataagttgttcggaaccatacttttctacttccttaatatatatggtatcaccgatttcgtttcctaaattacggatgcgcaggatggaaggcgacccttctaccacattcagcgtctttcccgctaagtccaattggcttttgataaacagggaatcgtcgggagagtctgttttccgttgtaccaatacttgcctgttcagaacaatcggagaggtcagaagcaaggagtcctttaattcgctggttgctaaaattccataggctatgacatcgaacctgccgtttgccagaccttccagacgttcgttaaaactcatttcgggagtaatggctacctgcagaccgtgatcacgggcaaaagcctctattaattcgtaatgaaatccggacagggtgtctccgtccacataaaagctgatggagttatattccgtagcggcatggagcgtaccgtctgctgctatttcggcataatcgcgcggatgtcctttacggatttcctttttgggcaatataaatgtggcaacgactgcggctattgcccccaggatgatatattttgataatttactctttttcatagttgaaagacggcattagtcgtagaaattccatgaaatgccaatcttgaacagacgcgggtttatagggtagtgcggcacaaggaaataattgcctttacccattcctgcattaacgtgatacatcatggcaaagatgcgtgtccgcttcaaatgcagattggcgtatacgtttacaatcggatagccgccaatctccacctggtcatctgctgcttgaagatggaactgctgaatggcaggagtataggcaggtgcattgtatttggtaaaataccgcacatccgcaccaagttgtacagtcagcactttcttggctattttggcaagcagatacagattgtgatatagcgagagctgcggcaagggcaataccgtttcattgcttgatttctgccaggttacttcgttgtccaaatgcaggatgcctaagcggaaatcctgtttcagtgtagcggagagcacctgtatattaccgctttcctgagcgggcatggcattttggttgaaataggtgtagttctttatgttctctacgccggcacgcagattggttttccagcggctgatgttcagctcgccttccacgcgtgtacggaactccttgtccatgttttcattgtcccagtagtaatggttggagtgataatgacgcatatagaaagagggcagcgtgttgcttacataacctcgtgcatagaagttcacggtatccttccagaggcggaagttcaagtcgaggtcggcattgacgcggaactgtccgagtgccttgtccatgatgcccacttcaccgtttacgttgtaatgcagtgttttaccctgccgtttggccagttcgccgccaacgaatatctcctgttcgtcgaaattggttcgcgacaatgtgtccatcagctcatagcggctgaatttatgcgatatataggctgtcagtccggctttggcatacttgttgaaaccttcgagcaaagcgatgccgaatacgttctttacactgaaagccgtagtagagtccctgctggctacttcgttgaagtaagcgttggggtattgcccttccgtctccttggcggaagagaatttatgacgcgcccgttccactttcatggtatgtatgaagctggtgacgggaacgaactcttcggttataatggtatctttggctaaaggtacgctgtcgttggcaactgctctttttggggatttggcatcttccacagttgtggtttcacgtgtgaagccgaggcggtaacggtgcgtcaggtatacatagaaatctttgttcttgtttgacgtctgttccaacttaaccggaatggtggtggattcgtattctttcttgccttccgccatatcttccgggcgcgtgatgtaacggtcgtcctgaataccgccgttttcgttcatcttcatagtgaagttgttgtataccgcctgcatctggtatttattacctatatagctggcgaatattccggcattgaagttcgatgtggactggttctggtagtatccccgtccgtacagatagtcaatgttgaagccgaacgccaaccgcttgttgacgtttaccgagaaataggacttgaagcgttcttcaccgttgaccttatttcctgctttatagtaggtaagattggtgaaaggtacattactgttggtaaatttcacttcatcggggcggacgaagaagctggagaagggctccatgaagatggtcggctcgttgtctctgcgttcaaagaagatacgtgacatacggggggaacccagattacccagataattatagtgtccgtacatgccttctaccagattggtattctggaagttcaggttggcagtatcggcggggataatagtgcggttgcccaatgtttcactcaaacgccacatatagagtttgggcggaaggctttggatttccgtatcggtgctgtcttccagattatcgggtaatgtgttggggtctacctggttgccgaactggtcacggcctgttacaggatccatacggttgaaagggttttgtgccccgacgcccaaaatgcctataatagatagaaatatgtatgtcagtacgattcgtctcataattaggcgcaaagatacaataaaaaattattcgcttacggaattcagccttttttgcttcttttttacattcggcgtttacaggcaatctctttctttttgacgataaaaatgagatggaaagaatgttttttcttgtaaatggagcattgtatgtgccgggttatttatatttgcgcagatattatgatgaattgttacctttgtggtgagtgggtgtcaaagactgtttatatatacttaaaatccatatcttataacatgaaaacattgtttgtccttttggggatgtttataatttatccttgtttatacgctcaagatgcggagttgcaggcttgccgggaagagctggcacgcggcatgagtcagaagaaccgcgacagcattgcagcggcttattgtcatttgggagaatactacgcctatcgccaggcggacagtacccggtattattgcgaacagggattgaaatatgccgcaacggataaagccgagccttacctttacctgttgaataatctggcagacgcttatttttcttcggggcagttggacgaatcgttaaagcgtttccgttttgtgctcgaagaagccggacgtttgcattgggacgaggtcgagatagcttccgtgctttcctctgtcggcgtgatataccgtagaaaggagatgcccgattcggcgctggtgtgctataaccgggcattggcgttgcttgataatcgcgaggcttatgatgaacggacacagttgctgacgagtatagccattctttatacgaacaccgcccggctgaaagaaggcgaatattacatccggaaagcattggaggcatcggagaagagtgatgacatggacatggtgatgtatgctgccgctacggcgggaagtattttcacgctgagggaaaattatgcggaagctgcccaactgctttatcccgtacttgccaaagcacgggagcagcagaagccgagattcgtactgaaaatcatagcgtatctgttgagtgcctattacaggctggacaatcgcgactccatcaatcattacatggcggaaggcgataaagtggcggcaggactgcccgctaccaatgccgaggtgcaggggtatcatgaaagtctgtgtgacatactgactaaaatgggacgctatggcgagagcctgcatatccagaaacggatgctggctgcgagggacagcagttcgcagactcccgtagaccggctttttgagagaatggcacgcaactatgccagaatgaaaaactatccggaagctatggagtattacgcaaaggcctatcatacggcagacagcctgcataaggcagaggtggagacggaattgtcggaactctccattaaatacgagaaccaggaaaaggaacttgagatagcgcggctcactcagcagcatttggaacagaaagctaagacgatgcaatggagtgtggcggcagtggcggcttcttctgctttcctgctgctggctgcctattatgtcttccggcggaagcgcatcaggaaagaggaggaattgaaacttgcccaaagctatatagacggtttggagcgcgaacgtacgcgtcttgccaaggatttgcacgacggtgtgtgcaacgacctgcttggtatcggtatgaatatgcagtacatgcagcctacggacgaatcgaaacgggagattctggctctgctggagcaggtgcgcagcgatgtacgctgtatttctcacgaactgatgccgcctaagttccaggttactacccttgccgagacggtgaaggcctatgtggaagggcttgcccttcctgcgtcggtgcaacttgcgttcagtaaggaaaatgaagagattcaatggagccaagtgcccgaagaggtgtcttatgaagtttatcgcatcatgcaggagttgctgtccaatatcctgaaacattccggagcgacggagatagatgtgactcttacattgaaacggaagttgctgactctgcaaatttcaaataacggtaaaaattactgtggtgacgaggtgcggggaaagggcatcgggtttactaccattcaagaacgcgccaaagccgtcggtggtttgtttaccacggatattcaggacggaagccaaaagttcaagcttgaaatatcgttatccatttaatggaaaaccggtatgccggagagtaaaatcactatttttgatgatgccgcatattgataaatgctatttctttgcaacataattcagaacacaaagataggttgatgaaagaaagagatatacgcattttgttggtggatgaccatgatttggtgcttcaaggtttgaagcggatagtagaatgttcgctaccggaaataaaaaacgtatgtactgcatcgtcgggacaggaggcattgcatcttatcgcatctcaacgtttcaatcttttcgtgctggatatggaactgcccgatatatccgggatggacatcattgtgcggatacgggagaaagacccgcgggcacgcatcattgtcaacaccatgcacgaagaaatctggtttatcaaagatttgattcagagtgcagtagacggtatcttgtttaaatccatcgattctacgaaaatagccgaagccattcgccgggtgctggatggcggaacttactattgcccttatgccgagcatgtgcgtgcacagatgcggcgttcggacgaagggcggcgtgaggaactgaccttgcgcgaacttgatgtactgaaacggatatccgagggcaagaacacgcaggaaatagctcaggaactttgtgtctctaccaatacggttgatacgcaccgccgtcatctgatggacaagctggatgcacgtaatgtggccgacctcattatgacagctatctccaaagggataatccctatccgtaaatgctgacaacattactcatttaaataattcaatagtatgaaaaagtttacggttataactttattcgcaatgttctgcggactggttgtgttgtcggcatgcggcggtggagccgcttcgggttcggctgcaagtagcgatgcgcctttgggccgtgtgcccgcaatatttgcagaggtggctgccaagaaaaaagcattggacgaaagcttgcgtaaggaggatgatttggaccggtatcagaagaaactgaaagagtttgatgaatatgctgccaagagttatcagaaggcggcggaagaaggcgagaaacttgtcggacgtgaaattgtctgtacgggagatgtctaccctgattttcagataacgggtgctaaagtggcggaatatcatgccggcagagaggcgggcagtataattgtgagggttacggtcactcccaaacgggatattgtagtacgtgaaaccaaacgtcaatgtgccgaaggcgaatatccgctgaaagatacccgtctgtatttcgccttgatgaaggccaacgaccatttgattgaactcggtcagttgaaccctttcaatggtaattcttataacagctctttgaaagccgaatatgctcccggacagatggttcaagccggcgtaccttgccatagcgaaggagctccggtgtacatcaactgccatacctacgactttacggaatttgccaagattgtatttctggcagagaaagattatatggctatacgtaagcaggcttacggcttctgatagaaacaaacttctttaatcttaaaggcaaacaactatgaacaggcttttaatggcggcggcacttattgtgctggcagcctgtggtggcgtatccacacaaaacggcaacggtacggacaaagaaggactgaacggtaaagtgcataaggtgcaaaccttgatttacaacgcgaagtctcagggcaatgaaacagtaaaggacggcaaaccggattcttatcgtgaaacggatttctttccgaaagaagatacccggatttataatgctgccgggcagctcgattctgtggtgagtgtagtggacgccgtcaaatacattacggtctatgcctatcgggacgggaatgtcagtaatgagaaactctttcagaacggtgaactgctaaccgaccgcagatatgtttatcgggacggcaagctggcaagtacaatcgaagacatgtatatcggcggcgacaagactaccagtgagtatccggtggatgcttcaaagatagagtacgtggatggcaattgcatagagcatggtgatacggaacgcgattatgttgtgaaagatgctttggggcgtgtgctgaaagagtccgcttacagcgagatggacgattatctcaccgtaaaggagtatacctataacgaaaaaggctggctggaaacctgcgtatcttccgatgataataaggtgtcttatgattatccggaaacggacgaccggggcaactggacacgcatggtgataacccttaacggacagccctatggcattgcggaacgtagcattacttattacgaatgataatagacaggtattatggaaactataatcgtattattggctttgctttctcaaatattgggtctgttcggctttgttttctcatgtcttttgtttttgaggttcggtaaagtaaaaggttggttcaataagaaggcaggtacggagattgtatcctcattcagcttccgttctctccgcacattgattgtaaccggggtgctggggtttgtaatgatgatggtgggtctgctttgcagcgtggggctttttatagataagacgcctacggatacacagatgtattggtttgcaggtacgtttgtagcgttgacgctggtgtatccggtttggcgcgtgatacgccgtatcgtgcgttgcagtcgtgcgaaaaacaggaaagcggaaaggtggcgactgttctacgacgtagcggtaaacctggcaggtttgttcggcggtttgctgttgcttgtcatcttgtcttttgtggcggtcatcttgtcttttacgaaatggaacggtttcgtccccaagcatctccgtgagatgtccggagtggacgttgtgccggagtcgaatagttattattggataggtgctgtgctgggtgtggttgccgtactgtcgcagttctggggttcggacggtgaggcggtaatcggctggctggtgggcatatccgtgcttgccctcatcggttatgcctggtatcagatacgcagtgccgcacccgaaggcagaaaacagattgcatggcgttgtggatatatggtattgactacctatgcggtgttcactatcacctggattctgatattcgtggcagttgcgctgctcattctttatatagtccttttcgctaccagcaattcgggagggaaaggcaagtataaagtgacttgtgaaaatctgaccgatgatgtaatcaacggaagggggatatgcaagattacaaactccagatgcaagatgcgcgatacgggagtttgtccttataattgataataatattggcaataaaaaggtacacttgtatgaacgcggagactacccgaccgagttcgttgcactgcaagaatatgtacgttgcttcggagattgcacaaaactgacggactattccgatatgcctgaccattggtgatatgagggcaatgaaaaacggatgatgtatcgctttgaaatacatcatccgtttatactgaacgcatcgtccgttcggggctgacagaccatctgtttacctcaaacggacggtctgttttttcagacctctttaatcagctccataccgcgtttgatagcctcttcattcatgggtatcaagtggtggtgacgttcggggagtgtctttttcaatcccttgataacgttctccagcgttacgatgggagcaatcttcagcagtccgccaagcacaatcatattgaaagcctttgcgttgttcatttcattggctgcatccatggcgtcgatgcggtaaatgtgtatatccttacgggtaggcgggttgatgatgccgtagccgtcgtagataagtatgccgcccggctttactttgctctcgaacttctccagtgaaggctggttcaggatgatagccgcatcatacttgctcaggatgggcgaggagattttctcgtcgctcacgattacggtaacgtttgccgtaccgccacgctgttccggtccgtaggccggcatccaggtaacttccttgccttccatcagtccggaatatgccagaatctttcccatggacaatacgccttgtccgccgaagcctgctataatgatttcttctttcattgttcttctgtttttagcatcattgtttatctttcaagtcacccaatggatagaaggggaacatgtgctcctgcatccatttgtttgatttctccggagacatcttccagccggagttgcaggtggaaacgatttccacgaggttggaacccttgcctgccatggagttctcgaacgccttgcggatggctttctttgccttgcggatagcgggaaccgtatctacgctctggcgggttacgtatgccgtaccttccagttgggcggctatatcggccattttcagcggataaccgtgcaggtgtacgtcacgtccgtaaggactggtagaggttttcatgcccacaagggtagtgggggccatctgtccgccggtcataccgtagatggcgttgttgatgaagatgatggtgatgttctcaccgcggttcagcgcatggatggtttcggccgtaccgatacatgccaggtcgccgtcgccctgataggtgaataccagacggtccggccacaggcgcttaatggcggtggcaagggcgggagcgcgtccgtgggcggcttcctgccagtcgatgtctatatagttgtagataaacacggcacatcccacgggggagattccgatggccttatcttccagtcccatttcttcgattacttcggcaatcagtttgtgaaccacgccgtggctgcatcccgggcagtagtgcatgggattatcgttcatcagagtcggtttcttggcaaccaggttttcgggtttgataatatcttcttttgtcataatcacttctccttatctgttggtgaaccgtatgaaaaactccataagctttacaaatatagctgcgccgcaaacgtatataaacagtttgaaatcgtcccttgctacaatgtacacgatgatagatgccagggcaagtatcagaaagagaatattcagtacgtttcttattttgtcaggattcatttcttaatttgagagttgaggattaaaaataaaaaataaaaatagagttggctgagacttcttgattctcaaccctcgatttttaatttggcaagcgcctctacaatctcgtccgggtcgggaacgatgccgccgagacgtccgaagtgctctactttcaccttaccgtttacggcgaggcggacatcctcaatcatctgtccggcattcagctcggtaaccagtatgccttttaccttgtcggcatatgcggcaatggctttggttgggaacggccacagagtgatggggcgaagcattccgaccttgaggccttcttcacgcgccatttccatggctttctggccgatacgcgccatggagccgaaagctacaatcaggtattcggcatcctcgcagtgaatctcttcaaagcgtacctcgttctcttcgatttctttgtatttggcctggaagcggatgttgttcttctccatctcttccggtttcagttccagagaagtgatgacgttgggcttgcggccgttggttctgccagtagtggcccacggacattgctcgataacttcggcatccgtgcggcgcggcttctgtgcgggaagaactaccttctccatcatctgtccgattacgccgtcggcaagaatgatagccggattgcggtacttgaaggcaagctcgaagcccaggcttacgaagtccgccatttcctgtacggaagcgggggcaagggcgataaggcgatagtcgccatggccgccgcctttcacggtctggaaatagtcggcctggcttggctggatggttcccagtccgggaccgccgcgcattacatttacaatcagacacggcaattcggctcctgcaatgtaggagataccttcctgcttgaggctgacaccggggctggatgaagaggtcattaccatttttccgcttccggcgccaccgtataccatattgatagctgccacttcactctctgcctgaagcactaccataccggtggtttcccacggtttcagttcggcgagtgtttccaatacctctgattggggggtaatagggtaaccgaagtatccgtcggcgccgcagcggatggctgcatgggcgatggcttcgtttcctttcattaatacaacttcttctgccatattcttcttatttattctacttttactttataaaccgagatacatccgtccggacatacagttgcgcatgaactgcatccgttacaggtatcttccaatatctggtgggcatagttataccctttcacgttcacctctttggtgagggctattacattgagcggacaagccacaacacacaggttgcagcctttgcaacgctcggtgtctactacgattgctcctttgatttttgccataatttacgttttttattgattgtacatatccttgtgatagaagttcagaatatccattaccatgttataggcttgccgggcggggctgtccggattgaggtcgatggcatagcggtagttgttcagcgcttgctgccagttgctctgtttgcggtatgcgttcccccggagataataggcttcgtctttttgcgggaaatcggtctgaagcagttcgtcaagcaacagaatggcctgctctacgtttccctgactgataagctcttttatggtgtttaattgctccatatcgttctgagttccggattatttaaatacaaagatagtttttatttgaagatgagaggcatctttactgtgaaaaataagaaaataaggagacggttgtatcttgtcttttcttattccgggcatttgcttccgaaactcccggcatttgcttcccatattccgggtgttttctattggaatgcccggtctttcaggagtaaactccgggcgtttcgggagcaaatgccgggggatttggagatatgacaatccctttgttccggctttgattcattacgatgcaaagcaggacaaagggatgttctcctgatgaatgtgcagatggaatatacttcttcggtcttttattttagcagggattgtcgggggagaccggttatttcacaagttccccgtttatgtacagattcttgaacgtgacatcttttgctccgctaatccggtttttaccttccttgacgttattgaagcggctgtcttccacgcttacattataaacgtgcttgtcatcatcaagtccgatgatgagtacaccgagtttgctcttctcgcaagtcacgtttttgaggtgtacgttgcgcacggtaggggcatagccgcgattgcacttttcccggttttcgtattgcaggttgatgcgcagtacggcttcgcggcattggccgacggtgacgttgcgtacaaatacattctctatcagtccgccgcggcaggtactggtcttgatgcggattacgcggtccaggtcggggctgtccatgcggcagttctcaacgaacaggttacggtagccgccggatatttcactgccgataacgacgccgccatgaccgtttttcatgaagcagccgcgcacgatgatattttcgctgggaatgttccacttgcgtccgtcctggttacggccggatttgatggctatgcagtcgtcgcccgtatcgaaggtacagttctctatcagtacgtttttgcaggattccgggtcgcagccgtctccgttgggaccacggttgaatacgtgtacgccacgtacgatgaggctttcgcaaaacaacgggtgtataacccagaacggagagttcagcagggttacatcctctatcagcaccgtgttgcaggaatagaggttgatgagctgcgggcgcatgccgtcttcgggtttcatgatacgcttgtataccggcgtggatgtttccccgtacatcagcaggcgttcgcgtccgccgttgcgttgggccaccatgccttctttccagccgtagcgcggagcgccacacatcggccaccaggtttcgttggaaccctgaccgtcgattgtcccttttccggtgatggcgatgttggtttcgccgtatgcatatatcagcgggcgggcattgtagcagtccagaccttcccaacgggtgatgacggcagggaagtaaaggctctggtcggtggagaatttcagtacggctccttcttccacatgaaaatttacgttgctctttagggtgatggggccggtatggaaagtccctttaggtactacgaccgttccgccgccgttcaggctgcatgtcaggatggcccggttgatagcctcatggcaaggctcatccggcgtatcgggttgtgcaccgaagtctgtgatgaggtaggtacgtttggggaaagaggtccgcttgatttgtttttcaattttggcgctttccttgaaggctttgtcaaagtctatcggattggcggtggccagggttaccgatagaagcagggagatgattccgattactttcttcatgcgtttttcttttatgttcttaaatggtaaatagattgcgcaggcaaaagtaggaaaactcttccggtggcagaggttagtttttgattgaaagggtgtaataattgactgagatgaagaaaaatccgttccgtaagacgaaaaaaattatcccgtgagatgaaataaatcgtctcgcgggatgattttctttatctcgcagggcgaataattccgtctcacgggatgaaaacaaccggttaaggtcttccttgaatccgagggttatccctgtaccggtatcttgtctattctccgctggtggcgtccgccctcaaacgaagtgttgaagaattcggtcataatcatatccgcttcttccgtgccgataaagcgtcccggcatgacaaggacattagcatcgttgtgctggcgtgccagatgagcaatttcggcagtccagcaaagagccgcacgaatgccctgatgcttgttgagcgtcatgttgataccgtttccgctgccgcagatagcaattcccgggtaacattcgcctgcctcgacagcttgcgccagttgatgggcaaagtcgggatagtcgcagctttcggtggagtaggttccgtaatctttgtaaggccagcctttggcttccagccaaccgcggacatactctttcagttcaaagccggcgtggtcggaacaaagtccaatagttttcatataaataaaatgatagagtgataatgtgaaaaagcgatagagcaatgaggtgacgatgtagtgcagcatgtgcaggcttttctaccttatcgcctcattactctatcattattttactgttgttttattaaatcattgcctttacttgcttgtacacgttttctgccgtgaagcccagcttttcgtccagcactttgtaaggagcggagaaaccgaacgattccaatccccaaaccttaccgtgggcgcctaccaaaccttccagcgtaacgggcagtccggcggtcagaccgaatacttttgcatttgccggaatcacgctctcctgatagcccggagcctgactgcggaacagtccctctgacggaacagatacgatgcgcagcttgacaccgtccttgcgcagcagttctgcaccggccaccagcgtggctacttcggaaccggaagctacaaggataacgtccggattctcgtccgaaccggctacgatataagcgcctttggctgcctggctgtaatcattgcctgcaggcaggttggtgatgttctgacgggagaatattaaagcggtcggggtagacatgttctccatggcaagtttccatgccacggttgtttcttccgcatcggcaggacggagtaccagcatggagttatgccccttgtggtttttcagcttttccattaagcggatttgagcttcctgttccaccggttcgtgcgtaggaccgtcttcgcctacgcggaatgcgtcgtgtgtccagatgaattttacgggagtttccatgagggcagccatacgtacggctggtttcatgtagtcggagaatacgaagaatgttccgcaagcggggataacgccgccatgcagcgccataccgatgcagcagcatgccattgtcagttccgatacgcctgcctggaagaatgcaccgctgaaatcgcctttcttgaaggagtgggtctttttcaggaagccgtcggtcttgtcggagttggacaagtcggcggaagccacaatcatgttttccacctgagtggcgagagcgccgagtacggtagccgatgcggcacgtgtagcgacattggctttctgttcgattgcagtccagtccacttcgggagccttgccggagaagaacagttccagtttggctgccttttcgggattggcttttgcccatgcggctttggcggcatatttttctgccatgatgcccttcaattcggcagcgcgtctggcgtaaagctcggctacttccggaaagacagtgaacggattttccgggttaccgcccaggttcttgattgtatttacataagcgtcgccgcccaaaggagcaccgtgtgtagcgcagttggcttcgtagctgctgccgtctgccttgcgtgcacctttacccattacggtgtgaccgataatcagcgtaggacgctcagcttcggttttagcctcgttgagtgcgccgcggatggcatctgcatcgttaccgtcgattgtgatgactttccagccccatgcctcgtatttctttgctgtatcttcgatggttacatctttcgtttcggtggaaagctggatgtcgtttgcatcatagaacatgatgaggttgtccagtcccagcgcaccggcaatacggcctgcaccctgtgagatttcttcctgaatgccaccgtcggagatataggcgtaaatcgtctggttcattacttcttcaaaacgggctttcatgaacttggcggcgatggctgctccaacggcaaaggtatgtccttgtcccaacggaccggaagtgttttcgatgccgcgcatgatgtcgcgttcggggtgtcccggagtggggctgccccattggcggaattctttcagctcatccaatgtgaatttgcctaccaacgccaatgtggaatagagcatcggcgacatgtgtcccgggtcgaggaagaaacggtcgcgaccttcccacgcggggttctcggggtcgtacactaagaactcggagaagagtacattcacaaagtcggcaccacccatagcgccaccggggtgtccggaattggctttttcgaccatagaagcagcaaggatacggatgttgtccgctgcaaggttcataagtttcttgtcgttcatattataaaatatagttatgatttaaatattttattagtaagttgattttctttcctattgattttgatagggacaaagatagctttttatgtgtaaatctacaacatagtacctgtctcttttttttgttcctatcacccgcttcttgttttgactacaataagtctttattgatggtttactgtaactcaacagtaacaattgatttggcggggagttttattttcaggattcctttattgatttttacctctttgaaaggtactaattttactttgtcgggattttcaaaggaattataatccgttacctgtgcagaggtgagcatttctcctgccgcttttgtagcctgtattcccggaagatttacaataacttcctgctcattatctacatcaacattggacaaggaaatatgaattttcccatctttgtttttggatgccgtagcgctgatgaggggcaatgtacgtttgtcgcgtacgcttacttgctgacagcttatttcaaagggaagataggtagcgtcctgatgtaccttgtacatcttgaaaacgtagtaggtaggagtcagtaccatctcttttcctttagtcaggatcatagattgcagaacgttgacaacctgggctatgtttgccattttcaaacggtcggtgtatttgtggaagatgtcgagagacagggaagccacaaaggcgtcacgcatggtattctgttggtagaggtgccctctgactgtaccgggctcttcgtcccaccatgttccccattcatccagcatcagtgctacgttcttgtctttgtcatattcgtccataatggcgcagtgtttgcggattacatcttctatttcacggcatttacccatggtccagtaatagtcatccttgtcgaactgggttgcagagcctttactgccggtccatccgctaacggtgtagtagtggagtgaaactccgttcatgcggctgcccacgcgctccatgaggacttttgtccactcgtagtcataatcgctggcaccgctggctatcttgaacaggcggttgttgtcataattgcggcaataggttgagtaacggcggtaaaggtcggcatagtattcgggacgcatgctgccgccgcaaccccagctttcgttacctacaccgaggtatttgactttccatgccttgtcacgaccgtttttccggcgcagattcgccattggggagtcaccgtcagaggtcatgtattccacccatttggcaagttcctcaacggttccgcttcccacgttgccgctgatgtaaggttcgcaacccaacatttcgcaaaggttgaggaactcgtgtgtgccgaaactgttgtcttcgatagtgccgccccagttgttattcaccattttaggacgattctctttgggaccgataccatccatccagtgatattcatcggcaaaacagccgcccggccagcgaagaacgggaacttggaggtctttcagggcattgaatacgtcggtacggtaacctttgatattgggtatatcggagttctcgcctacccaaaggcctccgtagatacaagtacctagatgttcggcaaactgtccgtaaatttctttgggaataatttgcttgccttgatcggcgtgaagcgtgattgtagcactttgttgtgcagacaaggatacagatgcagctaataggatactgctgaataataacttgtttctcataatgtttattggtaatagatgtttgtaatatgatgtaatttcaattctgcaggcactttaccggaccatacggctattcaagtaggcggatttcatagatagccggggtccattcggtaccgtccggactgaaccgtatcggataattgccggcgcctaacttctgtggcaaaagataacagagtgttacgaaaccttcttgatccgcttcgctgattgtgggggcggcagtcagtttttcattgttgagaaggattacaaccttcatcggatcgttctttcgtgtagtgatcataagccggcttgcttccttgtttgttttcagagtgtagccgaaccagcctttggcgcgtcgaaaatgacggtctctgttggttccggtttccgcctgttcgtaccggatgccatgatcggattccggctgttgttctccggggaaaataatgtctgctgtctggttggcaagttccatggccttgcgctctttctgttccatttcttgacggatgctttctacttcggcttcgctcacctgatggaagtaaatggcataacggaaatcgtgcaggcggaagaacggtatcagtcgcaacgagtctttctgcatggggtagacacttccggtatagttgaatgataactgttcatcatccgttttccgaagttcttgaggcagtgatgcggaagatcctatcaacatcggtgtcttttccaaagagaccagcttgccatgggcaatgtgtccgccacgactatcatcggcatagagcccgttcatgttttccgtaccggtggggctggaaagtacgatgggaccgtacatgaaagcatagaaatgttcttggtcgggtatttgctccaaagtgacctgcattggcaggtttagcgtaatttcgtctccggctttccatttgcggcgaatcgtcaggtattcgcctggttggttatttatatcctgcactttgccattgacggaaacacttgctccttttgcccatgaggggtaacggagtttgagacagagtgcttttttattgcttttttctatccggaatctgatttgctcttcatcgggaaaacggctttcttgtatcagtgtcaatttcttctctttccaggtcaggcgcgagggtatgaataagtttacatacaaggtgtcctctgcatgggcataaatgaactctccgtatttggtgtggttctccagccctgaacctacgcagcaccacatggatgtttccggttgtgaataaacacgatagtgtcctgaacgcataggagtgaagtagacaaaaccgccctttaccggttgttgtgaggcaagaatatggttgtatagggcacgttcgtaataatcggcaaagcggatgtcgggggaagtctggaaaagcatcttcgtcaggcggagcatattgtaagtgttacaggtttccggaccttgtatatcattgagcatggatgtgaaattgtccgcaggatgaaaatgctcacgtacgctgttgccgccgatacagacggaacggtgattgacaactgtattccagaaaaaacgtgcagcctgatcccaagcatcgttttgagtgagatcggcaatacgtttgtaaccgatgactttcggtatttgtgtattggcgtgcatacctgtcagatggtcttcaccggagataaggggttcaagaagtgtcttatgggagaatctgcgtgccagttccagatattttttgttgcctgtgatgctggctacatcggcaaatatttcgttcagtcctccatgttcgctacgtagcatatcctgcatttgctgttcagtgagtcctgacgtgatgcttgccatccaatcggtgagggcaatcagcatttgacgtgcaaggtcacttactgcataaaggtaagcatcgcgaagtccggcataagtcttgtgtatgttgtataagggaacccatttgccgttaaggctgaaactttcggaacggatattcccttcttttatttctttccaaagttgcaggctcccgggtgttcctccgataaatccgttacctaccgcctgttgtgcccggtgtaattcgttcagcatataattcagtcggttgtatacggtcgtgtcgccggtggcggcatacatcatggaaagtgcggaaatgtaatgtccgccgatgtgtccgtccaatcctgtgttttcccagttggtataacttggggctttgggggcaagtccggcttcgcgtaagaaaggggcaagcaaccggtcagggttcatggccatgatataatgcaagtcggtctgctgtgcctgtaaaaaaggactttccaataacttgatgtcttgaagggggaaataggatactgcttgtcttgtttgggcttttccggttaagaaaaagcagaaaagtagtaggcaggtaagtgatgatttcatttgtgtcaggtgtttatagtatgaagaataactttatgtatgtaaatgtagcgggagtaatttcgataccggcgcatctgtgcggcagctttaagctctttccgctacaatcacatgtattattgttcttaagcctttgctttttatttagaatgaacttttttaaggcaaccgacttaatcttatagggattatcttttagatttaacggctgcttcttcaacaggcagattcgccttgtaattttcgatgtatgcgttgaagccttctacatcttcagccgtcggtgatacctcaatgccagcatttcctgcaaatactttttcatccagaaaatcggcaaggttttgttgtttgtcgttgttcacaagatacgagccgagtagggcaataccccatgcgccaccttcaccagctgtttccataacggaaataggcgagtttatggctgcagcaagaattctctggcccacacctttggttctgaataatcctccatgccctgtgattctgtcaactttgattttttcttccttgaacaaaatgtcattaccgattttgagaactccgaccgaagcgtgcagatgagccctcataaagttggcaaggttgaacttgtcattagccgaacgtacaaatagtggacgtccttctgcaagccctgttacgggttcgccggaaatatagttgtatgaaataaggccaccgcaatctgtattgccggtgagtgcatggttatagagcttaccatatatctcatccatatccacaggaatacccagtaattcctgatattctttgaataggttgacccatgcgttgaggtcggaagtgcagttgttgcaatgtaccattgctacgaggcttccgtcaggagtagtcaccatatcaatcatttcgtatggctttgacagctctttttccaaaacaatcatggagaatgaggatgtaccagccgatacgtttccagtgcgttgctttacggcattggttgcaaccatacctgtacctgcatctccttcgggcggacataccggtattcctgctttcaggtggcctgatacgtcaagtcttttggctccttccggcgtgaggaagcctgcattcttacctgccggcaatactttgggaagaatatccagaagtttccagccatagccttttggggcaacgagctcatcgaatttggctaccatttcagccgagtaattcttggtggtaggatctatgggaagcatacctgatgcatcgcctatacccaacactttttggtctgttatctgccaatgtacaaatccggcaagggttgtcaggtagtcaatgtctttaacatgtttctcgttgtccagaatagcttggtataagtgggaaatactccatctcaacggaatgttgtagacaaacaggtcggataaagccgctgctgcctgagcggtattggtgtttctccaagtacggaacggaacgaggatttcttcttttttattgaatgccatatagccatgcatcatggcactgacacctattgcagccagagactctatttctgtatcgtataagttttttacgttcgtacggaggtctgcatagcaatcctgcagcccgtaccagacagcgtcgacactataggtccaaagcccgttgaccagttggttttcccaagtgtggcttccctgagcaatgggtttattttcaggatcaatcaaaacagctttaattcgtgtcgaaccgaattctataccaagaatggcttccccggcttcaattgttgattttggatctgatttcatgtgatttaagtaattataaaggtaaaaaagtggttagctataaatcacgaattactaattacacataccataaaagtaatccgtaattagtaattcgcagttattcttagcaaagcgctttattcagcatatagtatacctcattcatgcgcagttcctttttgaactctctgatggtggtattttcatcgataacaatcatttcgataccggccatttccgcaaagtctccccagtcttctactgtaaggtcgtaggagaagctggtgtggtgtgtaccacctgccaaaatccatgcagctgcacctacttcgaggttaggcatcggaatccataatgcacttgcaactggaagtttcggaagcggtttgctcttgatgcattccactttgtttacaatgaggcggaagcggttgcccaagtctacgatagttgcggctacacctttgccttgtttgctggtgaatacgaggcgtgctgtttcactgtcgataccaatgctcaaacggtgtacttccagtttgggcttctgttcagctatcaacggacagacttccagcatgtgagcttgcagaatggcgctcttttcaccgtcgaagttcagtgtgtaatcttcaaggaaagaacatccgttgggcatgccctgactcatgaaccaagtggtgcggtagagggcggcagtcttccagtcgccttctgctccaaagccatagccttctgccatcagtcgctgagatgccagaccggggatttggtcgaagtcgcccaagtcgttgaaattggtagtgaagcctttagcaccggtgtcttttagcacgcgacggatagcaatttctgcttttgcagagttccatactttggtataagcttccgttccttctttttcgagtgcggcatcatggtcgtaaagtctgaagtattcggctatgagaacttttacatcagcatcgtcaacagcgttatagtaagtcataacatcgttaatggggtagtagtccacatggtagcccaatacttgttcggcgctgaccttgtcaccatctgttacggctacgttgttcatttggtcgccgaaacggatgatgagcatatcttgtgcgtcggcccatgcggcagctacacgcatccatgaagcaatctgcttttgtgctttttcatcttgccagtgtcctacaactactttgcggtttttgcgcatgcgggtaacgatgtgtccgaactcgcgatcgccatgagcagactggttcaggttcatgaagtccatgtccattgtttcccagggaatctctttgttgaattgtgtgtggaaatgcagcaacggctttttcagctcttgcagaccatgaatccacattttggcaggagagaaagtgtgcatccaagtgatgacaccgatacatttttcatcgttgttggcagctttgaaagcggcagttacttctttggaagagtttactgtgcctttatatacaacttttacaggcagacgaccggagtcattcagcccctttaccatttcgttgctgtgtgcgtctactgcgacaactgcatcacctccgtacagaagctgtgctcctgttacgaaccatacttcatattgatcaaatgcgttcatactgttctttattttgattgtttatattttataatcttatactttatgcttgatttcacttctgcccataataagcgttcggaccatgtttacggctgaagtgcttttctataagcagcgggttcatcgtcagttgcggattaaccgcataggctattgaagccattttggctacctgctccattactacggcattgtgcactgcatcgtgtgcatcttttccccaagagaaaggaccatgattcttaaccaatactccgggcgtatgaaccgggttcaatccttcgaaacgcttcacgatgacattgcctgtctccagctcatacgctccctttacctcttcttctgtcatatctgtagtgcagggaatggcatcatggaaatagtcggcatgggtagttcctatattggggatgtcacaaccggcttgcgcccatgcagtggcatacgtagagtgtgtatgaaccacaccgccgatttccggaaacgctttgtaaagcactaagtgggtcggagtgtcggaagagggcttcaggctgccttctacaacattgccgtcaaggtcgaccacaaccatgtcttccgctttcatatcatcatagctaactccactgggcttgataacaaccaatcccgttgtccggtcaatggccgatacatttccccatgtgaagatgacgagtccatgcttcaccaaatcaaggttggcacggaataccttttttctcagttcttctaacataatgtttaatggattaatgtgctaatatgggcacattagcatgttattaaattttaaatttaggtgctttgcgatacgccttttcattgaatttgtagagggcggcaccgcgtttggaacttgttttatcgattttatccgttttttctatgtaatccatttcggctatccttttgcggaagttccgtttatcgatgttttcaccgtaaatggcctcgtataggctctgcagttgtgaaagcgtaaatagttgaggtaacaggttaaaaccgataggctcagtagtagttttttgctgcatcaatgcacgtgctttctctaccattgcagaatgatcgaagataagcgggggcaactcattaatatttacccaaaaagcattgtgttgctgtaccagagccttgtcgtattcattgatgttgactagtgcatagtaggcaatggagataacccgttcacccggatctcggtcgatagctccgaaagaaccgacttgttccatatacacgttgtccagtccggtcagttctgcaagaacccgtttggctgcatcgtctacgctttcgctttcttgaacaaatccgcccatcagtgaccagttgcccattgcaggttcgaagtttcttttcagcaacaacagatttaattcaccctcgttaaaaccgaaaatgatgcagtcgatacctacatagaatttaggattggaactgtagtaactacccatgttttttgtttttataattagaatatcttagtttgatgtacataaaaactatttttcatgcgtataaagattatttttcatgtacatcaaaaaaagttttttttcactatatctgtttttaccagaaataccagtagaaagccgcggtaatagccagaatgattaccgtatggataatatcccagtgattccagctggcacgtgtggcagctttttgctcaggcgtagatgtgccgaataccaaaccttgtattttttcagcacttggggcttcggtcatcagactgactgctattaccactataatacagaataggaacatccagccgcagaagaataaccagttcagatcataaaacagatatttaaacattgagctgtctgtaattgctgtattgctatagtatacttttgcgcccaagcgggtgagaccgataatcataccggcaattaatccccacataccacctttggcagaagtgcgtttccaacagattcccaacagaaatgcagctgcgataccgggagccaatacggattgaacatcttgcagataagtataaagaacatcacctacactacgcataataggaatccacagtatacccagaataacaataaccactgttgcaatctgtccgatgcctaccagtttcttttctggggtttccggtttgaaacgtttgtagaagtcgattgtaaaaagcatggctgaagagttgaacagggaagccagtgaactcatcaatgcagcaagaatgccgcaaacaacaaggccttttactccagcaggaagaagcttggctaccagtgtagggaaagcggcatctgcgtttgcagtaccattggcaagcagaggaaggaaaccttcgccaccggctccgatatatttctgatgcagggcaaaagcaatcatacccggaatcaagaacaggaatacaggcaatagtttcaggtatgcaccgaaaatagtaccacgacgggcttctttttcgtttttaccggaaagtacgcgttgtacaataaattggtcagtacaccaataccagaagccaataatggccgaaccaaccaatgcacccagccatgggaaattgggatcattgttatcgcggataagttgggtcatggtatctccatactcgttgactgtaactgcactgcatatgctcatcatttcatcccaaccgcccaattctttaaaaccgagaacgaggatgataagtgaacccaaaagaaggataggagtttgcagtaccgaggtataaagtacggatttcattccgccaaatattgtgtaaagtgctgtcaatacaactaagccgattgctgcaatccaaaagaaatctattccccacagttctttgataccgaatacctgctgaaatacaagtccaccggcgtatacagttacagctactttggtcagcacgtagctaattaatgaaatgacagaaagaatagtacgcgactgcggattgtaacggcgttccagaaattcgggcattgtgtataccatgcttcgtgaatagaatggtacgaatacccatccgagaatcaagatcatccaaccttgtatttcccagtgcgccattgccataccactggatgctccggcaccggccaatccgattaagtgttccgaaccgatgttggatgcaaatatggatgcacctatggcgagccatgtggcatcacgtccacctaaaaaatagtcagccgaatcattctgcttttgtttgactacccaaacaataatacctatcagagccaggaagaatattccaatgactacccaatctaatgttcccacgataataatgatttaaaagttattatttatttttctactgagaatttgaaaatacatttgctgttgtaagtctgtcccggttccagaataacagaaggccattgtggcttattggggctatctggataatgttgagtttccagacatacggaagcgcgttggttgtagacgatcccttttttcccttttgcagttccgtccagaaaattccctgtatatacctgtataccaggctcattagtgtatacttctaagctgatgccgctttcgggagaagtgagtttggcggcaagttttttaatatcgccattggtgttcaatacccaattatggtcgtatccgttaccatatttcaattgtatgaaatcaaaattggtaatatcctggcctacggctttgggagtagtaaaatccatgggagtatcttttaccggtacaatttctccggtagtcatataagtttggtctacaggagtgtaattatcagcattgatatatagtatgtggtctgtggctgctttagacggattgccggatagattgaagtaggaatggttggtcatgttgataactgtttttttatcagtagttgcgctatatttgatatctatggcgttatcgtctgtcagcttgaaaagaactttggcagttaagttgcccggaaaatttgcgtctccgtctggagagaagcgggtcagctccaaagtggtttcatcaatggggttggcttcatatacctgatattgccatcctttaggaccaccgtgcaggcaatgtccgaaattgttctttggtaattggatcgtgtcactatccaataccattttgccctggttgattctgttggcgtaacgtccgatagacgcaccgaaatcgcttgggacgtttatgtagtcggctatactgtcgaagccaaggacaacatctttcatttccccgtttttgtcaggtaccataatagatacgatacgtccgccgaagttagtgatgcatacttccatgcccgctttattctttaatgtataaagatctgtctgggcatcgttcactacagtttgaaattttgtcgggttaaggccggaaagagtaagttccgtttgatttttctgagcgcaggaagctaacattaatgtagctattccggcaataagaatgtgattcttcatggtgttatttaatttgaaaattagattattatcttatttcgggtgtaaaagtaacacttttgtttggtgtaatatatacacttttgtatgttatgtaacataaaagaaaaaaaacagctttgaaatttgtatatcccaaagctgtttcaatgtctgaaagaatacttattttacttttttaccccaatatgtcttatggttacttccgtaagcggcatagacgatggtcggtgttctgggactggcttcccagtcaacttcccgttgcaggtaaagatctgttccatttgctgtcagaatttgctgttctgcatcatagctccatctgccgcctttccatgttccttcagtaatggtgtggtcggcggccagcgtcatgattgcagattctttttgaaccccataagcgtaggacaagtcaatatgttcccaatttccgatgagttcttcttcggtaatggctacttggggtacggctccgtagcgttcgggcataaccaagggccaaccgtctttagtccaacggatgttgcgtacatgtcctaacataatagcgttgtccacgcttttggggagacgtgcttgcgaagagtaataccaattaccattgccatcgttgaagatggtgcaatgtgagaagcctacccagccattgctcttgctgaatttgtacgggtgtgtcactaccggcaacatttctgctccttcggtaacattggcgccatcgatgccgagataaggaccggtgatacttttagaacggcatacgcgtgtattgtaaggtatgtccaatgcatcgtatgccacgaatagatagtagtagcctgtctctgtgttgtaaatgatttcaggaccttcactggcttgccaacggttgttgatattacgggtggctatcaactgcccgtattctgccggagcatttccttctgcccaggggatacctaagtcttgtttcggcattccggtttcggcattcaattccatagcaacaatgccgctatgccatgaaccgtatatcagccagtgggtattttcaggagtaatgatgtaagaagggtcgatagcattccatttgtaatagcaattggcatattgggtgctggggatgttgaagttcagtcccttgtccgatgcattggtcactacatatcctttgtccacccaatcgctgttgttggcaggattgctattctccatcaggccgataaaagcacgttcactccaggcggtcgctccggttccgccgtccagatagccgggtactacgatggagtagtacatgcgatacagtccgtttctaactttctgcacacttggggcccagtaaccgaagtcgctttctgcggcagtgcttgctgtcaatcccatcgctttgcgtatctcattcagcttcggcatcacccagtcgggaagcttcggcatagtcccgcctagatattcccaattcacgaggtctttggaacgtctggcgtggaagtgtccgtgtcctgtatgtgcattgccgtaggaggcatctgtctgatacatatagtagtatccgtcttcggcaagcacaacgctgggatcgtgcacgtttgccaagttccattgagtacgattggaccagcttgcaatgcccgcataattatcttcgtattccggagccacataattctttaattgttcattaaggtctgtgatttctatggtcgacgtgaatgtttccgagtaagtgtaccggctgttaccataaacgtatgcacgtatatagtaaggagtattgattttcaatccagagagggtggcactgaaattttcatctgcttctatcaccttgtctttgatagtaggatttgagacatttacactatagcaaaatcctctcttgactacgctgcttagattgccggtgattgatgatttaacgttcagtgaggtacccgttgcggttgcttcgggagtggttaaaactacatcactgtttctgttgtattcgatgttgtcaagcccgtcagaacaagcagtgaaaacgaatacagtcagtagggatagtaagaaaaatgttgtttttttcatttgggtaagtttttaagatccatattgttccgttgatagacaggaacaatatggatgataaagaatttaatagttattcttattcattgaagacgaggtggcaaccgtcaacagacagtgcaaagtttaagtcgtttgcatctatggtgttgatgccccaatagtattgggtggagattgtacttgtagtacctatcattactgcctgaatgtcggcggtaccattaccgcaattagtcacgtagactgtaactttggatccattcattccggcaagccaagtgctccagtcaccttgtgttccgttatgaacgcaggcatcatatccatcgccccagccaaagttatcggcacggaccactgcgtagtgggtaccattattcttacggagaactacaaggaaattgttccaattccctgccagattgctgtaattagtaaacgaaatacactttgtctgacctgaaggtatattgaaattatctgagtaggtctcggggttaaaccacagagttgagttgtctgtatttcctagctgtccgcttgtattcttcactacagtagcttcggagacggtgacatttaccgttgcggtgatgttttctccggcggtaacgataaccggctgcgaaccagcctttgcaggaatggcggagaagctgagttttgcgttgtcaatgactgccaaactcccgtcagagtaggttcccataactaccatgcctgttgggtcgaaaggcatcatgcaactcttggcttcttccgaggtgtagtaatagggctttgtacgcgagggtgcagtggttattgaaattgattgaagtactcccacaaccttaaaagatgcgttagccacaatcggtttatcacagtttttgcccttgaaggttttgttgtagacagctacaagagtcttatctcccgtttgatttatatcaggaatggctgagaatgagagttcggaggctgttacggttttagtcactccctcttcaaaggttacaatggctgagatgttagttatggcctcttcaagtgaagtacccaaagaaatttgtgtgggtacatcctgcaatatcattgatatcggattcttgtctgcggcagatgtgagtccaccgacaggaacgatgttggtttgcagaaagtctatgtaagagccttcggggactaagaagcagcgaatgttggtgttgcttgcatctgcgttcaggttgggttctttattcggttgtgcataggtcttagtagccactccgttggtcatcttgacagtgaaagcatttttgctggtacggtctacggtgagcgttactttgccacctaacttttgtacgttctcgtctttgttatcaacgggatcaagaagcaaggtgcccgatatgtactggaagtcaatataatcgccccactgagagttataagtttcagggctatttgtaacatcaaagcggatagctccgtattcggtatattcttcactgtcacgatccacatcattggtgatgataagggcaaagttcttgtaatatgtattatcgacagggttgatgttaagattgaatactgcattccatttctcaccgtcaggtaccacataatacttggaaaaagcagtccagaaaccggaggtgaaatccgtattcccgatggtgtatacatcttcctgcataccttcaagtatttcatcttccggttctttcttggagtcttctatttcctgtattttatcagaaatccattcgggagcatttacgtcatagagttcgcctccttcgcagcttgccaggaccaacatccacaaggttgctgcacaacagaagaatgttattttatagaaatgtttcattttctttattttttaataggtaatggtttgaaacgttccccgcctgttccggttgaacccgtagggctgagggaagtgtgtttctaagtttatttacttgcttaactctacgactggacgtactttccatttgttttcccggaagtaaatggaattatctgtactgtaattggctgagtttcctgtcaggttcggattgttgttcatcaactgctgtacgataggcagaaactcatgtccaggtctgtaagtatcgaaagtgctcttcagttcggagtcgcttgctatatcgctgtacttcacaggatcctttactccatttatggagcggcgcactgtgccatgttcttttagttgttgcaggcgtccgttgtcatagaagaatccccagcggatgaggtcgaagcctcgtccgaattcgcatccgaattctttaggacgttccacgttggctatctgttcaaagagcttgtcggcagaattgaagtcttcgagcttcagatctaccagattggcgcggttacgcacttcattaatccagtcgatagcttgctgtgtaggaccgttgacttcgttctcgcactcggcagcgcgtagcagtacatcggagtagcgcatcagccgcaggttgatgccatcgtgcaagcccgtaactacagtgctatataatccggtgcggagattcgtgaatttggcaatcggcagacctccgaaagtgttgttggtcacgatattatcagtggctttaagtatacttgtataagccacgttgccatattcgaagttttcccaatcggtttcataagtcccaatggtccaatagagtctggggtcgagtttcccactggtggtacgctcttctttaaaaagctggtaaagccagggcgaagccgagatgtcggcccatccgccgtaggcacctggagcgaagttgctctcaacggccgagccttgtgtggcattggggcttgtgtttactggtgtccattcatcgtcggtgccttgcgctccatagtcgaggaattgtacttcgaagaggctctctgcgttgttctcgtatgccgaaccttcacggaagttatctccgtagttgtccatcagtttataagtgccatactttttggcgatgatatctttcaataccggaagtgcttcgctgtatttttgacgcatcatgagggcgcgggcataatagccagccgcagcaccgcaggtggcacgtccaccactccattcactgccttcatcacgggagggaagcaattccattgcttccagaaagtctttttccacttggtcgagcactgcatcataggtgctgttggcgccataaagtccgtttaacgaagagtaggtagcataatccgtaatgagaggtggattctgataatagcccactaagttgtagtaggatagagcgcgaaggaaaagcgcctgtcctttgatacgtttcattttttcggtaagttggctgttatcttcaccgcagcgtgaaatggtgaaattgcacacattgatagtatagtaccactcacgccagggccaccatgtaacgtctgaagtgacttcagcattaagatcatcaaaaggcagataccacacttgtgaagagttccaggcttcatcgccacgacatacatcgatggtgtagcctacacgagcataagaaccttccatgcggatgtggttgtaggcggcaatcacacattcctccaagtcatcaggattaaagccgaatgtacttgaggtttgctggttgggattcaacagttctaatctgtcgttgcaggaagtcaacatgccaaatcccaaaatgagagcaagtgaatatttatttagtttcataagatctgtttttaatttaggtactagaaaggtaaagattagaatgtaaaatgaacaccacacatgaaagtacgtgcagtaggataagaacagaaattgtatcccggagtgaaagttcctcctgcataatccacattgtaaccatgatagccggtaaatgtgtggagattctgtgccgatatgtagaaacgtacatcggatacatatttgtcgaaccacttatccgggaagttgtagcccaattctacattggctattttccaataggctgcattctgaatcttgcgtgaactgaagaggtcgttccaacccaagctggcactgttggtaacataggtgcgtggcacgttggaaaggtaagtgctgccgtcttcgctaaagcggttggcatcgagcatacccacttctttgtttccccagccatagcaagagttgagtgagttgtagatgtcgtcgctaacgtgatagttcagtgcgccgaacgttgcgatgctcaggtcaaagcgcttgtattcaaaacgggcattaaggccgaaattgatttttggcatgccgctgcccaataccacttgatcttcggagtctactttaccgtcattgtttacgtctttatagaggcagtcgccaatttgggcgccttcttgtgtggcgtggttgtcaagaacttcttgcgtgcgggcgataccttcataaacccaaccgtagaactgaccgatttcttcgcctactttagtgatgtaagaacctgagatataagaatcggtaccgaaacctaatgaggttacgcggttgcgtaatgtgctaaggttggccgatacttcatatttgaagtcatggtcgcggttacggtaggtagcggagaactcaaaaccggagttgttcatcgaagcggcattcatcgttacggtggtattggacactccggcttgttccggaacaggaacagcatacagaaggtcttcgctggtattcttgtaccactcagctgtaaactccaaacgattgcggaacaaagcaagatcaatacccacattgtaggtcttctttttctcccatgcaaggttattgtccacgaaagtggaaacggcagaaccggtcactacgttaccgttgaaattgtaagtcatattattgcgtgacatgacggcctgatacatgtactcaccgatgttctcattaccaagctcgccatagcttgcacgaactttgaacatgttcacgacgtccggattgaaagggaagaagctttctttgtcgaagcgccagcccacagagacggaagggaaagttccccaacggatacttctggtcaggcgtgagctgccatcccggcgtactgttgccgataataaatacctgtcatcgtagttgtaattgatacgaccgatgtaggacaagatagcatgcttgtattcgtaactttcggaatacgtgttggcggcattctgaagttgtaggaaataaggttcggtgaagttgattccccatccggtcagcaggtcggtgttttcttcttcgtaagtctgacctgccactacgttgatgtggtgtttgcctatcgtaccatcgtaagtaagcacattctctatcaaggcgtccgaataaatacgggaacccttggtcaaccgttcattactcttggacagatagacgcggttactctgcacccatgccggaatccaagtgaagtccttgcagaaggttttgctgtaagagaggtttattttatagttgagtttgtggtttttgctgttgaagccgaacatattgaagatgtctacgtctgccgagcctgttcccacgaaacggtccacacgtgtgttgcgttgcagcaggttgtttaccagtaatggattggaagcggagatatcaccatgtatggtatcgtagtatacgccatagccgtaagcatcataattgaagttgttggcaattcccaccaaattgtcgagcacccatgttgaagaatcgtatgccttgatggtgggctgcatcagtaaggttccgcgcagaatgttggttacgtcgccatacagaccttgaacgtattcggaagcattggacaggcccatgttatcttggtcggagtgggagtaaacaaggctggtctggaactttatgaacttggtgtccatactgttgttgacacgtgcggtgtaacgttcgtagttaggaccggcaccttcgagtgttcctttttggttgaaatagtctaatgctatattataggtgttgtgagcaccacctccggaaaggtttacattatggttttgacggatacctactttgaatacttcgtcgaaccaattggtattggtgtcatcttggaaatggtatttcccggtttcgctgttgagcttgtatcccgatggcagtggagtgttggagtttacacaagcctgaccgatgtattggctgtattggtcggcatccattacatcatagactcccttaggaatataatccataccgaaatatccattgtagtccactttcagcggttgatctttttgtccgcgtttggtggtgatgataatcacaccgttggcagcacgtgaaccgtagatggcggcagccgaagcatccttcaatacctggatggtttcaatatcgttggaagagaaatcgcggatggaagttcccatgggaacgccgtcaatgacatagaggggagaagtactgccgaaagatcctacaccgcgaatacgtacggtaggatcggcacctggttgtccgtcggaggtaacttgtacgccggaaaccttgccttcaagcatggtggagatgttggagtttgatgtctgtttcaaagcttctgcatctactacggcaacagaaccggttaagtcggatttcttttgtgtaccataacctacaacaaccacttgttccagcatttggtcatcagcttgtaattgtatggtatcaataatagcgcggttgcgaactgctacttcgcgttccttgaaacccacatagcttatcaaaaggatagcgtttccgggaacttccaactggaagttcccatccagatcggtaatggttccgccttgtccgcctttaactctgacggtagttcctggcataggttcaccttgttcgtcaacaatctgaccacgaaccttgatagtcggagattgtgtcacagtagccatggcagatgtaggatacaccgtcatgctactaaaggcacacagaccaagcattacggaaagaaataaatgtttcctcatttttaaaagaattaagattattaaattaatagattagatcaccgttaactatattataatattatattagtcaatatacgatcctatattgaccgccgggagagtcaggtaacagacttcacaaaactgggggaggttgaatttagccaatgccatctatgatagacagctgttctcttgtcgttcttcatattattaatattaaaattagatttccaatcattgcttttccttgagagatttcctgaagaaataagcaatgattgtatggcaaaagtagggcttatggtgtaaatgggggtggacaaatgggttttagaggtggataaacgaattttaagtgtagagaatccagcttattatgtaggtttattgtttattgctgtaagtaaggctcttctctttcattaagcagtgaactcggtgtcgtattgaagtatttggtgaagcatctcgtgaagtatttagggtcattaaatcctacttcataagcaatttctgcaatgctcatacttttattctcccggtttttcagtactagttcgcgggcaatgttcaggcggtagttgcgtatgaattgtccggcggactgcccaacaagactttgtagctttttgttcaacaggcttttgctcacacctgccgtttcgcagaaatcgctcacctcgaaataggagtttttgtagttctccttaatgacattcatgatgcggttgaggaacttcttatcgcccgattcctcttccatattcaaggcatccacatccatggctatggcaaacttcttttgataacgtttacggttctcaaggatattctcgatgcgggtaagcagtaatgtctcgtcaaaaggtttcagtaaatattcgtcaactcctatgcggtagctttccaggcgtgattcctgcgatgtcttggctgtcagcataaggaaagggatatgggagatagcgaaattctcttttacccggcgggacagttcaatgccgtccattacgggcatcatcaggtcgctgatgataaagtctaccgaatgtgagtttaatatattcaaggcctctgctccatgggcagcttcgaacacattgtatttatcccgtaggatggaacggatatatccacgcatatccgcgttgtcctcgaccaccaggattgataaaccttttccgaaagtattggatgggggtagcgcatcggaagtcataagttgcggggcactttcgaccagtgtttccaccgtattgctttccggtgttgttggcaggaggatgcgtagcgagcagcctatcgtatggttgttttgcgcatggatttcacccccatgcatctgtacgatgcgtttacacaagtaaagtccgatgccgcttccagcctgtccgtacataggatatttggtttgtccttgcgactggtagaaacggttgaatattttgattgtgtcatcatcaggaataccgctacctgtgtcgctgacacagatgtaaagcatggatttgcggttatcggcaggaggtagcagggctatgaacaaagacacacttccgccgtttggcgtaaatttaatggcattgctcagcaggttcgtcagcactttgtgcatcgcttcttcatcgtaagagatttccggtgaaggcatccggaaataacgtttcactgtgatgtctctttctttggcaaagacttcaaaaggtatgatcagttcattggcaaatttcagaaaattattccgggattttacgatttccaatttgcccgactccaccttacggaaatccataagctggttgacaagcgataacaggtatttagaattgcgttccacgaaatgtagctgttcgatgacttgagggttgtagcttaactttaatgcacgctctatcggtcctatgatcagtgtgattggggtgcggaattcgtgtgtgatattggtgaagaatgctatcttatccaaggtcagctcttgtatcttacgtgtcattttagtaagctgcgctttctgccgggtaattttttcgttttgttgcttcaacatccggttctgacgggacaactcttcggtctgttcttccagtagttgtttctgctttttcagttcatgggtgcgttgttccaccttttggtgtaatcttgctttttgctctttcaggcttcgtatgcgccattggtagaattgccatgtagcgaatgtggcaaggattattacaagcagtataaaccaggttgtcttgtaaaaatagggctggattgttatttgcagttccgttatattatcctcttcggttggggtgtagggcgtgtacttcacttgcagcgtatagtttcccggagacagattggtgtaagtagcaaaacgccggctggcaggcacgtgtatccaacggttgtcaaaacccagtaggcgataactgtaagtggcggtattgtcggactcgtagttgagtgcggtaaattccagtgaaaaagatttttcacgttcgtggatgcggatagccttactgacggcaatatcaagcggcaagtattcgttgccggggaatatttcctcgtttcctactttcaaatgggtgaaccgtactttggaagactgggttgtaagggcaggcaggttgcaatctatggcaaccagcccggatacggtgccgagataaagcttgctgtattgtgaacggtgagcagcattccagtaaaactgggtatcggcaagaccgtcttgccggttgtagttgataaagtggttttctgtgggttgaaagcgcgacagcccattgttggttgctatccagatacatcctttatcatcttccaggatactgcggatactgttgtctggcaggccatgaagggagttgtaacagacaaactgttcttttccatcttcgttctgcatacgtttataaatgccataaccgttgctgcccaaccacagtgtgccgtcctgagtttcgtaaaagcaacatatcttttctatcagtccggaagacggatcatccagtttgtacttcagatgacggtaacggaatgttccctcaggcaatgagacggaagcgggggagtgcaggtcgatgatataaacgccgtccagacatcccatccataattgcccgtctttgtctatgatagagccgatgcaacctcgtatgtcttcggcggcacgcttggcaaatggtgaacaaagctgtttatgcgctaggtcatagaagaataatccctggtttgctccgatccacataccgttgtttatggagtcgtaggccaaagctccgataaagtctatggggtagttgtctttattccgggctgtgattgcttctattctatgctgtgggttttgtgggttgataaggttgatgccgccgccccatgtaccaatccacaatcttccttgcccgtcggcggtgatggcgctaacagagttgtgggtaagagtgccgctttcgtatgtataatggatgaagctgtcgcttcctactgcctttttattcagccccccttctacggtgcctacccataagtttccgctattatcttcgtaaacggcgttcaccggattgtgagagattgtttggagattcttgttatcatgctgataattttgtatggacagacgcttggcggtcattttattgataccaccactttcggttcctacccagatatgctgcccttctacgatgatgcagttgataaaattgctgttcagtagcttgctgcctgtgttggatgcctggtcacttatgcgttcaaaattgtcctttatgggattgtatatgttgatgcctttcaggctggcaaccagtaattgtttgtcgttggttatggcgagacaggtcaggaaattttgtgagagggaatgaggattgtcaggggtatgcatatattgtttcactataccttcgtttttattatatcggtacaaacctttgtcggtggcgatccatacttcattttctttggctatgaagtctgtaaaatatagatccggtgcaaaactcaggcaatcgtcgattaaggttgcctctagtttgctttgtgcagtgatacctattttgtatagtgcgccattgatacctatccatacttttccctcattttccacgtccttaaagatgatatcgtatcggtaaggattaggaatctctagtgaatgaatactctctatatctccattagtgcggaaagcaatacggtgcaggctattgctgcaatacagccaaatacatccattggcatcttgtgtaaccatgaatgccggttgcttaatgagtgtctctagtttctttcggggatcatgaggcaatacggactgcatggttgttaggtcgataatatcagtgcccccttctgatacaacccaaagccgctgaaagttgtcttcgtagactttgcgtatgaagttgctcttgagccggcaatgtggggtagccggagtgaagttgacgaattcatagccgtcgtatcgggatagtccacctcccgacatggaaatccaaaggaagccttgccggtctttgtagatatcatcaacaaaattattgggaagcccctcattcatggttatgtagattgtgttataccggttggtaaaagactcctgagcccacaaaatagcggggcttgccaaagcgatatataatataataatacgaaaaaacttatgcattgtttcatcatttggtattagcacaagcaaagttaatgtattacttgtgatgatataaaaagtctgcggtcttttttgtgaagttggaagattgtccaccttaaaaggtcatatatccacctctactgttttgggtatggcgtacatttgcattgtatttttaatttgctgatattatgagaaaaatgttatgtgtggtcgtcacgtctatgggaattctgtttgctaattgtaattctccggtttttactcccatagcttcgcctaatccctggcaggatgactactcttttttgtcctctatggacaactaccgcttgtggggaacttacaatgtgcatgatccgtcttgtcgtaaattgggtgattattattatatgtactctaccgatgccattttaggtgagaaccgtcaagaagccgaagaaaaaaatgttccgttgggatacatacaagtgcgccgttccaaggaccttgtcaaatgggagtttgttggctgggcttttccggaaataccgcaggaagctgtggagtgggtacgttcgcatgccggaggtgagggagcaacgaacatctgggctccttatataatcccttttggtgataaatacagactctactattgcgtatcggcttttggccgcaagacatcgtatataggtatggcagaggctgcatcacccgaaggcccttggacacaacgaggttgtgttgtcaagaccaatgaggcttcggtaatgaatgcaattgatccgagcgtcatggccgatcctgtcaccggaaagtggtggatgcattatggatcattctttggaggattgtactgcgtagagttggatccggaaaccggacttcccgccgaggagggagatcaggggcatctcaccgcacgccgcgccaattatcagaaagataatctggaagctcccgagattatttacaatcctgatctgaaacagtattatttgtttgtttcatacgatccgctgatgaccacctataacgtacgggtagggcgttcggacaaagcggaaggcccgtttgttgatttctccggcgtggaactgaaagacactactaataattttcctattctgacagctccataccgttttcataatcatccgggttgggcagggactgcacactgcagtgtattcacctcggatgaagggcaatactttatggcacatcagggacgcctgtcaccccataaccaaatgatggatcttcatctgagacaggtcttttttacgcccgacggatggccggtggtgtcgcccgaacgttatacaggctgtgtttcccgtaaattctcggcagaagatatggcaggagagtgggaagttatacgcatacaggaacctgcgtatgaacgccgtttgcaggcaggccagatcctatggggggagggacagctcaaagaagaggagtggaacgtgtctcatttgctgtccttggagaagaacggaaatttaggtgagaataaaggtacctgggaacttttggaagcaaagcaattattgtccctgaccctggaaggtgaaattataaataatctgattatatttgccggacacgattgggaaaacgaaaaggaaactgttcttttcacaggactggacagttgtggcaggtctatatggggaaagcgaattaagtaatcatatatacattttataccatgaaaaaatacaaaggtttattggcggtgctggctcttgcggcaggttcggcactgcaagcacaaacaaatgaattggtgatacaagccgggaaaccgggagcggaaattcagcctactatgtatggtctgtttttcgaagatatcaattatgctgccgacggcggtctgtatgccgaacttgtgaagaaccgttcatttgaatttccgcaacattttatggggtggaagacattcggtaaggtatctttgaaagatgacggtccttttgaaagaaacccgcattatgtgcgtttggcgtatgccggacatccgcataaacagaccggattagacaatgaaggctttttcggtattggaataaaaaaaggcgcagagtatcgtttctctgtatgggcacgtgtggcagaaggggaaacacccgctaaaatctgtgtggagctggccgatacgaaatctatgaacgaacagcaggcttttgtagctgccgatgtaacggtcgattcaaaggaatggaaaaaatatcaggtgatactaaagccggaagtgaccaatccgaaagctattcttcgtattttccttgcttcccggcaaacggtggatttggaacatatttcccttttcccggtagatacctggcaaggacatgaaaacgggcttcgtaaagatttggtgcaggcactggcagatataaagccgggtgtattccgttttcccggcggatgtattgtagaaggtactgatatcgcatcacgctacgactggaaaaagtcggtaggtatggtagagaaccgtccgctgaatgaaaatcgttggcaatatactttcccgcatcggttctttcccgattattaccaaagttatggtttgggattttatgagttcttccagctttccgaagaaatcggtgcggaaccgttgccggtattgagttgcggtttggcttgtcagtttcaaaacccaaatatggatgcgcatgtgcctctttgtgacctggagagttatattcaggatgcgctcgatctgatagaatttgcaaatggtgcagttgatactccctggggaaagatacgtgccgatatgggacatcctgcaccattcaatttgaaacttataggtataggtaacgagcagtggggaaaggaatatccagaacatctggtaccctttgtcaaagccattcgcaagaaataccccgacataaagattgtgggtagttccggtcctgattcggaaggtgagcagtttgattatctctggccggaaatgaaaagtctgaaagccgatttggtggacgaacatttctatcgtcccgaagcatggttcctaagccagggagcgcgttatgacaattacgaccgtaaaggcccgaaagtttttgccggagaatatgcctgtcatggcaaaggaaagaagtggaaccatttccatgcttcactactcgaggcagcctttatgaccggactggagcggaatgcggatattgtgcatatggctacctatgcaccgttatttgctcatgtagaaggttggcagtggcgtccggacatgatatggtttgataacttgaattcagtgtgtacagtgagctattatgtgcagcagcttttcgcaacgcataagggaacgaacgttctttctctgactatgaataaaaagcctgtaacgggtgccgaggggcagaacgggttatttgcgagtgctgtatgtgacaaaaataagaatgagatcattgtgaaagtggtcaatacctcaggcaaaaagcagtctttgtctttgatttttaacggattgaaaaagaaagaagttctgtcgggagcacgttgtatcaaactctcttccactggtatggataaggataatactattgaaaatccattggcaattattccgcaagaaacatctttggatgtgaatgggcataccttgaacgtagatttggagcctgttactttcgcagtatatattttgaagtattgatgtcttgaactcaaagggaatatcatgatgaaaaatatatttattttgggggttagttctttgatgctggcagttccgcaagggctgctggcacaaagtgacactacttttgttgctgtgggaaatccgatagtaaagcataagtttattgcagatccggcagcgatggtacatgatggaaaaatgtatatttatggtggtcatgatgagtgtcctccaccgaaagagcattatgacttaaaagaatggtgtgtcttttcctcttccgatttgaaaatgtggacagaacatgccgtccctctaaaggctaaggacttttcttgggcaaaaggcgaggcttgggcaagtcaggtaatagaacatgaaggcaaattctattggtacgtaacggtggagcatgagacgattcccggtaagtccatcggtgtagccgtatccgattcaccgacaggtccatttgtagatgcccgtggttccgccctcattaccaacgatatgacagcagaccgcagcaaaagttattgggatgatatagatcccactgtttttattgacgatgatgggcaggcatatctttattggggcaacagtcaatgctatttcgccaaactgaagaagaatatgatagaattggacgggccgattattccggttgatttgccttgcttcacagaagctccctggattcataaaagaggcgattggtattacctttcttatgcttccgaatttccggagaagatatgttatgccatgagtcgcagtataacgggtccttgggaatacaaagggattttaaatgaattggctggaaatagcaatacgaatcatcaggctattatagagtttaagggtaattggtattttatctatcataatggtggcattaatcctacaggaggaagttttcgccgttcggtctgtatagagcgtttgtattataatgaagatggaacgatgaagcgtatacaaatgacgacagaaggtatttattaggaaaaaagtgataggccgattaaaagtaacaaacaatagggtgatattgtgaagaaccactttatcaccctattgtttttatcatgtgtttacttattctagtcttcgtgcaccatcgctgattacgacatcgtaaatttttggacttctgttgaatttcttcttaaattcctctttggctttttctatgaatgtgttatataattcctcttttacgaggttgattgtacaaccgccgaatccgccacccattacgcgagagccagttacaccgcagtcaaaagcaaggtcgttcaggaagtcgagttcttcgcagcttacttcatacagtttgctcatgccctggtgtgtttcgtacatcttttggcctaccgtttcgtaatcgcctttctccaaagcatcgcaaacatcgagtacgcgttggatttcttcaatcacatattctgcacgcataaagtcttctgcactgatttcggctttggcttcttcaagcatttccatgttgcagtcgcgcaggaattctacatgcggatgtttcttctggatagcggcaacagcagcctcgcaactttggcgacgtttattgtatgccgacgaagcaagttcgtgttttaccacagaatctaccagtaccagacggtagcctttcggctcgaacgggaagtactggtattccaatgaacggcaatccaaacggatgagactacctttcttgccaaatacggaagcaaattggtccatgataccgcagttgacgccacaatagttgtgttccgtagcctggccaactttggccaattcgaatttgtcgattttattgtcaccaaacaaatcgttcaacgcataagcataagtgctttccaaggctgcggaagaggacattcctgcacccagaggcacatcgcctgcaaaagccgtattgaatccttttacttctacaccgcgtttaatcatttcgcggcatacgccgaaaatatatcttgcccagctggcgcggggagcgtcttcttcattaagaccgaattctacataatctttcaaatcaatggaataagctttgactgtgtttgttccattcggttttacttctgcaatcatgcctttatcgattgctccggggaatacaaaaccaccgttgtagtcagtatgttcgccgataaggttgattcgtcccggggaagcataaacagctcctgttgttccgtcaaaatgcttgatgaaacggcttcttacgtattctatatccatgatattatttttttaaggtgaataaatctattacctatattgttagttctgtctgtcaatcgactttaatgtctttatttacgtttttgcaaccaatcagtccatagaacaacagatatgcaagagctgcaatgatcacccaatagcttgccatgaaacctgccatgtctgcaacaactccttgaataacgggaagaataccaccgccacatactaaaaccatgaacaaaccggaagcggctgccaaatatttacccaaaccttctactgccagattgaagataccaccccacataatagaggtacacagaccaactaatacgagatacatagcattgatgggtacttctgcaagtccgaaagataagccgccagtggcactctgctgaagcacaggcagatttacgaaagaattggtagaggagaaaatagcgaggaataccagcaacagacccaaagctgaagtgaatgtaagcattgtcttgctggatactttagcacctaatgatgcacctgccagacgacctatcagcatgaggaaccaataagtacctactacaaatccagaaatggtggatgcaataccggcaccgcctttttccacagggtcagtcaggaataggtttagtgtacccggtacgccaacctcaatacctacatatacaaagattgcaatagctcccaagatgaaatggcggaattttaaagcgccggacatcagtttgccgatcggttccgttgctgtagcagcattaggttccggtataggaacgaacaacagtacgaggaatgcaagtgcaaatacggccatcgctgtgtacattacagggaatatctgagagatggtagccttttcaatagagcctgcaatgaggatacctacgaacatcggagtaatagttgccattacggagttgaaagaaccgccgatctggattaactggttacctttgttcccttcaccgcccaacttgttcagcatcgggtttacgaccgtattcagcaagcacatagagaatcctgcgataaatgcaccgaacagatatacggcaaatgctatttcagggttggaatgtccggataagaactggatacctactcctataaagccgatagctactgcgataagcgctgtttttttatatcctactttctgcaatagaataccacttggtattcccattactgcataagcaatgaagttgccgaaattgcccaacattcctaaggcattggatacggaaaactgatttttgagtacaattcccataggagcagccaggttggtaacaaatgagatcataccaaaaaggaaaatcatcgttatgattgcgatgagtttaccattctgtttttgttgtgtcatggttaataattgtttattaagtttataatcaggttagttatttcttttattcttgtacaccgaacttatagatggttatctgctgatattcatctccggggagcaatactgccgatgggaaatgtgccttattgggagtatcggggaagcattgtgcttcaaagcatacagcgcttcttgcggggaatgttgccccgtgagcaccggtgaatcctcccagccagtttcccgtataaagttgcaggccgttttctgtagtatatacttccattgtgcgcccgcttacgggttctgtacaagtggcggcaaggctcagttcaccgctttccgctttattcaacacatagcaatggtcatatccggctccgtttaccagttgctggaatttatcgtcaatacgctcgccgatggcatggggagtacggaaatccataggtgtattttctactttcaggatttctcccgtaggaatagatacctcatcaataggtacatagaaatcggcgttgatggtaaggatattattcagaacagtaggtgaggggttggaaataccagcgagattaaagaaaccgtgattggttaaatttacaactgtagctttatcggttgtggcccggtattctataaccaaggcatttgcttcatcttccagacgatatgtcatttctatttctaaagtaccggggaagccctcttcaccgtcggcagacgtataattgaaaatgacggtcgattcattgggctgaaccgcatcccatacgcgggcatggaaaccggttggtccgccgtgcagtgaattgggaccgttgttgacagtcaattggtgttcctcgccatataaagtgaatttcccattggcaattcggtttccataacggcctatcgtggtgctcaagaaaggttcgggactgtttattacgtgttctatgctgtcatgtcctaaaatgacattggcaaattttccgtttttgtcgggcaccataatcgaaagaattgcacaaccgtagttggttaccgccacttccatgccctgagcatttttgaggatatataaatctgttttcctgctgtttatattcttttgaaagtcttttctgtccaaaccggacaagttactttctgtcggagttgtgtctgtcatattcatggtattatttaaattttcttgcaaataaagagaaattcttttgttcccccaagtaattgagaggaaatatggggaacattttatgaaagtttagcgtttgacaattagaatacaaattgatattttttgtatgtttgtcgcgttaatctaaaaagtattgtaacagtattgaattgtactaattaaaaacaacaaatgtatcctctaaaatttgagcccatcctgaaacagacactttggggtggcgacaagattatcccattcaaacacttgaatgaaactctgccgaatgtaggtgagagttgggaagtttcagcagtagaaggtagtgaatctgtagttgccaatggtgcggacaaagggtatactttacccgaaatggttcgtaaatataaagaagagttggtgggcgaagcgaactatgcacggtttggaaataaattcccgctactgataaagtttattgatgcaaagctggatttgtccattcaggtgcatccgggtgacgaacttgcaaagaaacgccataacagtttcggtaaaaatgaaatgtggtatgtcattgctgccgataaaggtgcaaaattgatttccggctttgccgaggagataactccgaaggaatataaagaccgggtgcacaatggaacatttgccgaagtgcttcaaacttgcgccatagagccgggagatgtgttttacgtccctgccggtcgtgtacatggcattggcgccggagcattcgttgcggaaattcaacagacttccgacataacttatcgtattttcgactacaatcgtaaggataaggacggtaaatcccgcgaattgcataccagtcaggcaatggatgccattaacttttccgatgtgcaagacgatttccgtaccgaatacgaacgtgtacagaatgaacccgttgagatggtagcgagtccttatttcactacttctgtatatgacatgacggaagagattacttgtgattattcggaactggattcttttgttatttttatctgtgtggaaggttcttgccgtctgacggatgacaatcagaatgagattaccttgcgtgccggcgaaacggttcttttgcctgctgctgttcaggaagtaacaatcgtaccggaaggccagcgggtgaaactgcttgagacttacgtgtaagagttgatattattactgtaatgaagttaacatcatgtagccaatggtgttaacttctttttttt

SEQ ID NO: 4081 - DNA, 7955 bp, Unknown
  gut microbiota DNA sequence
gaacacaaggcaatcgtcaggtgtagatacagcttctgtaaaaatagtgaagcagcactttaatgctgttgttgcagaaaactgcatgaagcacgcaattattcatcctgaagaagaccgttatgattttggccaggcagatgaatttgtgaaattcggtgaagataaaatggaatgtatattaccggacactgccttattgggcattcacaacttgcacagtggttctgcgtagacaaggatggtaagaatgtttcacccgaaattttgcaacaacggatgaaaaatcatattaatgaagtgtactcgtagaccagctgatccattggtctgttaaagtcgttctttcgcgggaaggtactgaactggaagaatatttggtgtagaatcctcagatacaatatataatacgtggctggggcgttgtttcattgtattcttaatggggggaggcttcgatggagagtttagagagatgattaatgtaaatgtaacacaaaggagtccgtaatacaaagctgataacactcaaaacgtaagattgccccccctaaagtaatgaagaaccttatgggataaactaaacttttagacagtagaatataaatttatagaaattgcataagaactgtatacttttctgaaatatgtaacataagcaaaagaatctgcaacaaattttggaaaagaaattagcgaaagatgttttcctttgtaatattgttaaaccagcttcgcaatatagcaatgaaaaggattatcacattatttggcgcttttgcattactaacgaatcttaattcgttctcttatgcacaagctcttgaagatttcaaaccttcaagtgtaaaccaattagggaaagcgtaccctcaggttaattccgaagggagggtacgtgcccaactttatgcaccggaagccaaaaaagtacagcttgatattggtggtgtaaaatatgacatgataaaaaatgagcaaggattttggacgggagaatcagaacgtcagcaagagggttttcattattatcagttgaatgtggatggggcatctgttccagatccgggtacgaaatatttttatggtgcggggcgttgggggagtggaattgaaattccggcacatgatgaggatttttatgctttgaaagatgtacctcatggtttggtgagcgaattgaactactattctaaaattacacagtcgtggagacgttgtttcgtgtatacaccagctggatatgaagtcaatacggagaggtgttatccggtgctttatcttcagcatggcagttttgaggatgaaacgggttggggcagtcagggtaaagcgaatttgatattggataatctgattgctgcgaagaaagcagtcccgatgctgattgtcatggataatggttatgcaaccaggccgagcgaacaaactcctttccagacaacggtatttgaggaagtgctgatgcaagaggtcataccaatgattgatgagaagttccgtacattgcctaatcgtgagagccgggctattgctggtttatcaatgggggcaaatcagacaatgcgtattgccatgaatcatccggaggcttttgcctattatggtggttttagcggtacatccaactatccgagtacggaacctttggatgctgatacttttttaggtggaaaatttaaagatgggaaagcgataaacaggcaattcaagtctttctttctgggtttggggacttccgagccggctccttttcccggtgttgtaaaagctttcaggcaaatgttggataaacaggggattaaatatacctattatgaatctcctgaaactgcacatgagtggctgacttggcgcagggcgttgcatcagtacgcacaattgctatttcaataagaatttatataaagacgataattacatgtagtttaatacaaatatgagaaaacaaaaaactcttttacttttatgtaacttgttttgttgcatactattaccgctgtcggcgcaaaagcctgcaactaatcctgtgatttatgctgatgcaccagatatgtcaatgctgcgtgtgggggatacttattacatgagcagcactacgatgcatatgtctccgggagttcctattatgaaatcaaatgacttggtgaattggaaattggtgaattatgcttacgatacgcttgccaatatacctaccatgaacttggatgacgggaaaaatacttatgggcgtgggtcgtgggcgagttgtcttcgctatcacgagggagtgtattatctctccactttcgctcagactacgggcaagacatatttttataccactaaaaatcttgaaaaaggtccctggaagtgcacggaattctctcccgcttatcatgatcattcttttttctttgatgaggacgggcatatctacatgatatatggtaatgggaaactctttttggcggagctgaaaccggatctttcaggtgtaaagccgggtacggagagggtgctgatagagaatgccagtgcgccggccggagataatatcatgctgggtgctgaaggttcacaacttttcaaggtaaaagggaagtattatctttttaatatcacttggccacgtggcggagtgcgtactgtgattgtgcatcgtgctgataagataaccggaccttatgaaggacgtgttgtttttcaggatcgtggaattgcacaaggtgggctggtggatacaccggatggacgctggtttgcttatctgtttgaggattgcggtgcggtaggtcgtattccttatcttgttccggttgagtggaaagatggatggcctgttttgggtgtggatggacgtgctcctgctaagttggaactgcccgatagccgcggactcattccaggtattgttgcttctgatgacttcaatcggaagaaaggagaacgtaccttgccgttggtatggcaatggaatcacaatccggacaattctctttggtcgctttctgcccgcaaagggtatttgcggttgacaacagggcgggtggaaacatcttttacacaagctaagaatatgctgacacaacgtactattggtcctgtttgtacaggttcagtcagtatggatgtttcagggatgaaagagggagactttgcgggactgtctcttttccagcgtaaatatggtcaggtgggtgttaaggttattgatggaaagaaatatattgtaatggtgaatggtgagaatgagaaacctatggagatagaaaaagtgccattggagcagtcggtgatttactttaaggcagaatgcgacttcaggaacagagctgataaaggctatttctattacagtttggatggtattcgttggaaggctatcggcaacgtcttgaagatgcaatataccatgccgcacttcatgggctatcggtttgctttgttcaattacgctaccaaggagacggaaggatacgttgattttgattattttaagatagaagataagatttccgattgtcgttgggcagatgtctgttatgcggatgacgaactggaaggtcacaagttggatatttacttgcctgatacgggtaagtcatctcataaggtggtggtacttatttatggcagtgcttggtttgctaataatatgaaacagaatgcctttcaggtttttggtaggtcgttgcttgataaaggttttgcagtggtttccattaatcaccgttcaagcagggatgctaagttccctgcacagattaatgatgtgaaggctgctattcgtttcattcgtgctaatgctgccaagtataagttggatacatcctttattggaattaccggcttttcatcggggggacatttagcgtctttggcggggacaaccaatggtgtgaaatcttatactataggggataaaacggtggatttggaaggtaatgtaggggagtatttttcttttagcagccgggtggatgcggtcgttgattggttcggaccgatagatatgacacggatggagaactgtaataccactaaaggggctaattctcctgaagcagctttgataggtgggatacccgctgataatttggatatgttggctcttctaaatcccattacttatatagataaaaacgatcctaaatttattgttattcatggtgaagcggacactgtagttcccaattgtcaaagtatctttttctctgaggctctgaaggcacagggacgtttggaagaatttgtttcggttcctggcggacaacatggtcctgtcactttcaatgaaaatactttcaagaaaatgacagacttctttgcgaaagaggccggaatgtagagaattttaaactggataaggccgataaaatgtgatgacattaaatgactgccgcatgatagttggtatttagctgtcatgcggcagcatatttatcggtgcaagagataattacaacttaacctttattcttttgcctgtataagttacagttttactgttaccgtctatggttttcactatgaattgacgtttttgcagcatgccgttgtattctccttttcgtgcaccgattgtaagaattctactggcattatcccaattcattgggatttcggtataggctccattttcgtaattataattatctccttcatcttcataaagggtgaaactaccgttattgccagggtatatgcataaggttagattgtcccattttttttcacttgtgtattgtacttccggtccatatggaacgatactgccggcacgtacaaagagggggatgcgattgagtgtcgtggaaacggtaagtttctgtccgccttctatggcttcattggtccaatagttataccatcgggtatcagctggtagatagacttccatacttttagtttgagtgaagtcggtaagtaccggtgcttttgctgtttctttgttattacggtcccagccttcattttcctttaattttttttggtgtacttccggagtgtactgtgcgtgaagcactggtgctaccagaaatgctttgccgaacatatatgcattgtttatattccatgtttgtttgtcaccaagaaaatccatgaagagtgcacgcatgaaagtggagcggttgtgtgttacatcccaggaagtggaatagatgtaaggcagcagagtgtatcgtagtttgacagcatcaaccaaggcgtcataaacaggttcaccttttttaccataccaataaaattcgcgaggtacatcagcgccatgactgcgcatcattggacagaaaacaccaaattgtaaccagcggacgtaaagttcctgatacattggattacgtgtagcgctattgtctccccaactggtattgtatgaaccggcaaagaagccaccaaggtctgagttccagtgcggcatgccggtcagtgagaagtttaatcctgctgttatttgcttgcggaacatatcccaagaggattggacatcaccagaccaaacattggaaccgtaacgttgctgccctaagaaaccggagcgggtcaggatgatgacacgtttatcttgtgttagagcacgttgatgatcgtatacaccacctacgctgacgagtggataggcattgcgtacactgcgataagagccaagactggtttggcggtcaaaatcgctttccttgtggttaaaatgatctggctctgtcgagtccatccaccaaccatccatgccgagctggaatattcctttattgagatgttcccaataaatatcacgggctttggggctgtaagcatcatatacacgtactccggagggatattccatattaggcggccaaccgtcaacaccggattgcggccaggtttcgatgtcgaagagcaatccctctttatccaaagctctgtaaggtttggtagcaggaccgaatgaggaccatatggaaatcatcatgcgggcattcagagcatgtacttcgtcaatcatatctttgggacggctgaaagtagggttctggaaatccatggcattccagaggtagttatgtccccagtattgccagtcttgaatgatacaatccaaaggaatccccaactcgcgatactttttcactactcctactgtttcttcctgacttttatatcgttctttactctgcatgaagccataactccacaaaggcatcattggtacatcaccagtcagtgcacgtacttcggctataactccatcagcagaaccaccatacataaagtaatagtctatgcaatcgccgatttcggaacggaaggaggtttcctgttcgttgtcggtatatgtagtacctgagtagttatcccaaaacactccgtagcctttggtggactggaagaaaggagaaacgtcttccacattgccctgaaccagatgcttggttatgtcacgttgcatcatctgcccattttgcaattgtccgagtccgtaaagaccttcttctttgcttgttgtgaagccttgataaacgctataggtggagcgtccggcatcgttaataggagtaaaagccttgacattctcttgttcaatgagtaatgtgtcaccgttaggttttgcataagtaataatacctgtttggggattaagagtcactgtcagtgtttggcttgtcatgacaatacagccatttccgggagtagtaattttaataccggagttttgggggtgggcaataacggaaagactttcttttttaacgcttttgccttggggtgtttttaaaacacgaagggtattgggaccgaaccattgaatttctatatcggtttgttttccggaaatggcagttttaatacccgatgaggttttctggaattcttgtgcccatgtccatgacgtgagcaggcataaagccataatgataatgcttcttctcatattgataatatgttatatgtttatattatttaaacttgtacagattgggttgggatagttcttattgtgtgttataccttttttgaggtgtggttacctggtcggatattagaaacaatattccggtaattcctacttttgcatttttcatgatactttgtttttatgtttgaataatactgcaaaagtaggctgaaactatttggaagatgattacaaatgttgcggaaagcaacactctcgttgaaaaacagggtggtttatcggtttttccactgatttatgtattgggaaggtcgcatgccaaattcttcctgaaaacatttacttagataactggaagtgttgaatccaacaaggtcggcaacttcggcaacagtgtagccttctttcaggagttgggctgcacgttttaggcggatggatcggatgaaattagtaggtgtttttcctaccactgaaataagccttcgatataacccggtacggtccattcccatatcacgactcaatacttccactgaatattcgggattgtcaagattttgttctatatattgcagtactttgcgaagaaaggtttcatcggcaaccgacaataaagaattgtcggaggttggctttcgggctgttttgagctgttctttccgcttctcttgttgttccagtaattgacgcatattaaccaataattcttcctgtgtccattcattctcatccgatgataaaggggagagtataccttctgaaagctggttgattaattttttcagttccgtggcatggtttcggacttcctcgagttgcagtttgtctttcccttcattcatatatttcagcatactgtctaaaggggatattattcggttgacaggctctttcaattcttcattgacattttgtaagaaagtagttttcatctcatccaatttttctttttggtcacgcaacagcttccggcgcttgcgttgtatatatataaggatgaagagtaagatacttcctgagatgagcagaatgtaaaatatgtaagcatatgtcgttttccagaatggag

SEQ ID NO: 4082 - DNA, 97496 bp, Unknown
  gut microbiota DNA sequence
ggatcgttttctgcaatatcctcatcaattctttgaggaaaaagaacggtttggttgggattgtaaggacgaaaatgtatctttgtcatagtaaagaacttatacttaaagatacagaatctttaggtaataacaaagccccagcttgtgaaagtcggggctttgtgcgtaaaagaaagaaggggtgcattttgacacaccttcagaatcaaaatattatgaaatcaacaggactcttatatcaaactcttatagcccggtgaatgttccgtcctcattggtccatatgccaacattcggagtaaacttaataggagtagcattgttggtcagcgtcaatgtataccgaatattcttgcccatgccccaactgcctgtaaggttaacgaccttggtatcgttccaggtatactcacttgatttatctttcggtgcagcagtataggtaatctccaaagtaacgcctgtcaggtcgtcttgaggcatcagcataaacaaggcattgccggaagtctcaaatgctgcaaaagcttcaggttcagcagcagtcggagtaacggatacgggagtgccggtgtattcgtatgtcacgcccgaagcagactctgccaggttactccaagcccccacagtgctgcttccgtcaaaagtaaaagtagccttatcctttgcacctttaatcaccaatttcgatacggtataaataaaatcggcaacatcacccttgattgtaaagttcacctgcgtcagaagatgctggaaaggaagagaaatggctgactcagactttacctgatttattacgttggcagcaaccaaatcttcctgactgtcaaccgccttcaccgcatactcgaatttcggataaccggcagcggtagtaatatccaaagtttgcgccggtgaggtagcaaaaaattgcaatttaccggagacaggccagtagtagtcgcccttatacttccattccccgcttgatttatcaacttctatatcatccataaaacccgtattcaactgtacagttccccccatgtcatctgttgttttataagcgcttacagtaaacttactgaaattctcagtagtggcaaccaatgtctttgttccggtcttcaccactgtcccgaatttaatccggttcattgtactttcattctcaagcccttcattttcagagcaacttaccattgctgcggctgttaaagccaccaataaaatttttctcataaccatttgtttttagttaatatattaattgcttatcttgtttctacacgattatatccacattcgtttcatcatcccaatcacctatatcacctccgataccgctatttccaccttcttccttatccacctctaccgtaatctgtccatcgggaacaggcacctcaatatgtatttccccatcaggagcaggctgtatttcttcttcctcaccggaggtcggaggtgttatcaactttttgatatcaaccagaatctcctgcacctgcttatccaccttgataatcctgatggtcagcactaccggactatcgacccgtgtatccgcacttttcggaagcctgaaatgcgaaaaatgcccctgcaacagtccgtttttacaatcattctccacataaacgggcacttctgcaagtgtacacagccttctaccgagaaagtaaccgccattcaacccgctgacgtagcacacaacagccgatatattttctacaccatccaccttcacggcaaacgaataactgcttactacccgttccggtttcagtttcatcaccatagccgcttcgctttttgctatttccacatcatccaacgccacaacgtagaaatcctccggcgaccaaatcatatcctctccagcatccattccaatacaccgttccgtatatgccctgatagtaccatagcactcatcgccttctatgcagacacattccgtactatagttgtaaactatcattgcataatggccgggcggtactttcatttccccgccggcagccggcaaataaccgtctactttccgcccctcggcatctttcggataaaatattacccgcacggtctccggcaaattctccgcaactcccgtccagtccagcgttatctgtacgccactgacaggataatcgtccagcacctccctgaaattgcaccctgacaggattatcaacagacagaacagaggcaacggtacattatatctgatattttccaccacattcattgtcctgccgttatatgccatactaaagagaccgctacctttgtaggacccacaaaatgaaagtgtcctccattagttcggactaattccccttgataagaggtatatttacagtattccgttgtcaaataacctattcccaaactgcactcgattgcaaggtgcccggttattctgcgtgcatatccgcaggacagacccgaagtcatataatacttaccgcgaatgccactctcttctttcaactgaaaatcatatactcctccctcggtatatagccccaggaaataccctgtcaatctgttacacagatttctgttgcccagccaacagcgtacttccacacctcccgaaagaagctgataacaaaagccgttccgactgttcaaccaccaaggacatttatattcagtattcaaagaccacctctttcctgtcgaaaactcaacttccacattcggagccaacgccaaatcatatatcatattattcttcagagctaccataaccttatgtgatggtcccagcctttttcttttctcagagaacgcagtcgaaaccagttctcctctaccggcagacattaccggcagtgccttctccggcatccgtattccggcaataggaaactccttcgaatgtaccgtatagctgcctatccgcggaaaaacaaactgcaacagatatttacaggccttgccttcgttcagatagaacaacagttccgtcaatttgccgaaattcccataatgataccggattaacatcaaaacctctttcctgtccggcacattcttatcagcgagtacccaccgatatacttctctccattcgtccggttttataaccgagtccagcattacactgtttacaaccatcaatatgtcagcccgtacagatgctcttcccactgataaaaaaaagagtattataagagttactatatagatacggttcaccataactttgctttgtacaaagccaaaaataaaccattaaaattaaagaagatacagaaaaaccaactcatttagcaacttggaagattctgtgaaacgattggaagttttttgcaacttatgctacttccaatacagacaaagaaccggaatattccacgaaaagccccaacagcaagcctcgcttatccgacagttatcatatagtcattatatacactttatttaagtcaagatgtccaagcgtgcacgaaaacagtaaatattcgcaaaagaaaactaaaagaaattcaggaaaagagtaaatatttgggaaatatgtgaagaagctatacatttgttacgtgatttttttcatagtattagatttaaggttaacaaaggttggagtacagcggtactcctttttttatgccaataagcaatatactcctccaaccaatgcctttaccacccctttcatctccagttcgaaaagcaaggcgctcatacggtttacgggtatgtccgcctccactaccagcgcattgatatgcaagtctccctgatgagtcagtatacgcaccaccagctcctcctcatccgtcagttccggaaacagattgcgctggataccggctgctttggcagcaggctctgcattcgcccaccccattgtttttacgaactcttcggcactctgtacaagcgcagccttattatcccgtatcaaccggttgcagccgatagaagcggcatccgtcacccgcccgggcacggcaaagcaatcacggtgatagccgtcggccaaatccgctgtaatcaaagaaccgcctttagcggcagattccacaacaatcgtcgcatcgcacatacctgccacaatacggttacggctgacaaagttatgcctgtccggagtagtttcggataagaactcggtaagcaaaccgccgttgaccaacatatcgacagctgtcttacgatgtacagaaggatagatacggtccaaaccgtgagccagaacggcaacagtagacatattatcggccagggcggcacgatgtgcatgaatatcaatgccgtaggcgagaccgctcactatcagggcatcagggagaagcacggacaaatcgtgcacaaaatccgcacaaaaccgtttgccgtactccgttgcacggcgcgtacctaccatattgataacatgtaaacggttaaaatcagtgtttcccttgaaaaacaggacaatcggcgcatcctcacattcccgcagacgggaaggataggcctcatcccgcaaagtaagacaagtcaggcggttcttttccacaaactccatttcacgttcggcacgaagaaaagcggcaggacagtcaagagccgtaattatcgaggaattcacgccgggcagacgttccggcaattccttacgatacccgaaaacgtcaacggcgctgcctatggcatctattaaacgctttgccccgatatgtcctataccggggcagagcgtaagagctatactgcaaagacgttcgtcattattcatggtcgaggtagggggcaaagacgttatcgaataactcgctgtcgcttaaacgtccgtttaccacacataccgtttcaaccactgccttgatggccactttattgtcacttgccctgaaaatatcctgatagaacacatacttgatgccttctttcttcattgccagcttcgatacgaactcatcaccgcttttcaacggtgtcttgaaagccatattgatgcgtgctaccactggatctaccccctgttcgtggagtgcggcaaagctgacacccgtactcaacaggaactcgtgccgcgtatgctccagataatgctggtagttggcattgttgacaataccctgaaggtcgcattcatagtcgcggaccttcattttcagttcataaatataattcattataatacctgcaatttaacaatttaccatttgataattaaccgcgtttattctcgatatccaaacctttgaaccgcttgagctcctctacggaaaccagtttgtagagtttgtcgctgggacgtatcttatccgctttcatcgagaaatgctgcccttttttcaccgtctgcacgggtttcagatccacgcgcgcttcttccaatgtagtgaatacggctcccgttgtcggtcccgttatcagcagcttgtcgccgacattgatttcggcggcttccaccaagaactccgccacgccgatattcgagaagtaacggatacccttgccgacataaatcttacgttcagtagcggcagaaccgtagttccgggtccattcgcccaagcgctgccccagataatagccgtcccagaaaccacggttaaacacggttttcaggcgctcgtcccaggcagctatcttttcgtcggtaaacgtgccttccacataggagcgaatggcctccttataacattccaccaccgtacgcacatactcgggaccgcgggcgcgtccttcaatcttgaacacacgcacgcctgcatccagcattttgttcatgaaatgaatggttttcaggtctttgggcgacataatgtactggttgtctatatccagttccacatccgtttccttgtcgcgcaccgtatacgagcggcggcatacctgcatacaggctcccctgttggccgaatggttcatctcgtgcagcgaaagatagcacttgcccgataccgccatgcacaaagcgccgtggcagaacatctcgatacgtatccgctcaccgctcggtccgcagatattctcttcacagatatgacggtagatttccgccacctgctccagattcagttcgcgcgccagcaccaccacatcggcaaattgggcatagaaacgcaaagcctccacattcgaaatattcagttgcgtggacagatgcacctcctgtcctatctgccgggcgtaactcatcacagccacatcggctgcaatcaccgccgagatacctgccgcttttgccgcatccacaatggttcgcatcagggagatatcgttatcgtagataatggtatttaccgtaaggtaacttttcataccatgctcatcgcaggtttgggcaatctcccgcaaatcgtcaatggtaaaggtattggcggaacgggcacgcatattcaggttttcgataccgaagtaaatagagtccgcacccgcctggatagctgcggcaagagactcgcgcgagcctaccggagccatgatttcaaaatcgttcaaagtagtagaattcatccaatatgaaatttaatgatgcaattatttattaccgtgcgcatccaattcccgttgaatcagtgtcacaagttccatgccaagctgttggcctgccgtcatcccttccattgtaatggcaggagtaaccgctcccagcttcttgcccaccggagattcgtagaaggctacaatcttcttcaggtcgtccaatgtcaggtgtttctgatagatgggcacatacaccttcaccagattatcgctgaaaaactgctttgccttttccattactgcgttccacgtggcctccgatacagagggggactgctgcttcatcatgccgattatctgcggaaccatcgtatccacagtggccagaccgccggaaagcaacagcattttatgcaacgtttcctgatattccttattctgcccttgtgcagaaacaggggaaatgccgatgagcagtgtcatcacgcacaatgcgactgaaagcaaactctttttcataattatttctgttgttaagtgaatgaatagtgcaaatatacagatttaaggaagaagctgtatattctttcaaggatttcactcctgcatagcgaatgaaacaggctttttccgtacttttgcaggcaaatcccgtcagattatgaagattaaagatatagacctcggcaagcaccccatattgcttgcccccatggaagatgtgaccgaccccgctttccgactgatgtgcaaaggtttcggagcggatatggtgtacaccgagtttgtgtcgagcgacgcgctgatacgctctgtcagcaagaccgaacagaagctgaacatcagtgacgaagagcgccccgtagccatacagatatacggcaaggatacggacactatggtagaggcggcgcgtatcgtggagcaggcgcgtccggacatactggacatcaatttcggctgccccgtaaaacgtgtggccggcaaaggagccggtgcgggaatgttgcagaatatccccaagatgctggagataacccgtgccgtggcagatgccgtaaagatacccgtgaccgtaaaaacccgtctcggctgggatgccggcagcaagattatcgtagatttggcagaacaactgcaggactgcggcattgccgcccttaccattcacggccgcacccgcgcccaaatgtatacgggtgaagcggactggacactgattggtgaagtcaagaacaatccgcgcatgcacatccccatcatcggcaacggtgacgtcaccaccccccaaagggccaaagagtgcttcgaccgctacggggtggacgccgttatgataggccgcgccagcttcggccgcccttggatattcaaggaagtgaaacattatctggagacgggtgaagagataccgcccctcagttccgaatggaaactgaatgtactccggcaggaagtggaagacagcgtaaaactgctggacgaacggagaggtatcctgcacgtacgccgccacttggcagcaagcccgctgttcaagggtatccctaacttccgggaaacgcgcatcgccatgttgcgggcagagacaaaggaggaactgtaccgtatcttcaacgaaatagaaaaactgatatagcttaaattatcttacaaccccaaccaaaagagtgccctgcttttctatgggtcggcaatcatccgccgagcgaacctcattcagtcagggagtgaaagacaatgaatcagggactggcatcatttgaacatcggctgcgcaaaccaccgcttgaacatccacgttgccaccacatagagcacaatggcagagaaaaagcccacaatggcatcaatcaggtaatgcgcctgtatgtacactgtagccccgcacagcagcagataaaaaggaagcaggcaggcaaacaaacgcctgctaccccgccatgccataatcatcaggatggtggacatgccgacatgcgaactggggaatgccgccgtcggacgctcgcccacctgctgcgagctttccaccagattataaaagaatccgtgttcatatcccggaccgggcagcagttcctggttgtggttgaagtaatcgccgatagccgggaatatcccctgcgccacgttatccccgccgatagccggaaaatagaactgcggccctgccaccggcacgaagatatatatcaggtagtagataaagaaagcggtgactatcacgaacgacactttctcaaaaaggtcgaagcggtagagaaaataccacaccactaccagaagtatcatcggatagtagaagaaataacccatattgaacggttcgctcacccacatctgcggaaaacgcagacagaaccatacggcaggctgtccgccgaatatccattgctcgaccgaagcgaaaacatggtccaggttggggaagatacggttgaactcgaatgtgtcgggataccagtaggagagcaacgacatctggataacgatgcggatgaaggcggaaaacttgcagggcgcaagccggtaaagatacatcagcaaaaacgtcatgcctgcaatcacagcgcggtctgcaagcatctgcaccggatgatccatttcttggaaaagaaacagtatgagtatggaagtcagcagattatatatcagcgtaatcttctctaccgcaaaaagccctttacgggtttctactctcttgaataagtctaaagccatcctttatctttataccaggcaatcgtttccttcactccccgttccaggtcatattcgggactgtagcccaattcctcgacagtcggagttatatcgcattgccagttgcgttgtttcattattctatacttgtccgaattgagcgtactggtggtattccggcgtttcgcccaatattcggcgagcaaagatacaactttcaatataattaacggacatctcagacgaattacaaacggattccccagttctttccgtatcaggtcggaaaaagcacggctccggtacaccttgccgtctgccagaaaataggtgcggcgggatatttgtttctctatccccaggaaaacagcctgcacgatatccttgacgtaaacaaacgtcaaatcctgccggcggaaacccacggagaagtccgtgtgccgacggatagactttgccatcaggaagtaatccttctcgcgcggtccgtacacacccgtaggacgatagatgacgtaaggaaaatccgacatgccttgcagatacctctccgctttcagtttgctaaggccataggcggtattgggcacaggggtatccttttccgtaatcggagtataggtcttttcacgtatcggaccgaatacgctcaaggtactgataaagacaaactgcctgggaatcatgtccaactcccgcaacgtgtctacaaaacatttggtctgccggtagttcacacgttcgaagtcgttcttatctacacattttgtagctccggcacagtggataatgtaatcgaacttaccatacagttccttatgaccggaaagttgcgcacaaagctcaccgggatgcgcaaagtcgagttcaagaaaatgtatcttcttgtcctgcaaatactcccggctgctggacgaacggatgcctgcccatacgccgaatccccgcctcaacgcctcttccacgatgaaactcccgataaacccgcttgctcctgttactaaaaccgattccacgttatgaattatgaattttataaattatgaattattttctcccggtatcccgttactttaccattccgcccctactgtacggcctcatcatttcaccggctctacatgaatacctacatgagtgcctttaccgaactgttccttcaaggtattctcaatggccgttgccgtacggtgtgcttcttccagtgttatttttccatccatgcgcacatgcacctctatcgcgtaataattcccgatacggcgggtacgcaaatggtgaggcgaacttactccgggaaaagaaaggataatcttctgaatttcattttccacatcggcgggcagcgatttctccagcaactcatctacgcaaggaatcaataactttacggccaccttcatgatgaagaaactgacaacaaccgcggctatcgggtcgagcacccgccaatgatttcccaaaagaatagccccgccgatacctatggcagttcctatggaagaaagagcatcactgcgatgatgccacgcattggccaccactgcctgagaattcaacctcttccccttaaacaccgtatagcgataaagcgcttccttaaaggcaacggacaccaatgccgctatcagtgccagcattcccggttcctgcaaagaaccaccgtgaagaaaccgatagatagatgaagcgccattccagaaaatcccaaaaccgacgccgagcaatattatgccgataatggcagttgccaaagtctcgtatttgccatgtccgtagtcgtgtccctcatcttccggcttggaagagatacgcacaaaaacaatgacaatgatgtctgtaacaaagtccgataacgaatgtacggcatccgccagcatggcggcactatgccccatgatgcctgcaaagaacttgaacagaagcagcaggaagttcactacgctccccacaatcgttacgcggtaaatgcctttttccctcgcaacctcttccttatccatagattgtacttccatgacgtttttctaagttgttgcaaatatagtacataaatccgttatgaccggtcgttctcttataattttcagtaagacagaaagattttgaagccggagtgaacgagtgaatacatttatttgtttactttgcaagaaagataaaaagacatcagattatggctaagacaaaaaaggaaaagaaagagaaaaaagccggcaagcgaatgaagaagaaagagctcgtcaaagcactattggacttcttccacgtaaaacaagacgaagtactgtccctgaaatacattttcgaacaactgcatctcactacacacccgctgaaaatgctgtgtatggatatactgtctgaactgtcggatgacgattacatcaccgaagtggacaagcataaatacaaactgaacaatcatggtgtggagatgaccggcactttccaacgcaagagcaacggaaagaactcattcatacccgaaggcggcggcgaccccatcttcattgccgaacggaactcggcacacgccatggcgggcgataaagtgcgtatcgccttttatgccaaacgccgcggacgcgaagccgaaggcgaagtcatcgagatactggaacgcgccaacgataccttcgtaggaacattggaagttgccaaatcatatgctttccttgttacggaaaaccgcacgctggccaatgatatctttatccccaaagagaaactgaaaggtggaaagacaggcgacaaggccatcgtcaaagtggtggaatggcctgacaaggcaaagaatcctatcggtcaggttatcgacattctggggaaagccggagataacaccaccgagatgcacgccatcctggccgaattcggattgccgtatgtttaccccgcatccgtggaaaaagccgcagacaggatacctgccgaaattcccgcagaagaatataccaaacgtgaggatttccgcaatgtaaccacctttaccatagaccccaaagacgctaaggactttgacgatgccttgtccatccgcaaactgaaggacaatctttgggaagtgggtgtacacattgccgacgtgacgcactacgtaacggaaggcagcatcatcgacaaagaagccgagaaacgcgccacatccgtttacctcgtagaccgcaccatcccgatgctgcccgaacggttgtgtaacttcatctgttccctgcgccccgatgaagagaaactggcctactctgccatcttcgagatgacggacaagggagaagtgaagaactcgcgcattgtgcatacggttatcaagtccgaccgccgcttcacctacgaagaggcgcagcagattatcgaaaccaaagagggagactttaaggaagaaatcctcaagctggactcgcttgccaagatattgcgtgaaaaacggtttaccgccggcgccatcaacttcgaccgctatgaggtgaaatttgagattgacgagcagggcaagcctgtcagcgtatatttcaaggaatccaaagacgccaacaaactggtagaagagttcatgctactcgccaaccgcactgtagcggaaaaaataggacgtgtacccaaaagcaaaaagccgaaagtattcccctatcgtattcacgaccttccggacccggaaaaactggataatctggcacagttcattgcccgcttcggctacaaactgcgcaccggcggaaccaaaacggatgtatccaaatccatcaaccatctgctggatgatattcagggaaagaaagaggagaaccttattgaaaccgtatccatccgtgccatgcagaaagcacgctattccgtgcacaacatcggtcactacggattggcattcgattattacacccatttcacttctcccatccgacgctatccggacatgctggtgcaccggttgctgaccaaatacctggatttaggcggacgaagcgtttccgaacagaaatacgaagccctctgcgagcattccagcagcatggaacagatagctgccaatgcggaacgcgcctctatcaagtacaaacaggtggaatacatgacggaacgcctgggacagacttacgacggcgttatttccggtgttaccgaatggggactgtacgttgagctgaacgagaataaatgtgaaggaatgatacctatccgcgacctcgatgatgattactacgaattcgacgaaaagaattattgcctgcgcggacgacggaagaaacgcacatacagcctcggcgacgctatcaccatcaaggtggcacgcgccaacctggagaaaaagcagttggactttgcactggttgaataggcggaattatcattgtcagttacaaaagcttacctacacatacatgaagacaattactattacagaccgctcgcaaatagaagatatcatccgtaaatgcccttattgtacggtcgggattatcgacggagagggtaatccgtatgtaatacctatgaactttgcctgggaaaatgatactatttatctgcattcgggccccgaaggaagtaaagtagaaatggtggcacggcatccgcaggtctgcatcaccttctgtgaagggcacgaactggtgtatatgcataaacagatagcttgcagttacagcatgaaatcccgcagcgttatctgtaaaggcaaagtgcgtttcatagaagatatggatgaaaagcgacggatactcgacctgcttatgaagcaatatacggacaatgcatgtagctacgccgaaccggctgtacgcaatgtgaaaatatgggaagtgaaagtagatgaaataagctgcaaatcgttcgggctgaggccgagtgaattgaaataatctctacaaaaaactttgcccgaagtttgattgccactaacctgcatattcaaggtatcccagtcctatactcaaagtacttcagtcacataggtagtctctgtataggactgagcacataactcatcataagggatattcctcaaaggcatacaacagcgtcgacaaatagcgttctcccgtatcagggagcaacactactatgtttttaccctcattctccggcaactgcgccaactgggttgcagcactgacagccgctcccgaagaaatccccaccaacaggccttcgtatttcgccagttcccgcccggtacggatagcatcatcattggacacctgcaaaattccgtctaccacggcactattatagtttttcggaacaaaacctgcaccgataccctgaatcttatgcgggcccggttttccgcctgacaataccggagaatcttccggttctacggctaccacttgtatccgggagttatgtttcttcaaagccgcacccacgccgctcaccgttccgccggtccccacaccggccacgaatatatcgaccttcccgtccgtatcctgccagatttcctgtccggtagtgcgctcatgaacggcagggttagcccgattattaaactgctgcagaatcagtgaactgggagtgcttgcctgcagctcttcggcacgggctatagcacctttcataccgtctgcaccgggcgtcaaaacaagttccgcaccaagggctttcagcagattgcgacgttccgtactcatggtatccggcatagtcaaaatcaatttatagcctttggaagctgccacaaaggcaagccctaccccggtattcccactggtcggctcaataaccgttgcaccgggcttcaacagtcctttcgtttccgcatcttctatcatagccagcgcaacacggtcctttacgctgcccgcaggattaaagtattccagtttgacgatgacacgagctttcaagttcttgtttttaccataattgttcaactccaacaaaggagtattgccaactaaatcagtcagacgttgtgctatttttttcatatcttacagtgaattatcaataagacaaaagtacggcggagtccgttcattcaaaataccataaatgtggtaaatccatactataaatgagggatatgtaggaaaattggtgagtattttatacctttgtagccactttattaataaaggatatcataatgagtccacttaattttactcacatcctgacacaggcagtcgatgagctatcggaaagcgaatcctacaaaggactgtttcaccagcacacggacggcaatccattgccttcagctaaggcattgtgcgatattatcgaacttgcacgtgccattatcttccccggatattttggaaattcaacggtcaacagccgtacggtaacttaccatatcggagtcaatgtagaaagactgttcgacctgctgaccgagcaaatattggcaggactctgtttcggcagtgatgacgaatgcagttgctgtaccgaacttcaacgtgaggaggccgcatcaattgccgcccggttcatcagccatttacctgaactgcgtcgcatactggctacggatgttgaagccgcttacaacggcgaccctgccgcacattcgtttggcgaggttatcagttgctatccggccatacgcgctatcagcaattaccgcatagcacacgaactgttggtactcggcgtgcctctcattccgcgtatcatcaccgaaatggcccatagcgaaaccggtatcgatattcatccgggagctgccataggcggttatttcacgatagaccacggtacaggtgtggtaatcggcgagacttgtatcatcggcaagaacgtaaaactataccagggtgtaaccctcggagccaaaagtttcccgctggaccaggacggtaaacccatcaaaggcataccccgccatcccatactggaagacaatgtcattgtctattccaatgccaccatattagggcgtatcaccatcggaaaagacgctaccgtaggcggcaacatctgggtaacggaagatgtgcccgcaggcgcaagaatagtacaaaccaaagcaaaaaagtaagagattttatgatttcagaattataatccataccatatgcgtaatagtaaaaatgaaatcataccggaataaatcataaattataaatcataaataagtagatgagcgaacaatcattcgaaatgattgccaaaactttccagggactggaagaaacattggcacaggaactgacctctttgggtgcagacgagatacagataggacgtcgtatggtatcattccgcggcgacaaggaaatgatgtacaaggcgaatttctgcctgcggaccgctatccgcatcctgaaacctatcaaacagtttgtagcgaaaaatgccgatgaggtgtatgaacagatcaaggcaatccactgggaagattatctggatatagataaaactttcgccgtagacgcagttgtgttcagcgaggaattccgccattccaaatttgtttcctacaaagtgaaggatgccattgtggactatttccgggatgcatacgacaaacgcccgtctgtacgcatcagcaagccggatgtattattgaacattcacattgcagaaaccaaatgcactctttctctcgattcatccggcgagtctctgcaccgccgcggttatcgtcaggaagccgtggaagctcctctgaatgaggttttggcagccggcatgatattaatgagcggttggcacggagaatgtgacctgatagacccgatgtgcggctcgggaacaatccccatcgaagctgccttgatagccaggaatatcgcaccgggcgtattccgtaaggagtttgcttttgaaaaatggattgatttcgaccaggagctgttcgataagatttataacgatgacagccaggaacgtgaattcgctcataagatatacgggtacgacaacaacccgaaagccaacgaaatcgcaacccataacatcaaggcagcaggcgtatccaaagacgtaacgctgaagttgcaacctttccagcagtttgagcaacctaaggaaaaggctgttatcattaccaacccgccttatggagagcgtatatctaccaacgacctgctgggcttatactctatgattggcgaacggctgaaacatgcgtttacaggcaacaccgcgtggatactttcttatcgtgaagaatgcttcgatcaaatcggattgaaacctactgccaagatacctctgttcaacggtgctctggaatgtgagttccgtaaatacgaaatcttcgacggaaaatacaaagaattcaaaaagcaggaaagcgaagagggtaataaagagtacagaccttacgctgcaagagaaaaaagagaattcaagaccggagaaagaagagagtttaaatccggagagaaaagggaattcaagccgagagagagaagagaattcaaatcggatgataaacgggagttcaagcctcgtgaatacagaaaaccggcagacggagaatggaaaccgaagcgagaatttgacagagagcgagaatttaataaagaacgtaaaccgggagagtttcggaaacggaacaacgaacggaataacgactgaaaccgttaaaattaaaagctatgaacataaagagaatcggtaaggcaatcatggtattgctactggcaacacctgctttatcttcaatggagcttatggcacaaaacttgaaaatgcccactctggaagaccttcttcccggtggcgcaacctatcgtatcgctgagaacctgccgggtttgcagtggtggggtgatgtatgtataaaacccggcatcgactccttgtttgccgtcaatcccaaaaacgggaaagagacattgctcacaacccgggaaaaggtaaataaagtactcaactcgctgataactcctacggaaacaaccgcaacacccggccataagggaaataaagtacagcatttctacaataccgaatttccatggccggacaaaccgtatatgcttatcaaattgcctgcgagatacatcgtttatgatttcgagaaagatgaattcgtcaaaggtctgccgcaggctggagaaagaaacggtgcaaacattgactataccccggaaggcggacacatagcctataccgttaagaataacctcttcgtggacaacaaagccgtaaccgaagaacccgaaggaattgtatgcgggcagagcgtacaccgcaatgaattcggaatcggcaagggcaccttctggagtcctcaaggaaacctgctggccttttactgcatgaacgaaagcatggtaactccctatccgctggtggatattactcccagaatatcactggtggacaagatacgttatccgatggcagggatgctcagccatcaggttaccgtaggtatctataatccggacactcaaaaaaccgtttacttgaataccggcgatcctaccaaccgttatttcaccaatatcagttgggcgcccgacggaaagagtctttatctcatagagctgaaccgtgaccagaatcatgcaaaactttgccgatacagcagcgagaccggcgaactgatgtccacgcttatcgaagaaacgcatcccaaatatgtggagcctcaacaacccatcctgttcctgccttgggatcatactcaatttatctaccagagccagaaagacggctacaaccacctgtatctctacaatacggacggcaagctcatcaagcaactgacaaaaggggagtggctggtacagaacattttaggattcaatgccagaaagaaagaagttatcatcgcttctacggaagtatctcctttacaaagtaacctgtacaaggtcaatatcaataccggcaaacgtactccattggacaacagcaagggagtacacaacgggatactttccgcttcgggcaattatattatcgaccggtattcaactccggatactccccgcaaaatagagataaccaatacccaaaacaagaaaagcgtctctttgctcactgcgaagaatccttatgaaggctttatcatgcctgccatagaaaccggtacaataaaggctgccgacggcaagaccgacttatattaccgccttgtaaagcccgccgacttcgacccgaataagaaatatcctgcaatcgtctatgtatatggcggtcctcatgcccagatgattaccaacggctggatgaatgacgcacgcggctgggacatctatatggccaataagggttatatcatgttcacgctcgacaaccgcggtagcagtaaccggggactggagttcgaaaacgtcaccttcagacacttgggtattgaagagggcaaagaccaggtaaaaggagtggactacctgaaaagcctgccttacatagacagcaaccgcatcggtgttcacggctggagtttcggcggacacatgactaccgcactcatgctgcgctatccggagattttcaaagtaggcgtggccggcggaccggtcatcgactggaaatattatgagataatgtatggcgagcgctatatggacaccccgcagacaaaccccgaaggttatgaacagtgcgacttgaagaacctcgcagggcaactgaaaggacatctgctcattatccacgatgaccacgatgacacctgcgtgccccagcatacgctttctttcatgaaagcatgcatagatgcacgcacctatcccgatctgtttatctatcccggacataagcacaacgttttgggacgcgaccgcgtacatctgcacgaaaagataacccgatatttcgaggattatttataaaccggacacattttcaacagtaaacaattaaacgtatccataaaatgaaagtattattgcttggctcaggtggccgtgaacacgctttggcttggaaaattgcacaaagccccaaaatagagaaactgtatatcgctcccggcaatgcgggaacaagtgcagtgggcgaaaatgtagccattaaagctacggacttccccgccctcaaggcttttgcccttgaacataagattgacatgattgtagtgggtcccgaagacccgttggtacagggcattttcgacttcttcaaagaagatgccgctacacggcacattgccgtcatcggtccttctgcaaaaggtgcgcaattggaaggcagcaaagaatttgccaaggaattcatgctgcgccatcacatccctaccgcccgctataaaagcgtgactgctgcaacactcgaagaaggacttgcttttctcgaaacgctcaccgctccctacgttctgaaagccgatggcctgtgcgccggtaaaggcgtgctgattcttccgactctggaagaagcccggaaagagctgaaggagatgctcagcggtatgttcggcgatgccagtgcaacagtggttatcgaagaattcctcagcgggatagagtgctcggtatttgtcctgagcgatggtgagcactataaggtactgcctgtagccaaagactataaacgtatcggagaaggtgataagggattgaacaccggcggtatgggtagcgtaacacccgttccgtttgccgatgaggtatttatggaaaaggtgcgcaaacgcatcatagagcctaccatcaacgggctgcgcgaagaaggcattctgtacaaaggtttcattttcctgggacttatcaatgtacagaacgagcctatggttatcgaatacaatgtacgtatgggcgacccggaaaccgaaagtgtcatgttgcgcatcaagagcgacattgtagagcttttcgaaggcgtgcacaaggtaaacctcgataccaaggcaatggaactcgacccgcgcacggctgcctgcgtaatgctggtcagcggcgggtatcccgaaacgtatcagaaaggctatcccatgagcggctttgatttggcagcaaccacggacagcattctgttccatgccggtaccgccgtaaaagacgggcatatcgtcaccaacggcggacgcgtcatagctgtctgctcctatggagagacaaaagaagaggctttgaaaaagagttataaagtggccgacatgttaagttttgaaggcaaatacttccgtcgcgatatcggattcgacctttaacagtcaatgagaagccaaagattccaaaatcgggttacggcgggacgatttacgcttcccgccgccatccttatatcagtagcctgctggatactgagcgctattctgttgcccgatttggaaatacggaaaggcaattaccccctatgggacattttctatagctcatgtattccaacgtggggcactcgtcttttctgcttcatcctgtactccgtcataggatattttcttatcgggctgaacaacgcctttgccatcatccgcatgcgggcctcagtacagacagccatttatttcctgctgatttccgtctgccctaccatgcacatactgtatgcaggagatttggtagcggtcacttttctcattgctctgtattttctgttcaagagctatcagcaatccaaatctgcaagctatctgtttcacgcattcgtatttataggaatggggagtctgctttttccgcaactgatattctttgttcccgtattttggataggcgcgtatagcttccagtccctgcaccccaagagttttttcgcttcgcttatcggctggagcgtaccttattggtttctattgggctatgcctatctatccggacacatggatttattctaccagccattcctggaactggtgaatttccgctctatcctatttggtttccggccttgggaattggcgacaatcgggtatatactccttttatatatggtcagttcaagccattgtttaatagccggatatgaggacaagatacgtacgcgcagctatctgcacttcctgatattcctgaacttctgtattttcgtctatataggactgcaacccgctctgtatccccatctgttctctctgctgctaatcggcaccagtattctgataggacacttattcgtactgaccaacagccggagttccaacctgttcttcatcattatgctggtcggattatttactttattcggattcaatctatggacgcttttatagatacactcatacaactcctgatagactggggatatacagggctctttatctcggccttattggcgggaagcatcattccgttcagttccgagctggtgatgctggcactcgtcaaggtaggcttgaaccctgccatctgtgttcttgccgccacactgggaaacacaatgggcggtatgacctgctattacatgggacatctcggcaagacagactggatagaaaaatatttcaaagtgaagcaagaaaaaatagacaaaatgcagcgtttcctgcaaggtaaaggagcgctcatggctttctttgcctttctgccctttataggagaagccattgccatagcactgggatttatgcgcagcaacgtaatgctgacttccctttccatgtttacaggaaaactgatacggtacatcgttatgttatcggctcttcaaggcgctttgtcggtgatgagtgtttagcggttggtaattaatatttagtgattagcgggtatggaacggattatagaacagacggaagacggaagcaccacattgtttgtgccggagttgaatgagcattatcactcggtaaaaggggcgcgcacagaatcgcaacatattttcatcgacatgggactgaaagcctccgccgctaccttgccgcatatccttgaaataggcttcggcacggggttgaacgctctgctcacactggaaacagccggactggagcaaaggccggttcactataccggtatcgaactttatcctctgtcatgggaagaggtggatgttttacattatagcgacaatcccctgtttaaggaattacacacggcaccctggcacaaagacgtgaacattacaccgtacttcacgttacacaagatacaaggagacgtaaataaagtgatgagcgacaagcagtcagcgatgagtgacagattacctgttcatcactcatcgctaaccactaatcactacttcgaccttgtttatttcgatgcctttgctcccgaaaaacagccggaaatgtggagcgaagagcttttccggcacatatatgccgccatgaacaacaacggcatactgaccacatattgtgcaaaaggcgttatccgcaggcttttgcaagccatcggatttagggtagagcgtcttcccggtccgccgggtggcaaacgcgaaatactgcgggcatccaaaacaaaggaatgagccatacacaaaaaacaaacaaagtaacggccccacagagccacatatacaaaaaaccatagatagaataaatgaaaaagatatactttctactacttgcaactatactgatagcttcctgcaaacccggaagcaaaaccaacaataggagcgaaggaaaaccggttatcaccgttaccctcgagcctctgcggtacctcaccgaagccattgccggcgaccgctttacggtagtcagcatggtgcccaagggcacaagtccggaaacctatgaccctacgcctcaacagctcgtagagcttgcacgcagtaaggcttacttccgcatcggctatatcggtttcgagcagacttggactgacaagctgacagacaacgctcctcacctgcaattcttcgatatgtcgcaaggtgtggatctgatttatgacaacacgcatgttcatcatcacgcagccaacgaaaaagagcaccaacacgccatcggtgtggagccccatatatggaactcggccgtcaacgcccaaatcatcgcaggcaatatcttaagtgccttacgtaatatcgacaaaggcaacgaagatttttatctggaacgctataatactctttgccggaagatagaacataccgacagcctcatacggcaaacgctggcgacccccggcgcagaccatgcctttatgatttaccacccggcactctcttatttcgcccgcgactacggattgcatcagattcccatcgaagccggtggcaaagaaccgtctcctgcacatctgaaagccttgattgatacctgcagcagcgaaaatgtacatgtcatcttcgtacagccggaatttgaccgccgcaatgccgaactcatcgcccaacaaaccggaacccgggttgttgacatcaatcccttatcttacgattgggaaacggaaatgctgaatatagcccaagcgctgaacccaatgaagaaccaagaatgaagcaatgaaacctattattgaaatcaaaaacctcaatgccggatacgacggccgtacagtacttcgcgatgtaaacctcaccgtttacgaccgggattttctgggtatcatcggtccgaacggaggtggcaagaccactcttatcaaatgtattttaggattgctcaaaccgctttccggtgaaatatctttcacctcttcccgcacggcaggcaacttacagctcaccatgggctatctgcctcaatacaacagcatagaccgcaagttccctatcacagtcggagaggtgattctgtcaggactcagcagcaagaaaccacttatttcgcgttttacgaaagaacataaagaaaaggcacatcaagtcattgtacgcatgggactggaaggactggaagaacgggctatcggtgcattgagcggcggacagcttcaacgcgccttgctgggtcgcgccattatttccgatcccgaagtggtaatcctcgacgaacccagtacctatatcgacaaacggtttgaggcacgcctataccaattgttggcagaaatcaacaaagattgcgccatcatactcgtcagccacgacataggcacagtattgcagcaggtgaaatccattgcctgtgtcaacgaaacactggactaccaccccgataccggcattaccggcgaatggctggaacgcaatttcaactgccccatagaactgctgggacatggaacattgccgcaccgggtactgggggaacatcatcattaacggttacactccataactgattttgccctatttcctctctgactgtatttctctcatattggatacgaaagccagtaatgatattctcccttaacagtttagcttcctcagcggtcttgcatagtttacacccgacaaatatttagcggcagaaagtccgggagttctcagacaaaagacggggcgttttcttcaaaagaccgggagttttgcacgaaaagtccgggagttttaccccgaaagtcccggtcttttgcgcggaaagctcaggagttttgagcaacctctccctttttctataaaattccccctatatctctaaaccaatcctaataatccgccttattgtcacttatttagaactgaaatcattatctttgcgcccatatatgccgaaattaaaataaaaccataacgaatttcatccgaatgaaacagtacaaaaccgtaaacaacctgattggttggattacctttatcattgcagcaacggtttattgcatgactattgagccgactgcaagtttttgggactgcccggagttcattaccaccggctataagctggaagtaggacacccgcccggtgcaccgttctttatgttagtagccaatctgttttctcagtttgcttccgatgcctctaccgttgccaagatggtgaactacatgagtgcactgatgagcggcgcttgtatcctgttcttattctggagcatcactcacctggtacgcaaactggttattaccgatgaaaacaacatcaccaaaggacaactgattactgtcatgggcagcggtctggtgggtgcattggcatacacattcagtgatacgttctggttcagcgccgtagagggtgaggtgtatgctttctcctccctgttcacggcagtagtgttctggctgatactgaagtgggaagatgtggcggacgagccgcattccgaccgctggctgattcttattgcctatctcaccggattgagtatcggtgttcacttgctgaacctgctctgtcttccggctatcgtgctggtatactactataagaaagtacccaatgccaacgcaaaaggttcgctgttagcacttctcgcatctatggtgctggtagcggttgtgctgtacggtatcgttccgggcatcgtaaaagtgggcggctggttcgagctgttctttgtcaacacgctcggcatgtctttcaacagcggtgtcatcgtatatatcatcttactggcggcttgcctcatctggggtgtatacgaaagctacaatgaaaagagcaagtcgcgtatggcactctcgttcatactgaccatagccatgctgggtattcctttctatggtcatggcggcagttctgtcattatcggcattatcgttatcgtgctgctgtggctctatctcaaaccgggcacacaggagaagattaaggagagataccgcgtatcggcacgcacactgaacacatcactgttgtgcaccatgatgattgttatcggatattcatcctacgcgcttatcgtaatccgctccaccgccaatacgccgatggaccagaattctccggaagatatcttcacattgggcgaatacctgggacgcgaacagtacggtacacgcccgctgttctacggtccggcttactcctcacaggtagccctggatgtaaaagacggatattgcgaaccgcgcatctcctacaacggaaccaaatacatccgtaaggaaaaggccactgacgacgagaaagacagctacatcgaaattcccggacgcatcgaatacgagtatgcgcagaatatgctcttcccccgtatgtacagcagcgctcatgccaaccaatataaggcatggcaggacatcaagggatatgacgtaccctacgacaaatgcggcgaaatgattatggtgactatgcctacgcagtgggaaaacattaagttcttcttctcctaccagctcaactggatgtactggcgctatttcatgtggaacttcgccggacgccagaacgacttgcagggtagcggagaaatcgaacacggcaactggattaccggtatcaagtttatcgacaatatgctggtaggcaatcaggacttgctgccgaaagagctgaaagagaacaagggtcataacgtattctactgcctgccgttgctgctcggaattatcggtctgttgtggcaggcctatcgcggacagaagggtatccagcagttctgggtagtgttcttcctcttcttcatgaccggtatagcgattgtgctctacctgaaccagacaccgagccagccgcgcgaacgcgactacgcatatgcaggttcgttctatgctttcgccatctggattggtatgggcgtggcaggcattatccgcctgttgcagcattatgccaagatgaaggaacttcccgccgccgctatcgtttcagtggcctgcctttttgttcccatacagatggcaagccagacgtgggacgaccatgaccgcagcggccgttatgtggcacgcgatttcgggcagaactacctgatgtcattgcaggaaacgggtaatccgattatatacaccaacggcgataacgataccttccccctgtggtacaaccaagaaacggaaggcttccgcaccgacgcccgtacctgcaacctcagctacctgcagaccgactggtacatcgaccagatgaagcgtcccgcctacgactctccttccctgcctatcacgtgggaccgtatggagtatgtagaaggtaccaacgaatatgttccggtacgtcccgaatacaagaagagcattgatgccctgtatgccgaagcagagaaacaagccctgagcggcaacaccgaagcactggtaaacgtgaagaaagaattcggcgagaatccttacgaactcaagaacatactgaaatactggatacgcagcaagaacgaggacctgaaggtaattcctaccgacagcatcgtgatgaaagtggataaggaagccgtacgccgcagcggaatgatgataccgggcgattccatccccgactacatgcacatctcgctgaaaggcaaacgcgccctctacaagagtgagctgatgatgctcgaaatgctggcggaagccaattgggagcgtcctatctacatcgcagtcagcgtagggccggagaaccaactgaacatgggcaaccacttcattcaggagggtctcacctaccgtttcactccattcgataccgacaagctgggtgtgaaaatagacagcgaaaagatgtacgacaacctgatgcacaagttcaagttcggcggcatcgacaaaccgggcatctacatcgatgagaatgccatgcgcatgtgtcactcgcatcgccgtatcttctcccagcttgcacagcagttgatacgcgaaggcaagaaggataaggctaaagccgcactggactatgccgagaagatgattcccgccttcaacgtgccatacgactggcagaacggtgccgtacagatggccgaagcatactaccagttgggcgattctacaaaagccgacgacatgatgaaagcccttgccgacaaagccgtggaatacctcacctggtatctgagcatggacgacaaccgcttctccatctctacccgtgaatttgaatatcactgggcagtgctcgatgctgaagtgaagattatgaggaaatacaattccaaactggcggaaatctacgctccgaaggtagaagagttgtacaacttgtatgcggaaagatacgaaagattacaaaaaatggaaaaaaaataatgccggtacacggtagcgaatgagcggattaccgcaggtacatcctgccggtaaacctgcccattcgccaccggatgcccggcatcagtcaataaccgttaaccaccgattaaccgtgtttatagaacagccacccgagtttgttcgtaagttatatcccagcgccgtatggcgaatggacccggacgagagagccgtctatctgactttcgatgacggacctatccccgaagttactccgtgggtactcgacttgcttgacaaatacgacataaaagccaccttctttatggtaggtgacaatatccgtaagcaccctgatgaattccaaatggttgtggagcggggacaccgcatcggtaaccatacctttaaccatctcagaggatttgaatacaacttcaaagattatctggcaaatgccgagaaagccaacgaggtaatgaaaacagacctgttccgccctccgcacggccacatgggatggacgcagtacatgatactgaaacgccgttataagataataatgtgggatttggtaacccgtgactacagtaagaaacttcgcggaccacaggtgcttgccaatgtaatgagatacgcccgcaacggctccatcatcacatttcacgattccttaaagtcctggaacaacggcaacctgcaatatgcactgccacgggcaatagaatttctgaaagaagagggatacgagttcagactgttatagaattatagagttataaagttgagagttgaaagttttcatgcagcacaattgcgcagcctgactttcaactctcaatgtttttagtttacttttaccgtcagcggattacgcactttttgggcgaaatcagccatataccggttccaggcatcggcagtcttgatatctgccttatcccatgcaaatccccaataatatacatattccgaacccggttcgtagtcgcttacagcaagcacatgaccgtcggcattgttgcgttctttcttttccttttcagagaaaagtacggttttcgcatctttgacaacagcgggaaccgcagcacccataaagattttaccgttatcgggaccggtcgtagggtctacataagtaatgtaaccgttagcagcatcggcaacgacagctccatcgggttcatgcaatacgatgcctgcaacgataggcaatgtttctttcagattgctgtacgatacgacagtcttgttcaaatgcgagccggcatcaagtgtaatcaaacgtgtttctaccacggtcgaatcgccctttacagtcagcggagtaaactccagcttcaccgtaaagcgtaacgggccgttatccagaatctcctggttcttatagcaccacggatagataatcgtatcgtttaccatcagtgcggctacaccggctcccaatgtaggacctactgcataacagtccatcccgtaaccgtggtcgatgtggtaagaacgctcgcggcttaactcggcggcagctttcggatcggtctttttcagttcggcaatcttggcaagcgtttccttgtccagttctttggcgtacatggcctccagcatcggttcggtagtgttatacttcgtaaacaggtcataaccgaaaccacgctctcctttagcctgcaaagcaggaccgtaagcgcggaaagccaccaaatcattctcccaagccatatcatccatacgttcgggatagcatctgccgcaggcctttacatcaaaagcctcaggcgtaccggtttgtatggtgtacgtagcggtgccgccagcagctatcgcagccgggaatataaccttgccgtcgtacgtaatctgataaggcacttgctgcccgtcggcattcaatactacaatctgtgccgtgtccgccaagcccaggcggtctgtaacagtttccatagacacctctaccatttcattggagcgctccatggccaacggattggttaccgtaacggtcaccgtcctgctgtcgttgcaagcgaagcaaaacaaggccgtcatacctaataaaagaagtttcttcatagtgaataaataatatgataaagtggtaatgtaacaggatggtaatgcgataatgcagcaggtgatgaagcaaccttattataaaaaataaggcggtaaagcaatatcctctatcacttaccgcctcactaccttattacctgttatttcggttgttttccgatgtaagccaagataccgccgtcaacgtacagaatatgtccgttcactgcgttggaagcctcagatgccaagaacacagcaggacctgtgagttcttgcggatccaaccaacgaccggccggagtcttagcgcaaatgaatgaatcgaacgggtgacggctgccgtcagcttgtttttcacgcaacggagcagtctgcggagtagcgatgtaacccgggccgataccattacattggatgttgtatccaccgtattcggagcagatgttacgagtcagcatcttcaaaccacccttagcggcagcgtatgcagatacagtctcacgacccagttcggacatcatggagcagatgttgatgatcttaccgtgacccttcttcatcattgcaggcagaacagccttagaaacgatgaacggagcattcaggtcgatgtcgataacgcgacggaaatcggcagcttccatttcgtgcatagggatacggcggatgatacctgcgttgttaaccagaatatcaacagagcccacttctttttcgatagtagccaccatagcctgaacagccggttcgtcagttacgtcgcatacataaccatgtgccttgatacccttttcggcataagcagccatacctttgtctaccagttcctggttgatgtcgttgaaacagattttcgcaccttgttctgcaaaagccgaagcaatggcaaaaccgataccgtaagaagcacctgttacgagggctactttaccttccagagaaaaattcaaatactgattcatgatgtttatttattttaggttgaaaaaatagtgttatttcaaatcggtaatcaaggagaaatcctggtcgccgtaatccagattctcgccgcccatcccccatataaaggtataattgtgcgtagctgcggcagagtggatagaccattcgggagaaaggacagcctggtcgcccttcatccacacatggcgggtttcgtccacctcgcccataaagtggcagatagcatggtcttccggaatctcaaagtagaaataagcttccatacggcggctgtggacgtgtgccggcattgtattccacacactgcccggagcaagttccgtcatgcccatttgcaattggcaggtcggcaacacctgatttaccagcatcttattgatattacggtggttggagccttccaaagaacccatctcagccactaccgcatctctcttcgtcactttcttgtcgggatagttgcgatgagccgttacggaattaaaatagaacttggccggatgagccgcatccttgctctcaaaagtaacttcacggtcgcccgaacccaggtagagggcttctttataatccatttcaaacacagcgtcgccggctctgaccacgcccggtccgcctacattgaaaatacccatctcgcggcgggtcaggaaataaggggctttcaacgggtcgatagcctccagttgcaacacctcacccaccggcatagcaccacctactaccatacggtcgtacatggaatataccatattcacttcgttcggggagaatactttctctataaggaaatcacgacgaattcttttcgtatcataacttttcgcatcttccggatgcgcagcgtagcggatctcatagttcgttctcatgattatattacctttctttaattttcaaaattaacagccagcggtacgtcgtttacgtacacgattgcaaatgtagcaaaagaaaacggcaaaacattgcttttttgtcctaattatctatcaatattgtacaaagaaaggaaaaatcatcagaaatgtcctaatattgaatgaataaatcaaaagaaaaaataaaagagaatcctatagttgccaaccgtgccatctatatggcaaacccgtgccatataatagacaaagttgtgccactatattggcacaactcatatactaatgaaaaaagctccgacaatcatcgactgtcggagcttttttcgttggactaccaagattcgaacttggacaaacagaaccaaaacctgttgtgctaccattacaccatagtccaaacatatgcgctttctgttaaaaagcggtgcaaagatagaagtatgtcccgaaatatgcaaatatttcgggacattttttcatatccctatattattttgcaataatcagataatagttcttcttgccgcgttgcaccagcagatacttgtcatccaataaatcagcagttgtaacaacctgatcgaaagcaaccagtttttctttgttcaaagagacgccgccgccctgcaccagcttgcgcatttcgcctttcgatgcaaatacagccgcattgtctacgaacagatcaactgcctttacaccggcagccagcgcatcacgggatacctcaaactgaggaacaccctcaaacacagccagcaaagtatcttcgtccagctttttcaacgcctccgatgtggcattgccgaaaagaatgttggacgcatcaacagccgcattgtagtcctcttcggagtgtaccataatggtgacttccttagccagacgcttctgcaggacacgcaagtgcggagctgcttcgtgctcggccgtcagagcctcgatttcttccctggacaaagaagtgaatatcttgatgtagcgggctgcatcggcatcgcttacgttcagccagaactggtagaacttataaggagatgtatagcggggatcgagccatatattgccggattccgtcttaccgaatttaccgccgtccgcctttgtaatcagagggcttgtcagggcaaatacctcaccgccattggtacggcgaatcagttcggctcccgtggtgatgttaccccactggtccgagccgcccatttgcagcttgcaacctttggtttcgtacagatgcaggaaatcgtagccttgcagcaactgataagtgaattctgtgaaagaaagaccgtcgcgggcttcaccgttcagacgcttcttcaccgaatccttagccatcatatagtttacggtgatatgtttgcctacttcacgggcaaaatcaagaaaactgaagtccttcatccaatcgtagttgttcaccaactccgcacggttaggggcatccgaatcaaaatccaaaaacttgctcaactgcttcttcatgcctgccatattgcgctgcaatgtttcttcagtgagcagattgcgttccgctgacttaccggaagggtcgccaatcatacccgtagcaccgcctatcagtgccaacggcttatggccgcaacgctggaagtgacgcaatatcatcacactgcaaaggtgtccgatgtgcagggagtctgccgtagggtcgaaaccgatatatgcagtcacctgttcctttgccagcagttcttccgtacccggcatcatatcgtggagcatgccacgccattttaattcttctacaaaattcatcgaatgattaactattaattatttgatttatactttgtctgcgacaaaagtacgactctttatccgaacaaacaactcttattgtttaaaaaagactttggcgatattttcccgtatcgcttccgtgagttccgccaaagatacgcgacgggcttcggctgcccggctatataaatccgcaaccggcacggagctttcgtcagtttccagaaacagacggccggctggagttatccgcagcgcctcttcctgatatttctccccgaaagagagataaaatccatgcctcagacattcctccgccagagccgctttcccgcgaaaaccatgaataatccaggggttggccggctttatctgctgtttcaacttcagcaactcactcatagcctttaccaaatgaatgaccaaaggcttgtcaagctccacagacaaccgcgcctgatattcaaaaacctttatctgcacagccatcggagcatcggccaatttatccagtccggcttcccctatggcaagaacctgcggatgcccggctaaagaagccaaaacattcatttcattccgaacaaccggagtagcggttgccgggatatgccagggatgtatacctaccgaataccacgcccccgcttccggaacaaaagtatcgggataacggttcgcaatagccgttccgggcacaggcggcaagcgatgcgtatgtatatcgacaggaaatttcatggaacaggatcatatccggaaccaccccagggatggcaacgcaatatacgttttaccgccagataaaggcctttgaaagggccatgtttcttaatagcctcaactgcatattgagaacaggtaggagtaaatctgcacgaaggggaagtcatgggcgaaatacacttccggtaaaaataaataggaagcaacagcagatatgaaagcaggcgtttcatggcttcataggcgctacggctgccacattcgcatccgacacggtagctttctccacaatacgcgccaaagcaatcttcaccctctcttctattacggacgattccgtcagctggtcggaaaggtaaataaaggcaatgaccaaccggcacttcttttctgccaaagcgttcaacagttcatgtttgtttacacggtaagcctcgcgtatctgacgctttacgcggttgcgcttcaccgcacgtttgaagcggcgcttcgaaacactgataagaatggaagcatccgcctccagctcctctaccggcaaatacaccacgcgcaacgggaagaccgagaacgaacgcgaaccgcccgcaaacatcttctctattatcttttttttatccagtctttcgactttatgtaaggtattcgccatgaagtataaggtataatgtaaaatatagagggggatatgaaaaaacgggctacaggtagtgctgctaagattccgcagtctgcccgccgcccgttattgcttcgttacgattataaatgtatccgacaggcttataacttataattcataactcatacttcttttcactttcccttgttgttctcctttatgaacatatcaagcgctgccgtcatagagggcgcctgcacactgggagcttccaaatccaaacggagtccggcatcacggacagcctgtgctgttgtagagccgaatgttccgattttaatctctttctgctcaaaatccgggaaattcttcttcaaagaagacacaccggcagggctgaagaataccagcatgtcatagtcaaacttttcatccggagtaaaatcattacttaccgtacgatacatgactacttccgtatgctggattttactcttgtccaacaggttcttaatatcgtctgtatgtacatccgacatcggcaccaaatacttttcagtcttatgctttataatggaagacaacaggtcatcaaactttccggtatttccaaagaaaatcttacgcttgcggtattgtacatatttctgaatatacaaagcaatcgcctccgtcacacagaaatatttcatggtctcagggattgttacgcgcaattccgtacaaagatgaaaaaagtgatcgattgcatgacgcgaagtgaaaataacggcggtatgatccaatatagagaccttctgctgtctgaactcttttgctgaaaggctctctactttgataaacgggcgaaaatcgattttcacaccgtacttctcggcaatgtcgtagtaaggagatttctctgatgccggtttcggctgcgacacaagtactttcttaattttcaacgtcctaaaattttattatcaaataatcgtttagttgtatcactccttggtatagcataaaacaaggcatgatttcaagggcacaaaagtacaaaattaaaaggaaactgccatgtaaattgctacaaaaaagcttgaaccacttatagaacatcaatattttagtaaaaaaggctaaaatcaatccaattattactgtaagttgcagacttaaatcgaaataaacaataaacagcacaaacgggaaaagagtgaaaccaagataataaagcagggtggaatatgactcaagccagagagtcgtagtactttcgtcaaaaaaaatccagcctaacacagagtataaaatccatttcagaaataaatacaaaagacttatcccgatataaagccccaacaacgcaaaaggcggaacatgatgcaccaattctggctgaatatcattgcagtaattaaaaatgcagaccccggagagtatgcaagtctgcaaaatcaacaatagcaggtagcgcatatcacccgccgttgaggttgcaaatatgctggtacgctcacgatgcaacaggaaatcctttaccagctgcaacagaaacctacggctacgggaaagcacataggccgacagaaaaaaacaacatagcagcacaatggtgatgccgtcgtccattctcggagaatagggaataggcacaccttccgctccaccgggtatccatgccgccaaccaactcatcatatcgctgcaaacttacggatagaggcatcccacaaaggtacggtatgtaccagttcaaccgcttccccggctgtcgcggctacatgccagatggcactgtgctgcgcacgcatgaagttttcgtccacagccttctgcaacatagccagcaacgggtcgaaataccccttgatattcaatatgactatcggattcagatacagtcccaattgtttccaggtaatgacttcgagcaattcttccaaagtaccgcaaccgccgggcaatgcaatcacagcatcgctcaaatccgccatcagttgcttgcgttcatgcatattttccacctctacaagcttggtcagtcctgtatgatgccacccctgctcaatcataaaacggggtatcactccggtcacctcaccgcctgccgcaagtgtggcatccgccactgcagccataagtcccatattaccggcaccgttcaccaaacggatatgccgctgccccagcaacgttcccagttcacgggcggcattaaaaaaaacggggtctattttagtgctcgaagcactgtatacacatacggaggttatcttattcatcatctttcagctatatcaattattaccttgttgcaaaggtatatgattttaaggagatttgaaaaaagaagctgctcattctgccccggaatattccgaaggcagaaaggcagctttctataataaatagctgtaaagctatgctgattactgttttctttaacgaagaacggagaattagaggccgaaagccgcttttaccttatcaacgtaatccagtttctcccaggtgaacagttctacagtcacgtctttatcgccttcatagcgagacttgaagtgtttggtgacaacctgcggctcacgtcccatatgaccgtaagcggctgtttcctgatagatagggttacgcagcttcaaacggtcttcaatggctttcggacgaaggtcgaaaagctcatcgatctttctggctatctcgccgtcgctcatatttacatggctgcgcccgtaggtatttacatatatattgatgggacgcgccacaccgatggcgtaagatacctgtaccagcatttcatccgccacaccggcagctaccaggttcttggcaatgtgacgtgcagcgtatgcggcgctacggtctaccttgctggggtccttaccggagaaagcgccaccgccgtgcgcacctttaccgccgtaagtatccacaataatcttacgtccggtcaaaccggtatccccatgaggaccgccgattacgaatttgccggtaggattcacatgatacttgatattatcgttaaacagcgacaatactttctcgtgatggatagacgcgatgacacggggcatcaggatattaacgacgtcgttacggataatgcccaacatctcctcgtccgccttcaactgtgcagcttcgctgtcgtcggcaggctgaatgaaatcatcgtgttgggtggaaactacaatcgtatcgatacggacaggattgccgttatcatcatattcaatggttacctggctcttggagtccggacgcagatacgtcatcacctctccttcacgacggatatccgccagcacttgcaggatacggtgggcaagatccagggagagcggcatatagttttccgtttcgttagtggcataaccgaacatcatgccctggtcgcccgcaccttgttccataggatcctggcgctccacaccacggttgatgtcggggctctgctcgtgaatggcggaaagcacgccacacgaattgctctcgaacatatactcgcctttggtatagccgattttcttgattacttcacgcgcgataagttgaaggtcaacatacgctttggttttcacttctccagccagcactacctgtccggtagtaaccagagtttcgcaagctactttcgaactggggtcatacgccaacagtttgtcaagcacagcgtccgatatttgatcggccactttgtcggggtgtccttccgacaccgattcggatgtgaataagtatcccatttcaattagaaattaaaaatgaataattaaaaaggagatgaggaaagcgtcattaatgagtaggtatgcaaatcccggtacaccggagtaccgtcagaaaaggatgtgttttagcatttttttccgtggttgcaagctacccaaatctttccacatatcgttttcggctgcaaagataaaggttttatgggaatatggtacacaacgggcaaagtattaactaaaaaacacgcttattactgcaaaatatctatttttgcaaaaacttaattctaaattcaattatgagaaaactgttatggatatgcctgttgctaatagcatcaattgctgcaaaaagtcaagagcagagcgaatttaccgtactgcaatggaacatttggcaggaaggcaccaaagtaaccggcgggtacgatgccattgtcgatgagattattcgtctgaaacctgactttgtgactttcagcgaagtaaggaactataataacacccggttttgcgaccgtatcgtccaatcactgaaagcaaaaggagaaacctactactctttttacagctatgattccggactattaagccgccatccgataacagactcacttaccatttttcctgagaaagacgatcatggaagtatttataagatgacaagcaaaataaaaggacacaaaatagccgtctatacggcacaccttgattatctgaacgatgcttattataatgtacgcggatatgacggttctacatgggaagaaattcccgttcctcagacagtgctggaagtactgaaagtaaacgacgcctctttacgcgacgatgccattaaagagttcattgcagccgcccgcaaagacatagcagaaggaaccatcgtcattttaggcggagatttcaacgagccctcacaccttgactggatacgggatacaaaggatttatacgaccacaacggtctgattattccttggacagtacccctaatgttagacaataatggcttcattgacacataccgtaccctgtatcctgatgtattaaactatccaggtttcacttttcccgcagacaatccactggttccggtagaaaagctgacctggacacctaaatctgatgagcgcgaccgcattgattacgtattttattatccttaccctgccattgagctgaaagatgccgtaatattcggaccgcaaggaagcatagtaaaaagccaacgaacaagtgaaaaatcaaaagacaattttttattgcctcaaggggtatggcctacagaccataaagggttgctcgttacttttgatataagataaagacataaagttatttctatgttcatattataacaaagaaaacaagcctattcacaacaactcccgcatctttttctttaatatcggatgcaccaggtccggtgcaatctccgccaacggctccatcacaaagcggcgttcgtgcatcagcgggtgaggcagcttcaattcgggagtatccagcacccggtcaccgtataaaagcaggtcgatatcaatcacccgatcgctatagaccccgcctacagacttatgcgtacgccctatctcgcgttctatctcctgggtgagatgaagcacggacaaaggcggaagaagcgtttccacgcaggccgccgcattcagaaacgtatgctccgaagaaaagccccacggagcagtagcataaaaagcggacagggaaacgactttccctacccgctcttctattttccggacagcgaggcggagattgtgctccttgtcgccgagattagttcctaagccaaagtaaacgtacatcatttaagtttagtgattagtgttcagtgattagcgattagtgccctgcggcgtaataacgcaacctgcctgcatagtgctaatcactaatcattaaacactaaccgctaatccccaatcgctattttacctgtctgttatcaacatcgcatctccataagtaccgaaacggtaatcctctttcaatgccacgttataggcttccatcacctgctcgtaaccgccgaaagcggcaacaatcatcagtagcgtggaaagcggcatgtggaaattggataccatcgcattggccaccgtaaagtcatacggcgggaagatgaacttattcgtccagccttcatattccttcaaatggccgtctgtgctgacggtactctctattgcacgcatcaccgtagtacctacggcacacacctgcctgttcaaatccttggcacggtttacaacctttacggcttcttccgtaacaatcatctgctcggaatccgtcttatgcttggtaaggtcctctacatcgatgtcgcggaagttgcccaaaccggcatgcaatgtaatataggcaaagtcaattcccttaatctccatgcgcttcatcagctcacggctgaaatgcaggcttgccgtaggagccgttacagcaccttcgttacgggcaaagatagactggaaacgttccgaatcctccggttccacgggacggttgatgatgctgtgcggcagcggcgtctcgcccaaagcatacaatgccttcttgaactcgtcgtgcggcccgtcatacagaaaacgaagagtacgtccacgtgaagtggtattgtcaatcacctcggctaccatagagtcatcttcaccgaaatagagtttgttgccgatacggattttgcgggcagggtctaccagcacgtcccataagcgcaactcctcattcaactcacgcaacagaaatacctcgatacgtgcaccggttttttccttgttgccgtacagccgggcgggaaacaccttcgtatcattaaagataaatacatccttatcatcgaaataatccaaaatatccttgaacatacggtgttcgatttcgcccgtctttctgtgcagtaccatcaggcgcgactcatctctataccttgtaggatgtaaggcaatcttctcttcaggaagtttaaacttaaattgcgacagtttcataatcagttatgagttataagttatttattgtttatttcagtatattttttagtcataaatggcatgagttatccagcagtatgctccttcgtagcaaataacttataacccatcactcataactaaatcctgcccgtctatccactctttgaaatcaagcggattcagacagtcttctatgcggacatcccccacacgggtacgttccagggccgtgagatgagcaccgctatgcagcgcttcaccgatgtcgcgtgccaaggcgcggatgtaagtgcctttgctgcacactacccgaacttttatttccggcaggttgcattccagcagttcaatctcgtcaatcaccagcaacttgggcttcagctctacctcctcacctttgcgggcaaggtcgtaggcgcgcttgccgttcaccatacaagccgaaaaagcaggcggcacctgctgtatctcgcctgtgaacttcttcaatgtctcctccaccagctcccgcgtgatatgctccgtaggataggtagcgtctatctcgtgctccaaatcataggaaggggtggtagcgcccaaccgaatggtggcgatatactccttggtatgatactggaactcctcaatccgctttgtcgccttgcccgtacatactatcatcacgcccgtggcaagcgggtcgagtgtaccggcatggcctactttcaacttctttaccttcatccgccggcaaatgtggtaacgcgcatgccctacgaccttgaacgatgtccaccccagcggtttattgaaatacagaacttctccctctttaaaatccatcatcacaccacctctaaattgtgtcccgtaagcaacagcagaaggatgattcctccgacgatgatacgataccatccgaatgccttgaaaccatatttcgttacaaagctgatgaagaacttgatagcaagcaaagccaccacaaatgccaccacattgcctattatcagcgccggcagattattcatgataatctccgttcctccgtccagaaagagtttcagcatcttatacaccgtagctgcaaacatcgtgggaacagccaggaagaaagagaactcggccgcagccttacgcgtcatcttctgtgccataccgccgacaatcgttgccatggaacgggacacacccggtatcatcgcaatacactggaacagaccgatattaaaggctttcttctccgtcagaacggtatcctcactgtttttcgagaatatcttgtcacagaacagcatgaacacaccgccaatcacgagcatcacggccactacggtcacgctctccagcatttcgtcgaccttgtcgctgaacagaaatcccagcacagccgccggaacgaacgccaccagcagtttccagtaaaaatcaaacttatgcaggaagcgtttcagcgcggaagtatctgccggaaccggagtatagttcagacggaagaaacgtttccaatacagccagaccaccgaaaggattgcaccgaactgtatgattaccgtaaaggctttcacaaattccgtactctctatgcccaacagattttgtgtaataatcatgtgtcccgtagaagaaaccggcaaaaattccgtcagtccctctacaatagcgataataatcacttcaagcgtactcaaatctcccatagttattcttctgttttatcttctgttttcggtttacgtaatactgcatatatcataaagacaaaccccagcaggcataccagcggcgccactttaatgcgtcttacactaaagatatccggctcaaagtgtgtcggtgtggatacgggaccggtcattaagataaaaccaagtatcactaccgccatgccgacagcaagcaaaataaaattggtcttgtcgaaagcgaacttctgtttactcatctgtttatttactatttaacgatttactatttactatctgaaactttgcttttcggaaagcagtgttatatgtaatacagggtgcttgccttcattttcagatatttgttgatggaaagcaatgcacacaaccaggtaataagcactccgaacaccagtacggaaacagacaccagcagcatcacctccggagtgataaccctgatcagttccggttcgtaagaaaccagccaataggcggctccccacaaaatggcatcggcaatgacagccgacaatacgcctatccggaagttgcgccgcaggaacggacgcctgatgaagccccagcttgcccccaccagcttcatcgtatggataaggaaccttttggagtaaatggtcaggcggattgtattgtttatcaaggcaaaagagatgaaagtcagaatgactgccagccccagcaacatcagactgatattgcggatgttctcattcaccgcatcaatcaggtctttctgataaagcacctcctgtatatccgtattcttcctgattttcttctctatcttggcgatgctgtccgaattggcgtaaccggaatgcagtttaatttcaatggacgccgtaaaagggttatagccgagaaactcctgcgggtctgttcccattgcctcggtctgctcgcggagcgcctgctttttggagatatactccgtttccttcacaaacggttctttatccagttttttctgcaacttcagtatatcgctctccttcatgtcgtcgctgatgagaatggagaagttgatattctcctttacgtatacggaaaggttgtgagcgcccaatacaaagaacaccaccagccccagcagcagcaacaccaacgtagtgcttatgctggatgtgatgaactgcatatcaaaacagggcacagacttgtttttagctttcttattcattttcaatcccttctcacatttatcactctaccgttttttcgctctttttcttacggaatacgtaaatcatggagctgctgcgttctttccttaccaacgcatggaaccatgccagcgtaccgacaaccatgccgcgcagaaacgggcacgaacggcgcatgttcttctccgtcaacatagacacgtaaaacgcgtcaaacggcatgggatgccgctctgccagaataaagccgtgtctggagcctaatttctggatagtggcgggagtgaaatgccacaaatgacggggaacatcgtaggcagcccaatatgcaccgtactttctggcatcatatgaagaacagttgggtacggccactatcagcacacctttgtccgtcagcaacgagttcaaggtttcccaagtcccgttcaatgcttcaagatgctccattacatgccacaacgtgatgacatcgaagctccccggctcaaaatccttcaacgcagtatccggcttcacttccaatccgaaatgttctttggcaaacacacgcgctccggcattcttttcaacggcttccacctgccagccggcacggttcatcgtatcggcaaagtaaccggtacccgtacctatatccagcagacgccccgtcttgcgatgcgcttcatgcgctaccagacgcgctttccgcttcagcatataactgcgtacacggtggtatacggagttcatcgctccttttttcgtatccgagtgggaaatataatcgggagtttcgtaatagcgtccgatttccgcttccacaggaaaatcctgagtaaagataaaaccgcaatcccggcaacggcacaaatggaatgcctcgcccgaagcataatggtctatgcaggtcaaggtacgctccaaatgcgttcctccacataccggacaagcttttatagtgagtttattcatcgaacgtttaccgataaggaaatgcagcctgaaacggacagaccgcattaatcctaaatttggtgcaaaataacaaataaaaagtgatttacaaggctttcattaaggagatttaatattaacatgaaataaaagtccgccctactgcaacccgatattgaaaagacagagaaatcccaactcaggttttcttcacaaaacggaccggttatcacctttgtgtccgttcttaggcggacaactgtccgataatgaacagagatgaaaataaggaatacactgttaatcaaacagttaatctattggcacggttattgacttttataatgcgaagacgttcgagaaaaaaagacggaaaaagcaactttttatatcggcaatcacgtctaacggtaaaacaggaatagtaacaataaaaaaacaatattatgaaaactacaaatttattcaaagcagtcgcattcgtagcaatggttatcgtaagtatcatgaactcagaagtcaaagctcaggacagattcattaccaatgaggaagtacagaatgacctgatagtggcaaaaaccatcttcagacaaagcggaacttacctctacaaccacatgcgttatgaatttacatacgatgacgaaaaccgcctgacaaataaaaccgcctccaaatgggacagcgtcaaagaaaaatggatgccttatttcaggatgtcctatcagtatgccgacaatgaaatcaccttatcctacgcccgctggaacgaaaagcatcagtcttatgataaagatgtgagaaagagcgtgtacgaaatgaatgcggagaatatgccggtagcctacaaaagcaaccgcatataccacacggtaaacctactgacaatggcagaataatgaaaaattaaagttaacaatacattaataaggggagtacggtccgtgaggttcgtactccccgtctttgtaccttactcagagttcttttacaaaataagtcaaagtaggcaaatggtcactgtatccgttctggaaagtagttccggagaaagtgcgcaacggatagcctttatactttccttcctgctggataaggaacggacggttaaagacttccgatttccaaaacttcaatgtactgcgatcctttcctatcagattacccgaaacaatctgctggtcgaacaagttccactgattctggtaacagagcgaaccgacgccttgctcaaagagcttccaggtagcattataataaccgccgggcttcacttccctgatgctcttcacagctcccagcacttggctgcaactcttgttatcggggtcgtcattcatgtcgcctacaattatcacctttgcctgcgggttatcggcatgcagcgagtcggctatatgacgggtgatgccggctgcaaactcgcgcaagggtgatgatttggaaccgccatagcgtgacggccaatggtttacaatcatgtgaaaaggctctcctgccaatataccgctcaccaaaagctggtcgcgtgttttatagcccggcatgtcgggcttggcaaacggataagtacgtgcagacacaaaagtaaacagtcgcggattgtaaagggcagccacatcgatgccacggtggtcgggactctcgaaatgcactatccggtagcccaatgaagcgataggctctgtctttaccaggtcctccaggacttttttgttttctacttcggagatgccgataatggcaggtccggcaggacaatagtcacgcgccaattgtgaaatcaccttggcaacattctgcaatttctgttcgtatttgacctgtgtccattcgtacttaccgcccggagtaaagtcatcatcacccggattatccggattgtcttccgtatcccacagattctccagattataaaaagcggcagcatatacacccagcttgccctgtgcgagcaagccggtggacaggcataataccaaaaaagctgacaatatgagtcgtctgttcataaagcgcaattttttaattaccggtaggagtaggttcgataactgttccgccgttaccggtattgccaccggtaaccgctgttacttttacattttgtatctgccacctcaaagcattagccgtcgaactcttataatggaacgcaaattgaattttcttacctgtataagtatccaatttaatatcaccggaagcaacgaacttattatctttccctgtagaataggtaggaatgccgacttctgtccatacgtctcccccttcttctcttacttccagtttcaaatcttccaaatgcgtatcggcagcaaatgttttaaaggtgtggtcgaaagtcaagattacactatttttgcctgtcaaatcaagtacaggagaaacaagacggctttcagagtcttgattagcgtcattaacataggcgcttgccatcatataataagtttcattatagttagacgctttccacacatgatcacttccctgcggaagctggacatcctctatggtaaatgcaccttgcccgctctccttgccaaaagactcttcaaggattgtcaccatctcctccggctgttccggcgtctcatctccccccggagtttccgtaaagtccgccacatcatctgcacttcttaccgtaagttgccagcctcctttgaaacgtcccaggataccggttacgcttccttttcctttcggcaactgattggctgcaaagttggcatacgagctggtgcgtatcataatgacattcccgtggctatcctctatattctcttccccatagtcatcctccggagcaaaagtgccttttccgccattttggaatgttacgccggtaaatttcaccaatttgaacttatagccgttcacatcggcattcaccttgctgatatcatctattacaagcggagtcacattctccggatttgcccaactgtctttcttcacgtgtgcctgaaactcttcccacggtgtacggtaaagatacccgtcggggtgtcccagttgcaactcatcgccatacatggaaaggctcaatcctttcaggtcgatataaaccgtctgtcctacgggatagtaattatacacgctgttctggtccacttccatttcgatggcgccggtttcgtcctgcaaataaatcttcttgaagatatttcccgactcgtcattggcagtgataacggctttcatcactttttcctcgccaatggtatagggagcatcctcccctactgttgcccccatagcacgcagttcctctatcgtggtattggctgccggaccatcatacttgggctcgttcaaaggcggcgcatcataatcgcgctcgcaggctgcgaacacaagagaagagataagcaataagctgattctattgaaaagtttcatattcttataatttttctgattatataggattggttaaaaacgataacttacgttgaggaaacaattcagtccctgcatatagtaatacttgccgccaaaacgcgtaggataactcaggtcggaacggccctgttcatagccgcccgtacatatatccttcttgttcagcaggttgtttaccgaaaggttgaagttgatagactggcgtccgggcagatagaatatcttacccaccgaaatgtccaccgtataagctgccggaaagcgttcctgcgtagtcagtgtacggtaagcctccatctgttccggattgtagggattgacggaagcatagttggacgacaggcggcgcaacggtgcaacctcgatataattgcgggcaaaaccgttgacattggctcccaggaaccagtagttcacaaagtaacgcacaccgaaagtgccggcaaactgcggcattccacccacataaacatctttcatgtacaccttttcctgatccgttatcttaccgttttcggagtgcttcacaccgtcggggttattgctgtaataatattcggaaatggttcctgcaaggtcgaagctccaatggtcgtccaacttgtaggtagcccccagttccagtccgcggtgaatgcggtttacaccgtacaacacgtgattgatgaatgtgccctctatgccgtcgtaataactgttacgctccatctggtcgtagaaattggtttggaaaacaccgatacgtccagccagttggggcatggagaatacatagttgaggtcggcgctgaagatgcgtccgctcttcatgttgtcgattgtgcggtcggtgatacggggtgagatatacgcctcattgggcagcggcgcttcgctgccgtaactgatgttggcggtcagcatatggcgcccgttaaacttataagtgagaccgccctttacggtaatatcggtaaactgatgacggatacccttgccataggaactgtccggatagcgtccgttgcgcatctttccgtcgcggcggaaattggtataagtcagcttggctccatagtagtagtcccagtgccgcgaagtatagcggttcaccgcccaggcatttgccgagtagatgttcagattgaaattgtaaccgaagataccgtccttatacactttacggtccggacggttcaagtcgttctgcaacttgtcgtggtcgcccgaaaaatcgcgttcggcaaacttgtcgatatccagcacatagttgctgcccagcaggtcgtctaccgtcttgaactggcgcgactgcgtaaagcgcgcccctactcccgccgtcaaacccagatgacggttaaactgcttgttcagtgtggagttgaacgaggtctccaacaggtcactgcgacgctcttccaccatatatacggcagcaccgttaccggcacgcaggttattggcattggctagataaaggttgtcccagtttatctgggtgaaatcgggacgtccgctacgccataagtcacggtactgcatctgcatatcctcgtcttcaaaataagagggcaggtagcgatagtagtcgggacgcgggtcgggagcgttataccagttcagcgccgtattgccatagcgtgcataatgcgcacccacaccggtggtgagcgttgtagtatcgtctatcttccagatatgcgagataacggcggtcgggtcgaatgcggtcactactttcgcattgcgtttcttgccgttctggtatccccaattaggattgtaaaggtaattgtcggtcagctcgtagacctcacggtatgagttaccttgctgtccgcgctgtacgggcgatacgaaagcggtcatcgaaaggctgtgcttgccgccctgccactgcttctcggcagagaaagcaagagccaggttgttgtaaaacgtaccgtctatgtttccctcgtgcgaatagcggccacctgccgatgcggtaaacgcccatcctttttcgttgagtccggtggaataggtaaacatgccccgcaggtagtagttacggttggtatagctcacggtagccttgccgccgggagtataggacgatgcacgcatatttatattttcggcaccgcccagtgctccgaaagtaaaggtagagggtgcggtgaagttggttacgtcaccgttgcgggtcatgtcattcaatgctccaacagaggcataattaaacactccgcggttctggtcattaaactccacgccgttaatgtatttcagttcctgcgaaccggtatagccgcgcggcgagaaacgggcgggcgacaactggtaagcggcgcggttcagaaagacatcgttagagaggattacggtggagctcacatcctgcgaagcgttctctacatcgtcatccaccatgcctgcgtctatcacgccaatcatggagatgtcttcggtggcattcagctcggtcaccttaatgggctcgagttctgtaacgcccagtttttccacttcaatggttacactcttcggagtaatcaatacggagttgagctgtatgacatggcttcccggctgcaaattacggagaatgaaattaccgtttgcatcggtagtaacctgtctgtcctgcccggtcagagtgacgatgactccgggtacaggctcattgctcactgctccgactacactgcctttcaccgtacctgcactttgagcaaaggcgagacaggggaagaagaatgtaatgaagaacagtaattttagtttcatacgttaattggggtataataatgagtgatttaaatcataatttgtgggtgtgccgaaagtctgataaaccttatatcctatcattctgaatagagtgaagattctctgaatgaccgaatgtaaaaaattatcggtattttaacacacccacacaacaatgtgaattaatcgcttacttcaagcaatactaataaaatatcattttgcgatacctgtcagactaacattatcaatacgataaccagaggtattagttgattcttcactggtaaactgaatataagaagccccatcaggtattgccaatgtaacagattggtacttattttgctcaacaataggcatatcgggtacatctacatcacccttatctgttaaaaccttaataatattttgatttcctgccccattagcagttatttcatattctaattttagacctgtataatcagttgcaaaaccctctatcttcaatgcactgttttttcctgctgcaaaccatacatgaccatctaatgtacttgtagaacgtacgcttgcattactataagatcctgacattaatgggtcggtaaacacgagattagcattttcccatcccttatagacatctacagaaggccaatgattacctttttgaggcgttccgaatccttcagagaacaaaacggttccttcaccgggttccggttccggctctggttcaacagtgcctccaccttcaccatcagctaccactttcacttcatctatttgccaagtaggagcaccatcagcagtacttatatatctgaaagctatttgcttattctttcctgtatatgcacttaaatctacagtggctgtcacatagttataatcattacctgttccataagtcggaatctcaatttgagtccatcccgtagcatcggttgtaacttccgttccttcatcagcaatccaaagcgtcatttctttggctttatccactccgtatttatgagcatgactaaatgttaaagtagctttcttagcagcagataaattaagcacgggagaaaccagccacccttcggaaggtttattttctttattaataaaagcactggctttcataaattgctccgattcttgagttaccttatctgtgtactcagcccacgcccaaacacgattacctcctacgggtataacaagattctttatagcaaatgctccttcatttgtatcgaacttctcatccaacaacaccttttctccttccggcttctcaccgccaccttcaccaaagtccacattaatatcgccaccaggctggtctgtccacgattcaatgcttgctccgcccatagtaacggcaggtttaccgttttccgtggacaaagtagcagtgtacgtgtatttatatccggcctcaaaaccggcaccaccatttacggaaacaggccattcgaaagtcttaccgtccagcacgaatgtcatcttgacgccatccagtgtagtggtaggcaggataatcgcctcagcagtagtgccatcggcactgacattcatgtcgatattggctttactctctttagctgccagcgtaccgtcagccagattaaaatcggcttgtgtattcattccggaaagagagattttcaatccgcttatatcgggaagagtctcatcgctaccgacagcaatcacaatctgactcagtttatgtttgaaagccaggtctacagcctctccggcagcaattgccttggcattatcagaataaagcaagtctactttggcagggtctgcctgattatctacagacacggctaaagtcttaccgtttaaagaggcggaataaggataataagcaatgaaatttgccgttccttcttccggatacctcaatgtctgtcccggagcagccgtaagcgtaccgccgtccgatgcaacatattttttgttggcaaattcagcagtttgcgtcgtcataaagatacctacttcatcaccattgctccaaacgtctttggaagctttggtctgcaggccgtcaatgcgggaattgaaagtaacgctgttactgtccaaccattcactattgtcatcattgttagtacatcccgtaaaaacaagggctgacaatgcgcccataatcaataaattactgactctcataatgatttgtttttgagattggttttgtttttatgttgtcttaattgagtacctttgtacagtaggattattgccatttggataaatccaattggctctttgtgctctcatcaagtcccgggaagaactcaaatccggtattcttttccaaatcactgacggaaaccgcatatttcatataggattgagaatctgtatagtccctatgttgcatccagaaagcaatcgtatgatacttgccgcctatcttacgcgccacagccttaaaataataggacggaataggaatatccttgccatcattatcctttatagatttttcttttatccaagtagcatcatctgaaggcggtactgcaccggtcacaacataaactgtatccgaagcggtagaccaactattaattctatgttccaaattcatccaaatagctccgttaaatttgtcttgtctttgcggagtctgattggtaaaataaaatgtctgattattcatctccatggtagctacacggtcattactcggtatttgatgtcctcttctataaatcttcccaccataggattttgaaaccacagcttgaaattcattctcccccacaagaggatcagaaacccagttatcctttcggtctacatttttctcggtataacaccgatgcaaaggataagccacccaatgtgccatcttcatctttttatcatacagcatactataattacgtatcatctgtccctccatatccggtcgggcagtacccttatatttttgctccgtattatgagtaacatacatcaaatcatgattttccatctgtgctttcgttataaccggcgtctcaaaccacttggcatacttaggcgcttcagggtctaccgttgtatttccccctgtattactgattctcaaattaagcgtataccttgctcctgcctcaatatttcccgctatatttgtttcaatctccttatctttcccgttgacggataatgtaattttcagttttccttcaaaggattgcggtatcagcacagcatccgcctgcgtacactctttattgacgcacatggaaacagcttttttttcatttcccaattcaatgttatcactctctttcgaaaggtctatggtagccttgcttatcagtggctgcaccgttgctttgattcccgttaacgaactgccgtcggcactgctcagattcagcaccagttttgccagcaaatggcggaattgaagattgccggtaggggatgtcgcagtcctgcctgtcaggttaacagctgtcatcaggtcaatatcctgctgacggctctggtctgtcacgtcaaggacataccgggtatggtccgtcacttgctcatcatacggataataagcaatgaaatccaccgccgttccgtcttccggataataaacggcattgcccgcttttcccacgaaattgccgtcaccccgtgcggtgacatacgctgcattggctttaaggacctttttattggcattgtcgagcataaaaagaccgatcacatcattcgcttcccacgaagcattgaccgctctcgacatcaccctgtcatctatgacagatgtaaatgtggcttccgcagcctgattaccctgcggcaattcagcaaatttactttcacaagcctgaagaacgataaacaaggatagaaatccgattgcacttttaattgtcatactgaaaaatattaaatatcttacaattgtttttattgaactgttttctgtttttttaaaataagtgcataaaattataaaataaaatacacataaataaagacccggaacaaaatctgcatagcatacagtaaaaaagtccttttttaccaaaaatatgacaataatatgaaaatataatgtcaaatataaacccttcccattatagacccaacgggaaataaacaagaaaataaaaagaataggataaaaacaacaactattcaggttagaaatatcaagtaaaaaaacagagcatcaataataaaaaatccatttaacaataaagatagcgtcaatcgaaatatctaaaaatgaataacctgtagtttgtttttgaaaagtgaattatttaaaaagaaaatgccgtgagtttgctcctgaaatgccaggcatttcaaacacaaatgccgggcgttttcatgacaaacacacggcatttcgggagtaaactcacggtatttcggaagcaaacccgcggcattccggaaacggaccttgcaggatagtaaaattgcgttttttacgcttcaaaccgatcagtatttatactgactggtattattatatttatatatatattatatatatatcacttgcggtaatattaccggtaaaattaccggcaatattaccgcaaaatcacacttcttttcctttcagcgttgccgaactgctttccgtgattttcacgttcacaaaatcgcccacgcgatgcgtacccctatcgaaaaccactacccgattctgctcggtacgtccgaagagctggtcgcgcgaacgcttggacactccctccaccaatacttcgtaggttttacccacgcagcgggcgttggcttcggcagaaaggcgattctgcaaagcgatgatttcattcagacggcggatcttcacctcttccggcacatcatccggtaaatgcttgctggcatacgtacccggacgctcggaatacttgaacataaaggcggcatcataaccgcattcttccatcagggaaagggaaagccggtggtcttcttccgtctcggaatggaaaccggaaaatatatccgtagacaaaccgcagtcgggaatgatacggcggatagcatctacacgctccagataccattcacgggtatacttacggttcatcagtttcaggatacggctgcttccgctctgcacgggcaggtggatatgcttgcacacattgggcacttccgcaataacctgcagggtttcatcgctcatatccttggggtgcgaagtagtgaagcggatgcgtacgcccggtgcagactctgctacggtgcgcaacagcatagggaaagtgacaacctccccgtccgccttctcaaaacggtacgagttgacattctgccccagcagggtcacttccttatagcctttagccaccaaatccgccacttcattcaagatactttccacatcacggctgcgttcccgtccgcgcgtataggggacgatgcagtaggtacagaagttattgcaaccgcgcatgatggagacaaagccggagatgtggttgccgcagatacgcgaaggtatcacatcgcggtaggtctccgttgtggacagctccacgttaatggctttctcaccggcttccacagccgcaatcaaatcgggcaggctgagataagcatccggccccaccaccaagtcgacatggtggtttgtaatcaggtcgtccttgacacgttccgccatacatcccaacacaccgacaatcagattcttctttttcttcttgagcgaatgaaaaaactccagccggtttaaaattttctgttcggcattgtcgcggatagaacaggtattcatgaataccgcatccgcctcttccagtgtatcggctaccgaataccccgccatctgcatcacagaggctatcacttcactgtctgccacattcatctggcagccgtacgtctcgatgaacaactttctgttgtcatcagcagttgcagatttaaagtctgctcccgtcatattttccattgtttcttatttttttagtttcgccgcaaagatacatcttcacgttcaataaagcagtgaaactgtggaaaaataacacttaacttcctctaattgacagatttctactaattaatgttaagtgactaaacattttccgagtgttaatttggcattattagaataaatttccatttttgtgaaatgaaagaaacattagattttttcatagttaaggtttaggttaaaaaaaataaggggagctgtgaagctgcccttttttaatgccaatttattggttacaatcagattaaataattacctttggcgatgtaaaaaacaaagaaagacttatggaagacatcttcaaatttctgttcgtgataggcatcattgctatcggcttcgtaagacaggccaggaaagaagcgaaaaccagtaccggcaacggtcccgccatgcctatgcctgatgcagaaagtccttttccggaaaattggaacggcgtaccctatgacggatataaccccgaaaaccccggaccggaagtaagcgcgccgcgaaagaaagccgcaaagaaacataagtccgctcccaaacaacctcccgtctgtccaaacaccgacaatatgtctcccgaacccaccgaggcctcatcccaatttgaaatacactcggcagaagaggcacgcaaagccatcatctggggagagatattacaacgaaagtattaatgcgattgaaaataagttgattccttacacgaaaaaataactataacattatggcatttaattacatttcagcagcagaagctgcaagcctgattaaacatggctacaatatcggcctgagcggatttactcccgcaggcacagccaaagccgttacggctgaactggcaaaaatagcagaagcggaacatgccaaaggaaaccctttccaggtaggcatttttacaggagcttcaaccggcgactcctgtgacggtgtcctctcacgcgtcaaagccatccgctaccgtgctccttacacaaccaaccccgatttccgcaaagcggtgaacaacggcgagattgcctacaatgatatccatttgtcgcaaatggcgcaagaagtacgctacggtttcatgggaaaagtaaatgtcgccatcatcgaagcctgcgaggtgactcccgacggtaaaatctacctgactgctgccggaggtatcgctcccactatctgccgccttgccgaccagattatcatagagctgaatgcagcacacagcaaaaacgccatgggcctgcacgacgtctacgaaccgctcgacccgccttaccgccgcgaaatacctatcttcaagccgagcgaccgtatcggacagccttacatccaggtagacccgaaaaagattgtgggcatcgtggaaaccaactggccggacgaagcccgctctttcgccgctgccgacccgctgaccgacaaaatcggacagaacgtagccgacttccttgccgcagatatgaaacgcggtatcatcccttccaccttcctcccgttacagtcgggcgtaggcaacatcgccaacgcagtattaggtgctttgggacgtgacaagacgattccggcattcgagatgtacacagaggttatccagaactccgttatcggactgattcgcgaaggccgcgtgaagtttggcagcgcctgctcactgaccgtaaccaacgactgcctgaacggtatatacgaggatatggacttcttccgcgacaagctggttctccgcccgtcggaaatatccaacagtcccgaagtggtgcgccgtttaggtattatctccatcaacacggccatcgaagccgacctctacggaaacgtaaactccacccatatcggcggtacgaagatgatgaacggtatcggcggttcgggcgactttacacgtaacgcctacatctccatcttcacctgcccgtccgtagccaaagaaggcaaaatcagcgccatcgtaccgatggtttcccatgtggaccacagcgagcatgatgtcaacatcatcgttaccgaacaaggtgttgccgacctgcgcggcaagagcccgaaagaacgtgcacaggcaatcatcgagaactgtgttcatccggactacaagaatatcctgtgggattatctgaaactgaccgacggcaaagcgcagactcctcactccatgcgtgccgctctggctatgcacgccgaactggcaaaaagcggggatatgaagaatgtggactgggcacagtataaataaagacagttccttccgttaaaaagacctttcaggcacgggattacgcggattgcacggatgaaaagtgcagcatggattaaactgaaaaaatccgtgcaacctgcgtaattccgtgcctgaaaaataaagttcacaccaaccggccattcatcggataaacatgtcacagactgcatcctggaatttacgcgcctccctgccggaaagcacattctgattcataatggcaaaagcaatgtggtgtccgttattcgccttcaaataaccagccaggcagtttatagccgtaaaagaaccggttttggcatgcacattcttataagaaggcgtccctttcctcatacggttcttcagtgttccgtccactcctccgataggcaacgccttatacagtttctgaaacacatccgtgcgtgaataagcaaatttcaagaaagcgactaaaagttcagaggagatgtagttatagttggaaagcccgcaaccgtctgccagattatagcggtcggggagataacccagctttccgattaactgacggacagccgaaagcccgtccgcagccgaaacatgcctgccgcccgtaaactgtgcacccaaacggcataacagagcttctgcattcagattatcgctctccttcattatccggttgactaccgcctgtacagaagtgctataagatgccattcgcactgaaacgctgtctttttgaaactcgcggaaagaataatccgacagacaatgaatgccttttgcccgtaaacgctccaggaaggtgtgcataaagaaatcctgcgaagagtagatattcaccgtaccggtacgcctcccgtccacattacccgataccgccagttcattgccgttctccagccagttgcgggatacgcggaaacgtccggcagagggggtacgggttttcgttgtattggccagcgtgtaataagacgaaacgggcgtacattccaaacgtgccgtatcaccttgtgcaccgggaaaagcggtcaccgtaaccactcctttatcgagcatcagcggcgacaggtacggctgaaaagaatggggcgtatcgtcccacagccagccgcttccccaatacagggagtctttcatggaaacatcgccatatatcctgccttgaaccacagagaaaggcagccgcgccacgctgccgaccaaagaatccagcgcctcgtcgtcaaactcagggtcgaagccgccgacaacgtatatatcccctttcagcgtatcacgctcaatcactcccttataccagacttccgtacggaaaggctcgtccgcctcaggacgcgcaagcgccgtaatcgtagtcagcagcttcatcgtagaggccggacgggaaagtttatccgcctgataatcatacagaaccttattggcggtcaggtcgtatgctgaaacagatacattggagcctgcgggcaattgatactttatcaatgtatccagttgcgaagacaaagagtttgtttcaggtgatattccctgtgcaggcaatacacagggaataaacgtcaaaatcaatacaatcgggaataaacaatattttctcatcttcttacaagctatcattcagtttctctgttatccggctgtttccggcaaccggacaacaaagaaacgataaccgccgcagaatcgcaagtcatcagcttcacgattttcataacaccccgtattttgtctatcaaagcgcttccttaaagatttcgcctaccgtaggatgcgggaataccatctttttccattccgaggccgtcagtttgagttcgacagccataccggccagcgtgataatctccgaagccggattgcccagcacatgtgctcccaaaacggtatcatcttccgccagcaacaacttgcacataccgttaatgccctcattctccgcgacaaatcgaccggaataagccataggcagcttgacggcacgataaggaataccctttctttgcaaggcctcttccgtatctcccacgcccgcaatctcaggattggtatatactacaccgggaatagccctgtaactcatacagtctttcttccccagtacggcatgtaccgccacttccgcctcgcgcacagcagtatgggccagtaaagaaaatccggttaaatccccgcaggcatatacccccggaacggaagtctgcatctgtccgtccacctgtatatttccgcgcgccgttttatctaaattcaggttctccaatccgaagcctttcgttacgggacggcggccgacgctcatcaataatctttccgcaattacacaacccgcaccttcggcattttcataatttacctgtatctgctgcgtgtctccatttccggacgcaacttcggacagtgccaccacctttgtgtccagcatgaatttaatgccgcgcttggcatactccgcacgaagcatggccgacagctccttgtccattccgcccaatatctcgtccagcatctcgatgacagtgacctctacccccagactgttgaagaatgaggcaaactccataccgattaccccaccgccgataatggccagcgactttggaagctccttattgtccaacgcatcgcgatgcgtccagtaaggcaccgtatccactccgggaatgggcggaataaatgtttccgaacctgtgcagagcaatagattatcgcattcataagtttcgtcaccgcacagaacatgattcttatctatgacggaagcctcgccggtcacgatggttacattgccggcagtcagttttcctttgacacccaacaccagtttccgcacaatcttctgcttgcgtgctataatcttggacaaatcaaacgaaacttccgacacgctgaccgcgtatttggatgcgtggcatgcattgtcatacgtttttgcagagtacaataaagtcttggtaggaatacacccttcgttcagacacactccgccaagattccgcttttcaaaaagcacaacactcaaaccggcctttccggctgtttccgcagccgtatatcccgcaggaccgccgccgataatggcaacttgatatttcatagttcttacatttatggatttctgcatgcaagatacgacaagaaattcagaaaaaaaagcgtaatgccttacataattatcatcttattgcgacatacgctgctcaagcaggcggataaactcttcctctttgacgggaagaagcgctgcacacttaccctcgccatacctcaccagaacatagcgcataacggcaaatccgcctatctgcatggaggaagtgcgctctaccgacgtaatatccttcagcaggatttccttcccccgtgaaaaccggccgaaaaacagcaacagtttattgtcggcagtaacggtataggtagtatgaatcaacttctcgatactgacaaccagcagaagcataaaaaggacagcgatgagaatttgcttttcccaaaggccgtaaacggctattgcacctgccaaagcaacaaacaaatactgtccggcagcgatacgcgcatgaaaaattcgattcattttatccggtttttgccgctaaggtaggtatttttacgaattaatgcccataagggagacaaggaacgtacttattttgtagttttgcggtgttaaatacacgaaactatggtaagaaagttcgatttcctcgttatcggctccggaattgccggtatgagttttgcgctgaaagtggcgcataaaggaacagtagccctcatctgcaaggccggcctggaagaggcaaacacttatttcgcacaaggcgggatagcctccgtcaccaatctggcggtagacaatttcgacaagcatatcgaagacaccatgattgccggagactggataagcgaccgtgcagccgtagaaaaggtagtgcgcaatgctccaggacaaatcagtgaactcattaaatggggagtgaatttcgacaaaaaagataacggagaattcgacctgcacaaagaaggcggacactcggaattccgcatcctgcaccacaaggacaatacgggtgcggaaatacaggaaagcctgattgaagccgtgaagcagcaccccaacatcaccgtatttaccaatttctttgcggtggaaatcattacgcagcaccacttgggcattatcgtcacccgctatactccgggcatcaaatgctatggcgcctatgtgctgaacgaaaataccggagaggtggatacgttcctctccaaagtaaccatcatggctacgggcggttgcgaagctgtataccgcaacaccaccaacccgctggtggccacgggcgacggcatcgccatggtctaccgtgccaaaggcgccgtgaaggacatggagtttatccagttccaccccaccgccctctatcatccgggcgaccgcccctgcttcctgataacggaagccatgcgcggctacggcggcgtgctccgtaccatggacggcaaggaattcatgcagaagtacgacccgcgtctttcactcgccccgcgcgacatcgtggcacgtgccatcgacaacgagatgaagcagcgcggcgacgagcatgtgtacctggatgtcacccacaaagaccccgaagaaaccaagaaacacttcccgaatatctataagaaatgcctcagcataggcatcgacattacgaaagactacattccggtagcccctgcggcacactatctctgcggcggtatcaaggtagacctggacggacagtccagcatccgccgcctgtatgccatcggcgaatgctcttgcaccggtcttcacggcggcaaccgcctggcttccaactcattgattgaagcggtagtttatgccgatgcagccgccaagcatgcgttgagcgtactggaacgttatgatttcaacgaagacatccccgaatggaacgacgagggaaccatctccaacgaagagcgtgtgctcattacgcaaagcatgaaggaagtgaaccagattatggaatcctacgtaggcatcgtccgcagcaacacccgcctgacccgcgcatggaaccgcctggatattctttacgaggagacggaaaaactgttcaagagcagcaaggccacccgcgagctttgcgaactgcgcaacatgattaacgtaggatacctgattacccgccaggccatggagcgcaaggaaagccgcggactgcactatacgatagactatccgcatccgcagaaataaacggttatggcacacttcaacgagtatctgaactttttggaactttctcctttgattaaacatttcctgcaaaacgggaaaaaacgtctttacaagaaaggagagttcttttgtcaggcaagtgaagtgtgccataacattgcctatatctcccaaggaggtttccgttacttctaccttgatacggaagaagacaaacatatcattggctacagttttgaaaaggattttgtggtagactatgagtcattcacaaaacagacacccgccattgtttatacggaagcaatcaaggcgagtaccgtctatcaattatcttataaccaattggaagcattttgggcagcaagccagcaaaaccagttattaggccgtaagattgcagaaaacctgttctgtatgacttatcaccggctattgagtctatatccgaattctcctagaatacgctatcaagaattattgagaagatgtcccgacatcgttcaccagataagtctgaaggaaatcgcttctttcttgaatatctctccatataccttaagccgcatccgacgggaaataactttcggataaaaagattaatttcttgcttcaaggcaagaaattgcaattttaatatatttatttttgtcaaaatattacaaactgctatctttgtaaatacctattatctaatcttatagcagactgacatgaaaagcagttgtatctatacatgtatacttttgtgcttgtacgtttgcaacttacacggacaaacacttgatgacaacattgtcattacacaatgcagcgactcctatatctttatggaagaagacggtattcctaccgtacgcaacagaaaagaaacatcctatgaagccacaagaatgggaactgcattgcaaccctacacctactacggagaattcatttcattggacggagcttccgccaaaggcggaggaaaggcagaatataaaagcatcacgccggaaaatgtcttcttcgacgacagcaaggtttgcttcttcaacatcaatcttgaccgtaaaggaaaaaagacggaagttacgtttaaacgtacttttcatgacctgcattattttacacgaatctatttgggtgaggattattttataaaaacaaagcaaataacattcatcattccgcaatccctctcccatttccggttgacagaaaggaattttactccttctattcactgtgaacgcggcatcaacagtgccggagactccttattcacttataccgtgacggacatgccggccatgaaagacgaaaaacatatgccggcatcgggtaaaatatacccgcacatactgataaccggctcatttaaagatgttcacgatatgtaccggtggtctaacggactggcacaagtagactgcaacatacccgaactcgacagtctattagcagaaatcaccgaaggctgccgtacggacatggaaaaaatacgtaacacatatgcctgggtacaacaaaatatccgttatatcgcttttgaagcaggtatattgggacacaaacccgatactcccgcagaagtgttgcgtaaacggtacggcgactgcaaaggaatggcaatcttgctccgtacattgctgaaagcacaaggttttgatgcccgccttaccgatataggcactgtagacatcccctaccggatgagcgaaatagctacacttgcatccgtcaatcacatgatatgcagccttatctaccggggaaaaacctattatctggatgccaccaacgaatatataaacgcggaattcatacccgaaagcatacaaggaagggaagctgtaatagaaaatggagaaaactgtatcgtgcacacattgcccatgctgaacagcagtgcatctatagacagtttgtcctatatctgtagcctatccgacaaacaagcgaacaaagtattgcagggcaatgcaacccgtagttggagtggagacatgaaagaatttttcctcacagcctaccatgaaaacgataaaagcggtcggaaagagtatctttcccgtatcctgaccggagataatcacaattatcagattaattcggtcagttggatacagcaggaacctcaacaggaatgggctgctctgaccggagaagtaataaacagcagtgctgtacaaatagccgataacgagttttacatagagctggaccttcacaatgacctgtttgaccaaccgatagacaccgccaaacgcatccatgattacgagctcccgctccgttgccgcatcgtacgccacacagaactggaaatacccgcaggctacgtactttcttattgccccaaaggcatctcaatccatacgccgcaaggtatactctgttgctcttacaaaacagaaagaaacaaaatcattttccggaaagtaatggagataaccgaaaaacgtattccccgcaacgaaattgcaacctggaatacacacttgcggaaatgggctgatgcatcccacgaacaaatcatcctcaaaaaacaataataatgaaacagaacatgttattcctgatgggggtgttggcacttttattaaccacccctaatgccaatgccgatgacaaagagaaatacaaactctttgcagaggaaacgagaaaagaagtctgggcattgaaactgcccgaatttaccaacacggctattcccgataaatataaagatgagtcagccgtcattctggcagcacacagccggttggaaatcaccaaaaagacccgattcaacgtcggcgccttcctcggaggatttcattatatcgaccgtgaagtaaattgtcgcgacttataccgtatgcttgtgcaaattaacgataaagccgctttgaaagagttctccgaatttgattataaagcggaaatacgtaaaaaagactggcggtacgacgaaaactaccagcaagtactgggcgtgcgcatcatcaaaccggacggtaccgtaaacgaaataagcaccgacgaatacatgacagccaccgaaggcaagaaagaccaggaacaacttcagaaacttgccgtacccggactggaaatcggtgataaggtagatattttcttcttcaactacacttcattggaaaaccacaatctcgacccgttcgtcttccggtttcgccaaagccacccgatgctttcctatacggtacattgcgagatagatgacaaacttactacccagtaccgtactctgaacggcgcaccggactttaaacaaagcaaagacgaaaacggaaacatcctgcttgatgtggctgtaaaggatatagaacaaaccgaacccgacttatggtacaaccctatgcagcaaactccaatgacattgatgtacatcaccaatagcaagatgaaaaaatacacctatattccaaaaagcaccacagaaaaaggactacaatccaatcctgatgcggctgccatacaggaagacgactgggaatttataaagcaagctcaaaaatatagcggatatggcggtttaagtagccccaagaaaggtatccggcttctccgcaacgtaaagcaaataaagaaaaaagactggacagacgaaaaaaaagcagatttcatctacaattactatcgttttgcattgttatcggacattaaaagtgattgcaacaacgagctgttcatcatctattttcagggattgctggattgggtggatgttcccaatctgtttggaatggttaccaacgaagacaaagaaccgcttgacaaattgacgaattaccgcaacaccacctggcttcttgcacttccggaaagtcagaaatactacctcccgcctacagcctaccttattccccatgaaattcctgcccgttatcaaggcagacaagccatcctggaaccggataagaagaaagccaagaagctgaagacaaaggccgagcgggaacatttcaatctgccagcaggtacagccgatgataaccaaaacatcactaccatacaggccgacatcgacaatacgctgctcaccgtcagccggaacgaataccgcaccggaacacaaaaagaatacatgcagtctgcattggttaagctggaagatgtggatgcagcctatcggctcctgcttagcattgataaggagtttgccgaagaagtaggcaagaaatacgcggatgatcttcgagaagcattccgaaagggccgcgaacaggaaaaggaagattataaatgggaaatagacttctaccacggcgaaaatgccaaagagttgctcggctatcagatgcaatgtttgggtaatcgtccggacagcgcagcctttatttataacgttcgttatacaatggatggctatatccgaaaagcaggacctaattacgtgctttccgcaggcagactcataggtgagcagacgcagattgaaggtaaggaacgtaaacgctccgccgacatttatatgtccgctccccgcactttccaatggaatatcactgtaaatcttccggaagggtacaaagcggctcccgaaggagtagagaagttaaatgtaaaagtagaaaacgaatgtggtgctttcattgcaaaagctgttacagaaaacggcaaacttatattgaatatcctcaaacgatataatcataagacagaaccggctgccaattgggaaaaactgcttcagattcaagatgcttccaaagcctatgaagcgctttccgtagtactaaagaaataatattacagataaaaagcggccgaaaaccggtcgccgaatgaaccggaatacaagttgcagagaagatatgaaaaaggcgcggattatacgaatataacggacaaaatatgccgtatgctttcgtataatccgcgcctgaatccggtatttggacagatgtaccggttatcaatagttttccttcttcacctcgaagtaagcctgcggatgcaaacaagccggacacacctgaggagcttccttgcctgtgtagatgaaaccgcagttacggcactgccataccacttcgccttccttggcgaaaacagaagcggtttcgatgttttggataaaagcacggtagcgttcttcgtgtcctttttcagcaatggaaatattacggtacatggcggctatttcggggaagccttcctgctcggcaacatcggcaaagtgaggatagtccaacgaccactcttcatgctcgcctgcagcggcagcctgcaaattctccaatgtagtgccgataactcctgcgggataagatgcggtgatttctaccataccgccttctaaaaacttaaacatacgctttgcatgttctttctcctgatcggccgtttcggtaaagatagcggagatttgctcgtaaccctctttctttgccacgcttgcaaaataagtgtagcgcattcttgcttgtgactcgccggcgaatgaagtcagcaggttcttttctgtctgagttcctttgatactcttgctcataattctttttattagttaatataattacgtatagattgttcgtatttgctttatttacagtacaaaaatacaaatttagttttaataatccccattttgcctcatcggatttatctatcactcaacagacagcatctatttcgtttcataaatccgacgaggctgtttttttaatgtccaacccataacaagtaatccgatagtaataacaaaaaacggcatatttatgttcgggcatccgtaaaacaatcatctgccatacccgaaacaggttatcggcaaaaagagcggaatacgcggacctgcttaaacatcattcttccgaaggctctttctaagaccgtttttccggtttataaggaatatagcgagctacgtggcggataaaaagagaagaacagaccggaaaggaactcaaaagaagctgaaaaaatactttttggagaaaatttaaacaggctcttatagtcatttgcattattttacctaaatttgcaatctcttttcaaaaaagagggtgcaccgacaaatcggatggacacaccctcacaggtaaaaacaaagtttctaaaatacaatgaaagcgttcgaattcaagccaaagctatacacggctttaaaaaattactcgaaagaactcttcatggcagacctgatggccggtatcattgtgggtatcgttgccttgccgcttgccattgcgttcggtattgcatcaggcgtatcgcccgagaaaggtattatcacggcaatcatcgccggttttatcatctccctgttaggaggaagtaaagttcagatcggcggccctaccggtgcgttcatcgtcattatctacggcattatccagcaatacggagaggccgggctgattgtcgccacactgatggcgggtgtcatcctcattcttctgggagtattcaaactgggggcagtcattaagtttatcccctatcctattatcgtaggctttacaagcggtatcgccgttactatcttcaccacccagattgcggatgtattcggattgaatttcggcggagagaaagttccgggagacttcatcgggaaatggctggtttatttccgtcatttcgataccgtcaactggtggaatacggttgtcagcatcgccagcatcgttatcattgccatcactccgaaattttcgaagaaaattccaggctcgctcatcgccattatcgtagtgaccgtagccgtgtacctgatgaagatgtatggcggcatcgactgcatcgacactatcggcgaccgtttcagcatcaaagccgaactgcccgatgccgtaatgcccgcgctggactgggaagcgattaaaaacctgtttcccgttgccatcacgattgccgtactgggagcgatagagtccttgctgtccgccaccgtagccgacggtgttatcggtgacaaacacgactccaataccgaactgatagctcagggcgttgccaatatggctactccccttttcggcggtatccccgctacgggcgccattgcccgcacaatggcgaatatcaacaacggcggcaaatcgcccgtggccggtatagtacatgcggtggtgctgctcctgattcttctgctgctgatgccgctggcgcaatacattccgatgggctgcctggcaggcgtactggtggttgtgtcctataatatgagcggctggcgcgtgttcaaggcattgttgaagaatccgaaatcggacgttaccgtgttactgataaccttcttcctgacagttatcttcgacctgacagttgccatcgaagtgggtctggtcatcgcctgcgtgctcttcatgcgccgtgtgatggagacgaccgaaatttcggttatcaaggatgaaatagacccgaacgccgaaacggacatcacaacgaatgaagagcatcttatcatcccgaaaggcgtagaggtgtacgaaatcaacggcccttacttcttcggcattgcaacgaagttcgaggaagtgatggcacagctcggcgaccgccccaaagtacgcatcatccgtatgcgcaaggttcctttcatcgactccacaggtatccataacctggaaagcctttgtaaaatgtcgcagaaagaaaagataaccgtcgtgctctccggcgtaaacacaaaggtgcatcaggtattggaaaaggcggatttctacacgcttttaggcaaagagaatatctgccccaacatcaacgtggcactggaacgggcacacaaattggttgaatgacccggcaattgcaaaccgcctctctttaattacaggaaaagacaatcgtatcgtcatggcaaaaagaaaaaacagcaagaagcaatctcaaggagtgatttacctgatagtgctggcatgtctggcactcatctgccgtgaaccgatagcccatgcgctgcaagacaagcttcctgtaattaaagagaggataacgcaaaaagcaacacccgccatcaccggaagccccctgcttcccgcccccctgaaaaacgtgcccgaacagatattgcaccgcaagggctatatcacttcgtacaaccgcgaacacaagatacccaactgggtggcatgggaactgacacccgaaaaactgatagagcgggaaagccgtaccgacaaattcctgcccgaccccgacctgcccgaaaaccaggctgtgactaccgacgactataaacgctccggcatggaccgcggacacatgtgccccgccggcgacaaccgctggcactggaaagccatgcaggaaagtttctacatgaccaacatctgccctcaaaaccacaatctgaaccggggcgactggaaagaactggaagatgcctgccgcctgtggacaaaaaaagaaggaaagctatacatcgtatgcggtcctgtcctttaccggcaaaaacaccgtaccataggcaggaaacacaaagttaccgtgcctgaagctttcttcaaagtcatactcagtacccgcaacgggcatcctaaggccattggctttatctttaaaaatttatcaggaaatcatccgttaaaaaactatgtcaacagcgtggatgaagtggaacgcatcactggcatcgacttttttcccgctctgccggatgatgttgagaaaaaggttgaagccatgcaagatttaaatttatggagctttcgctaactgttaacctttttttaaccctacggatttaaacatgaaggtgtgtcgtaatgcacgattcaccttcatacataatgacggcatatagtaccttacgccaacggaaggcaaggtagaaagccagccagaagaacagaaaaaggaactccaacgcatacaagaagaaaataaccgattgcataactaaatcagaaacctgcaaacctataaggaaaaggcgcaccgggaactgtgccggatgcgtgataaatctttcttcagtgttccaattagctccttccattactaaaaaagggctatgccttcacagacatgccctctaaacattgttaaactttaacagttcttctcttaaaatagaaaagactatgaactttattttgagaattttatattgttaaacagaggtgtcaaaacatctctaaaaatctcggacttcattttctatttcttcgggtaccttatcgcagcgttcaaatttttgtacatctgatggagtatcttttatagtccaaatcatggaagtggccaaaagattggttacgatataggaattagcccattcaccattgccgaaatcatagttcccactaatgatatagcctaaatccttttctttctcaatttcaaaactacccgtcttgagattagagtacatactgctaaacttatcatacattttataagtcttatccttgcggctgaatgtaatgtagcaataactgccttcttgcaagggggcgccgttccattccactaacttccaggtcccgtccagattagcggctgtaacgtccaatgtggccagtacttcctcgtcatcgtcacagcctgcgaaacagaaaagcgtcaagaaaagcgtcattattctgaataaggttttcatatttcttgtttttatttttttagtttttaataattacttctatcgttttttccgaaggtttgcctatcacaccatctataatgagagaaagatgtttctcctcagtatggaagctgggcaattttgccttatcaagtgttatcacaagatcaccttcctgtccgggagcaagtaccgcaggctcggtatagaattttaggcatgaaggtagcagtaaagcattcagtttgagcggatggtctccactattggcacatgctatgcgctcaatggttgtctttcctgctctgctgaatgacacctgcttgcgtgtaagccgcagatgtcccatattttgaggcaggtgcttccattcatcagacgaactgacatagccgcatagtgacaatcgtgccacaggtgaaaaatcggacagatcggtatataccaatgcttctgcatcaattgtgcctggtctgttcttgggatgaaaagtcagactaataatactttcctcattgggcgccaatggctttttgctgaatccggcagcagtacaaccacacgtagtagtaactttgttcaacgtaatggtttgctgacttacattctgaaaacggaagtatacggttttgggctgacttttttcatttatagtacctaccgacaggcgacacgtatcaaaatgaagaaattccccggcttgctccaacaaaacaggatgtaccttggcttctatttcttcacgggacattaaccgccattcctgcgcttttattacaggaatggaatcggtcaatccgcccacaaagactgtcagtatcatcaattgtcgcttcttcatgtctatttaatctctcgattataaccagccactaccaccagcatttttacgaacagtaatcgttattgtctgtgatttactgccagcttggatagtcacagtcgtactaccgtctgcaatgccatttatagttagtattgtcttgtctacacttgtggttgctatattttcattggcaacggtacaactgtagttcaggctttctccatctataaaataacgggccagatcaatggatgtacttttccccgttgccagatatacatttggtacaatcatgtctgaaccgtgattaccaatagccttgagcaatgcaccggcatctaccagcctacccattttccctttacgctctatcagattcatcaaagttggaggggcgccaaaagtcgtgtgattgtaataatacagtttttccactttttcatcgtagaagttatagaactggtcattggcagtttctttcatcagttcaatgaactctgcgaccttgaagtggcgacgctctttcactgcatgcgacagccccaaggcagctacgcccgatacatggggacaagccatggaagtaccttccatataagcataagccggttgtccgttcttgatggcagtagagagtatcagaccttgtgttttaccttcccaggcaaactcgtcatctgctacccctggcgtgccgtagtagtcaccgtcaccgcccggtgcacagagggtaatctcttcgccatagttggtatagctagacggagtaaagtcggcagcgatggcactgacagaaatacatttggaatagcctgcaggatatgaagaagaaggtgcatattcgttacccgatgcaaagatagccaaaccaccatctatcacaccgttgggtgaaccggcattgtggatgaagtaatccagtgcttctttttccagaggatattggttttcccaatcctgttcgtctttcggtccgggggtatagcccagtgcctcgttggcatccggtgagttgtaaccccagctacactgcagaatcacagcaccattgtcggcggcatacttgatggctttggcttcagctgccaaggtacatccatacgcaccatcgaacagctgacaggtcataatcttaactcctgaattttctgttccgtcaccgcctgcaataccacctacacctttgttattaccatttactgctgcaatggttccggctacgtgggtaccgtgaccggtatcttctgccgatgtccagctgataactccggtgttttttacaaagttataaccgtaacggtcacctttgtagccgttgccgtctttatcttctgtagaacctatttcttcggcttcgttggtccacatgttgccaatcaaatccgggtggttccacattacaccttcatcaagtactgctacaatgatggtagggtctcctttacacagtttccaagcttcaccgcaatttacgtctgcaccggcaatagcttcggcaccttcttttacaaaatcgtagctgcccgtgttctggtaatgccattggtgtttcaatcccgggtcgttgaaggtcagtccttcgctggtacgagtcacatgttgcaaatcgctggccgagaggtacagcggttttttcttcgggtcgtaggcacgccggatggtagggttgctttgaatcttggagatttcacccaactttctgagttgccgggcagcttctttcaagtcggtgtctttgtcaaagcgaacgatataccacaggtgcatacctgcttcgcgggtacgtttttctgttttgggatctaccgggaacactctttcaaagtgataggcacccaggatgttgagcacctcatcggtagaaggaatacccgagcgggtggatatcccgccagcacgcgtcagtgtctggtccaggatatcactcatttcaggaacaaacttgatgagtagttcaccgtctgctgctcccatcggaatttcaatttcagggacttgcggagtggtgctatcggtcacccattcgttgtcctggcaagaaatagccgtcagggcacatgcaagtgcatagatatatattttcttcataagttacttcttttgttcttctggttttaatgtttcgtcttctccttccacttcatatttctgtttgtataaaggataagcatcgaagtagtatgtaaagctacttggttcatcgctgaattttaccggtgttcccttggagtcttgccccatttcttgctgattgaaaatcagtacttcggggaaccaatccaacaggtgcggatggaagcgcaaccattcgggtattttacctgtaaagaagttcaggttcagtgtcagtcgcttcatgtttggcagaatctttggaatttctggatgttcgagcagatagttcaatgtatcaccatattgtttcagatcatctgcctgccagcctgttctgccttcgtaagtaggcagagtaccttccagataattataagaaagtaccagctcttccagattatcccacaagaatagttggtcaatttctgttggattctcgtccatattaatatggaagcccagttctgtgtctttgttatattgagaatctttcagattgcttactgtccagcggcggttaccgctaaatatcagacttttcagttttgggaagttgttttgagtcaatacagcgggtacaccggtgaagttgttggcgctcaagtccaggctttccagtgaatttcccagtctgtcgaaatcttcaggcagtgacaccagaccataaccgccaatctgcaggttcttcaggtattccagttcgcagatatgattttccaaatcgatgctcagcagcatggtgttggcattgccgtatacttggaaagtttccaggtatttcaggtatcttacttcttgcggaagggattctttggtagtaatggtaccgaagtttactgaacggacgcggcctactgcttccggacccggcaactccttgtctgtccgtttccataagcttacgttatcccaatacatcatgttttcgctggagttgatggcgatatccgaggccagacgttcgtgtatggtaaggatagccagtgagtctccggctcgatcgtcagtaatcaccggcgaagcagcctgagtcaccagaatcggcgtaatcgctacttcttctgcagattttccgttctgttccatcggttcgaagttgattttagcccgacgttctatccattccggattcattttccaatcaaagcgtaccttgtaggtttgtgggcgggcactttccagattgaataccggttcattcttcttttctaaagaaatccagttttccagtgtcacaccctcttcggtcgtggtgagccattcgtaggcaatcttgaaagaaacattggcagtaatgattgcttcaaaataacgcttctcatacacgtctgaagctttgaggttaacttctgcctcttttacgtgaatcattttgccatagcccaactgagtaactgtgattaccttgggagcttgtcctttcggtatgaagcggatttctgcttcacgcacttcgttcttcagagcctcgtcaatggtgatgacacactctgtgttgccgaaaccattggccggcgaaatgctcaaccacggttcggatgatttggccacccattcgccttccgagcttacggtgaccgtctccttgcctccttctgcattggcagccacttcagtcttgctcagactgaagccgctgacagcagcattgtcctcttcgtcatcgcaagcggtgaacagacccaaacagaggactaatcctaatactattttaagtaaatgtttcattttccttttttatttaatccaataaataatcgcatccctgaatgttctgcgtcttgtcataaatcagttggtattgacctgcttggatatacggacatacctgagtcaaatcaatagagatgttcggattgtccttgatttcgaagatacggatatacggtgaaatggtatcttcaatcttgcgcaagtcgttagaaccgataaagaaggccatcaggctggggcaagtgtacaagccggtaggccattggctcaagcagcggttaccgctttcatcacgttgatgacggataccaaatacggtcagacctttacagttcagcggagcaaccgggaattcagcgaaccggttgtagctgaattctatgccatagatataaggcatgttttccggtacgaaatcttcaaaaggaatctctttcagtttgttgaactgaaagtcgagactggtcagcaggtgagagttcggacctaccaggtcaccttccttaatagtagtcataccgttggcctgcagaatcaagatgcccagcggagaaccttttttgatgataactccagggaattcttccagatggttgtacgacaaatccaaattgttggtgttcacaccgcggtggttgtcatcgttttgcataccggttatttcattgtgtgcaaagctgacagagccgatgacatacttcgacttcgcgttgaagatatcaggcattttggtcagcttgttgtaagtacaagtgaatgattccatgtcgtaatatccgcagaagtaaccatcctctgttgtgttgattttattgatttggttgtagtccagatataccttggtcaggttgatttccttgccgaatgcgttaacctctgttatggagttgttggtcaagtcaatcaagcccagtttttccatctggctcagatgttcgtaatccggcatttcttccagattattatagcccagatagagcacttggattttcttgccgctctttccttcgatgaactttttccagttatccaacagtacatcacctttaattttctggttgcaagccacgttcagcatctgcagttcgggcaattcgaagagcatgttcattggaagagaggtcagttccttgcagttatagatttccatgtctgtcagcatggtgaagttgttccagttccagtcattttcttcttcttcgtatgctttgcggtaagcagattcagagtcatctaccaatttcatgcagaaattatctgccacgataggagagttggcaatgaagaagttttccagcttggtgcagcgcatcagggctttagagatacctttgatgttgttggtcaggttaccgaactgtacgtccttcttgtcaatgcggttacttttcttgataggtttgaagtcagggttggcattgataccgtcaatcagaatttgtgagaggttctcgcggatgtcacgatacaggaatttctgttcataatccatgcggattctttgacgttgttctggagtcatggtagttcctacgccttcaaacaggtgtccaccaatgagttcatcgtgagcaccgaggttcaggatgcgcagctcggtcagctggccgatagcatcgggtactacaccatcagcaccgaatccagaaattacgagtgatgccactcgaccgttgtccagcaactgtacgccaggctggtcaccccacatgtcgatttccttgtcgaagttccagttacagcccataggagctgcttcaccgtagtatttccagttgggcccgttcagtttttcccagatctctttcagtgccatgtagtccttcaaatattcagctgttgcactcaactggatgggtacagtggcttctgacttttcgttatctttcacgaagaaggtttctgaagtaggtacggtagctatctccagcaatttgccggaatcgcatttcttgtccgagtaagtagagtaggaactgatttggtagctaccagttttcagccatacggtagtgtcgcagagggcgtaaccgtctttcaggttttccacatacttcacttccactttttcaatggtagtcagttcttgtgtaaagagattctttaccgtgatgttgatacccttgatgttcgagaacggataatcttcgtagccttccgctgcacgagatgctgcttctgtttccggcaatccatgtttaatcagtttgaagttgaccaatccgcgagctacagcatcagcaaacagttcctgtactttcagcccgccagccattacgttgaacttataattgttgggggtaccggcataaatttcgttatccagtttgtcgtacagatagtaaccaatcagtttatagttacctgccagcagttccagtttgtcactgcgcagaccaaactctgcattttcagcactatagctgttgagcatcaaggtttgttcaatggtgtttccgtcatacagcatcaccaccttgatttttttggcatcgttcagcttatccagcatgtcggtgcctctcgtctctgttcccttgatagcagccgatgcgctcttatagattttgaactgcacatagccgaaggcggtctgctgcaattcatcatcgtcatcggagcaaccggcgaataccattgtcatagccagcaggaagatgaacaacggagcgaaacatgttttaaagaatgaaatatatttgttcatttatcttttgtttttattgttttacggacgaaccaacagtacggtaactttctgccatgaagtatctctgatgactacagtcagctcactttcaatgtcttggcaaccccacagatcaatagcagtggtagtaccatcttctgtagcagaacaatactgttctgtaacgtcttccttgtctaattctgctataaatgaactcacttcaaaaggaacgtttattcttacagaattacattcgctggctttgatggtgaatactttggcagcctgccattcacttttgtagaagtcagcttcatcacctgtaatttctgtacattctactgttttgccataattttcataatattggctgatgatttctatagctttctcttcttcgtcaccgccagatgatttttgctttttctgaacaaaattcatcagcaagttgctttctgtatattcatatctcaattctttcagagcgggcataccttcgccactatctgtgcttacaaacaaaccatagtccttgttttcaggatcggctgcgattttgtcgtacaatgctttcgggaatacgaatacataacctgtacgttcgtccataccactttcttccgtgtctaagggagttaccgttactctagccttaccggatttagcatccttcacttccagtttcatccaagcagatttgtcatcggccagcatcacttcgtagccggggttaccctggaaatcggtgtattcttctacatagatcggatagaactggtcgttcagtgcagtgatagtaaattccacaaacttgttgtagctactggattcactgctgcctgagataccttgattggtctgaatgaagctcttgccatccaaagaaacttcccagttccatggtttcggtccatcatagttcatggcttcagcgttcatacccttgtaattaactgtataggtaaatacactcttgccttcctcatcctggaagttgaggtcgcctttctgtgcatatttgctgaagtcagggcggttttcaatcaccttgatgccgaatagtacagcctggttggcagcacctaccactgaaccgctctcgatagtcatccattccggacggttggtagcggcaaagcggaagtttgcttctgctttatattggatgtagttgtcgtatccggcttcgataccttcttctgccgatacttccacccattcatcgcctgcaccttttttatagagtttgaacgtacgtccggctgcattacgggttacttcagccaacacagcttcctgtccgttcatactgatagtgatggaagcaacggtcgtattatcatagtcctgaccttcgtcagagataccgatggttacggtttgtttaccagccttgcccgagatggaatattccttcacaccctctgtagctttggcagccggagttccttccgtaataaaataacaccatgtgctggaggaagtcagcgtccagtcggctacagcatcaaatgtcaagcttttagtctcactggctgcaccgccaattgtttgcttttcagggaaggttacagttgctacgttgtcatcctcgtcgtcgcaagctgttacggcaaaagccatcagcagactgatgaaaaaccatcccaacgtaaatttgttctttttcatcttattctatgtttttttgtttctagtaaattatttcttttcaaaatctgttttcaccgtttcagataccagcatgctgccttccagatacagcctcttggcttcatcgttgcttatccattcaatggcgctggcaaaagttcctactacattgttgccagccatgcccggtacatacagtgtgaagtactggaagatgaactgttcgcaggtactgtagtaagatacaccgctgctagattgatagaggtggagataaccatcgccgtagttggtgccgaaagcttcggctgtagaggcaaaggtctgttcatccatttcaatcagcggattcaggatgtcgtttgtcgtgaaacggattttcacattatagccgtcgtagaagaagtccttcatgataatggtgttttcttcttcggggtcgatgattgccttgatcagacggttatctacgttgggcataaattcctgcatataggtagaagtcagcacagcatatccgttgaaaagattgatgtcgaacggacagcatttctgcaggataaccttggcttcatagctcttttcatacaaatcccattggtcggcttgctgcgtgagcaaacgcagggtgagccccagcgaatcggtggctgcgatggcatcgtaattaccgcggatgcgtacgttggcagcccgttcaccggccttgatggtgatggtgtttgattcaatggtatagtgttttccctcaatggcgttgctctttttgtctataacctctacggctaccgtgcggtcatagctgcaggcttctgtagcggctacaggaatatcgaagacttcttcgttgttctgtacggccagtacagtgagcgtatccgagaacaggatatagtttggaccttcgtagctggggcgctctgcatcgccgcaactggtgatggcgcacatcagcagtgtcagcatgctcatcagtccgtagtttatctttctcattgttatacttatgctttataaatgatgaatctattcttatttattgctctcgttaggctgaatctggctacccggtgattccagttcgtgtttcggaatgggccatacaaagcgtacatcatccgcttcaatcttcagcgaactaccgttggtcagtgattgttcctgcggtttgcgttcgaagcctttgtgccagcgtttcagatcttgcaggcggaagccttccatatacaattcgcgcacacgttcttcttcgataatttccagccagttttgttcgctgaccgagatagttccgttaccgccttgaaagcgggcacgacgtaaatcgctgaggtctttgctggcaccgctgtaattcttctgattggcgcgggcttctgcacgaatcaggtattgctctgacagacggaatactttcggcatacatatatgcaacatattctgagctatgaaagattcatttccgaaatatttggctaccaatggccactgcagtccgtgcggataaccggtaggctgtgtcacgaagttggctgcaaaacgtaggtcttgttctgaatagaggttcagcacccaagttgccggtacatagtcgggcttgaagctttggaagtcatagttgaagaagatctgacctaaagcgccgccgtagctgctgattgtcatacccactttccagataatctcggtactttcatcgttcgaccacatatactgataagcgttctgtgagctggttatcatatcgttcacattggacagtttgtagtatttgctgtcaatcaccttggaagcgtatttctcagcgtctttccagttctgcatgtagagagccacacgtgcacgaagtgcatagatggtgtattcacagaagtaaggtgtgctgtaaagaactccatcgaaatcatcttccagcttcaagtactcggctgctctttccaaatcatccagaacaaactgataagaggcttccagtgatgaacggatggtaggttcgtcaccgtcgtagtgcgacttcagtaccacgcccagttcgttggctgctgtagccgggtcgtaagccttgcagaagagtttaatcaattctgaataagccagtgcgcgggcaaagtatgcttctccgcagtattggtccagacggtccaagtcatcgtcgttggtagtattctgacgtactcggtctacgttgtccagcataaagttacagcgggtaataacgttgtagagtccggcatataccgattcatattcgggttccgtagccagaatattccagcgccatgtattaccaaactggttggagtagccgttcacggcataagccaaatccgcctggatatccggcagtagggtcagatagccactgtataacgctccgttcagccaggaagcgtagataccaattatggcctggtctacttcatccacagtggtgatggccttgtcggcaggcaccatatcatccggatacttgtccaaacaagcagtggtgctgaataccagagtggccatgagcagatatatttttatatttttcatttttcgttgattcgttaattaaaaatattagaaagagagttccaaaccgaacgagtattggcgcgacatgggatattgtgcctgatacatgttagtaaatgcttccgggtcaagtccgctgaatttggtaaatgtaagcaggttctgaccttgtgcatagatacgtgcgttagtgaaaaaattcgtctttttcatccattcttgcgggaatgtatagctgatcattaaattcttcaaacgcaggaaagaggcatcttccaggaagcgcgagtccatctgcggagtgactccccaacggggaatgtctgtcacgtcgcccggtttcttccagcggtcatagagcaggcgcttggactggttgaatccggtgtacagaccattactctcttcgaagaagcggtcgttgttgaacatccagcggtcagctacccaactgaactgggcattcactgagatacctttccatgtaagggtagtaccgaaaccgccttgccagggagccaggtagttcttacccaccatcaccttgtccgattctctgaattcggtggtaaggttaccctctttgtcataccacagaggatcaccgtttgcagggttcacaccggcatagcggttgatgtagaattctcccagcggacgaccaaccacccatttggtggaagtgttgggcaattcgtattcctgtacaccgttatacagttccttgatttcattcttgttataggatacattggcactgagattccaaacaaaatctctcagacgcaatacgtctgcattgatggccagttccacacccatgttggtcatcacaccgatgttgtcccaacggaaaccgttgtttccttcagaataagactgtggcacttccatcagcatgtcactggtacgcttgtggtagaattccaaatctacattgaaacgctcgaagaatcccaaatgaaatcctaagttcgtggtccaggttgtctcccagcttaatttttcatttcctttctgttgtggagcgataccggccgcatccatgtaaatccaaccaccgctggccagtgccagatggtcgaagtttggaatttcagaattacctgacgtacctgtactgaacgatacttgtgcattgtgcagccagtcgtatttttgcaagaaacgctctttcttggcattccacatcagacctactgaccaaaacttaccccaacggtgatccttaccgaaacgtgaagaggcatcagtacgtagaccaagctccacataataacggtcatcgtaattatattccgcacgaccgaagaaagacaggaatgaataagctgttgtattatcctgccagcttgaggcacgtgtacctgaagttacgttggtcaagaagtcgttattttgaccacgtgttgtcacgttgaaaccttcagcctggtagtccaccccttcctggcccaccattacattgaaatgatggtcgtgtcttacatcgaaacggtagttcagcgtattggtcactgtcaggttaagaatatcgttcgactgacgaccggctactcccagaccgttgttcaactgatagctcgggaatgattgcatgaatccggtagagtgcgtatagtctgcaccgaactgtacacggtaagtcatgttctctatcggcgttacttcagcaaaaagcacgctcaataccttatacttcttgtttgtcaccggattattgtccatccattcaatcggattaaccgtcgtaccggtccatccaccgttggcattggttgccagtgaaccgtcgggattatacggattccagtaaggaagcatgaagcggcaggcagagatgggcgatgacaaactgtagctaccttgatcggcctgctccacttcttcataggtaaccatggaattggtacccactttcaaccagttgctggcttttacctctgcgttggcacgcatggagtaacggcgaaacgtagagccttgagcaataccatcctgatcgtagaaacttcctgaaacgaaatagttcaagcgttcggtggcgcggttgatagaaaggtcgtagttttgtagcatagcattgtcgttgaacaccatatcccgccaatttacgtcggtctggctcaacaagtcatagtcttgaccggcatccagaccgacttccttttcaaactgaatacgttcagccgtgttcatcagattccattcacctttggctaactgtgagataccccactgtgtacgtaaggtaatgtgtgctttgtccatggaccgtccgcgtttggtagtgattactactacaccattagcagcacgggcaccataaatagaggtagaagacgcatccttcagtacggaaatattttcaatgtcactcggactgatagtgttgaagtcactgctggaaatgggtacaccgtccaaaatgaacaagggagaggtacctgaagtgatggagttggttccacggatttgaaaagccgctgccttgctgggttcacccgagttggacatcaccatcagaccgggagtctgtccctgcagggcttggtcgaaacctgcggcaggtacgctttccattttctctgcctttattgtggaaacggaaccggttaccgttccctttttacgaactccgtaggctactaccactacttcgtccaccaactgtgcatcactcttcaacgtgatatccagcttttgtgtctgtggagtcactacgtgctgttgctgctgcataccaatgtacgagtacaccaaagtagcctgcgcaacgcctttgatctcaatggaataattaccgtctatgtcggtaatcacaccattattagtaccctcttgcatgatggctactccaatcaacggctcattgccttcctcggcaatgactttacctttcaccgtaaaactttgggcgaaaagtaattggaacgccatcacagcaagagagacgaacaaaagaattactcttttcatctctgatttttaagttaatgatataaatgaattgtttttaaatgtatataattcttttatgcatccgagaaatggatgaacacacttgctacatcttgtctcttcgttcaacatttctccaaacagtcaacatgacatcaaaaaatatattattagaatattcaataaaacggctcatgattgcattttaattcacattaaaaaagatatgcaaaattacagtattattttgattgttaactatataaaataaaaacatgaaaaatgttttaaacttcccaaattataatactttctttttgtcaactaaaaagaaagtatttaacggtatgagccgcataattgcttactccaaatcacatttcatgttaaaaatttgtattttagtagaatggttaataatagaaatcataatataaaaaatacaaacatgtggtaataagaactactttttcagttttgtagatgtttccagatttacagtcaatcatcagatgaaaaatctcaccaagttactcctaatgtcttatgctgattgctcccttttgcttttatcccttacgttttcctataagcttttgattattccttgtattcagatctttcattatgatttgttacacataaatgatttcttataaatatagctgtaaaagggaacgtctgtgaaagatatcccctttaaatgtttttcaataagagacactcacagccatccctgcttccctcaccaatgctgcaatacggtccaattcctcatgagtagccttttgcaggtcatggtcgggagtttcccggtcaatagtataaatcattacctggcggggagaaatttccttgacggcctctaaccagggcaaaacatacttatcggaagtattatccatatccttatctccaaaaccgcctttcaagaacatggtttggataatacagttacccttaaaagccttcattcccccgattatctcgcggacggaataatgtcctgccggacggtcgagctcacggatataagcttcgtctgccgtatccagtttcagaatattgttatccactttgttcaaagcctcgaatacggcaggacgatgaatgaaagtagaattgctcaatacacttaccttggctttcggaaagtatttgtcgcgcaaagcaagcgtgtcttctatgatttcaggaaaatgcggatgtgcggtcggctctccgtttcctgcaaaagtcagtacatcagggacgggtccgtttttctgcatatcctgcagacgggcttccaatgcggcacgcacttcctctcgtgtggggagcggcttcttgggacgatggtcggaattaaacccgcactcgcaataaatgcagtcgaaagtgcacaccttaccgtcttccggcaacagattgattcccaaagatactcccaaacggcgggaatgaacgggaccgaatatgggagacggataaatgacagtcatttgatttactatttacaaattatgatttaacagcggtgattggcggttttccgatatttcaaagacaaaccgcgtaatcagcacagcaaagataagaaataaacatccagatatttccaaaaatacggcagttattcttcaaaacttaatacgaaactgcatctgcaagtctgtttttgtatttccttctatcaaatcgttacccgaaccgatagtttcacggtcccggtaagcggtttgcccgaacttaacgagaaacataaaagttttgttcaaatcacaacgtatatgagcagaatagcgaaaaccactgccgtagaaagaaggagtataaaacgtataaaccaatcctttttcggaagcataaatccgcgaatcgtaatcgtccgtatggaaataagtaccttgtacggatacggccaaagggaatccggaaaaagtataagcgcaggactgggtacattgccagccttgttttccttcaaactcatgccctttcccactctgctggcgaaaacagttgtaatcgaccgtggtgcggcatgaaaaagctcccggcgtataagcaagtctgcaacggagcttgtgatgaaagaccggtaacgtcactttcccgcctgttcccgacacatccctctccttgcgcttataccggtaattgagatatagcaataagtctttctgcggagaataggtagcctgaaacattccgtctattccctgcgaagccttgctgatgcgatacttccaccaggggaaagagaacatatccaaagaagcgaaaaacttccaatgcgcccagggagcagcttccgcagccagataccagccgttttcgttttgcggagcacttccttcgccgaacgaacgcccgaagaaagaccagtaatcgtgggaataacaacgatgtattaacagcagttgataacctgttaatattttatatttcagttggttcagcaaggcatatccctgtttaccaacagccccctctcctatccataccaaccttccccaacggtatttataatccacacccagattataaaaatcatttccatgcaagttgtatttcgcatacttctttaaatccggttcataaggatgactgaaacgataataaatacctgtcacccccactttcaatctatttttttcgtaagtgaggttaccacccgccgattgcatgacaaatgcattcattttatccgcctccttctccgtacggtgcaaacctgttttgtaaatggaagcgatttttccgcctttcaccactccatccatagaacggtgcgaatagaaagcggaaagttctaaaaaacgaagaatttccactgttaccgccgttccgcgaaaatagttatacgagtccgtagagctgtgtttccggattccccctctgcggaattcggatgcagacatggagaaagtttttcctaatccaaagtctgtgccaatcaccaggccctgcccgaaccccagtttataattacccaatgccaaagctttcagcctgcccctgtttttgagtaagccgtaaaacgaatagtaatcataccctttcttgtcatgcaaagcaaagaacggttcaccggcatccttctctcccgttattcccgcctgaaagtaatctccataacgaaaactgtaacgcagtgaatggtaaacggcaggtcccagatagtttttctcatatcccttgcgggtatataaagggatatccagacgtgtcaatacttcttgcccggcatacttcaataccgtttttaaagaaggatagcgggaagggccctcaacggtctttatgcagacgaagggtaacagcagttcgatagtctgccgatccatctccgccaccaactgcaactcataaagagtctgcatctgcccgtttatataaacatacgccaaaatattttctatttgaatatccgtaaggaaaggaaattcctccaattgccgttttgtggcggtattgatattgacaggttcttgcagacgagcggaaagcacttccagttcatcttcccagtttctctcttcttcatcggcggagagttgttccagattctcttcccacagggataatgtcgcattttgagctacaagcataggagttattaacagcatactcataaaaactcctatcttgattagggtcatctataatagtgtgtttccggataataggcaacgaagttaccttaaattagttaattgaacaaggaaaaatgaaagcaatgtaacaacattacgcagaatggtgtacttttgcgctatgagcaaacggtttaacatagtaatactcataacatttctctcggcaggaatcctgacttgtcatgcccagcagcaaccccaaaccggtgcatccaaaagcatctatctcactcctatgtgcgtgtacaacggtgatacgattccttacgtgaaacttcctaccgtttacatcttcaaaccgctaaaattcaagaacaggcgcgaaatggcgaaatactacaaacttatccgcgacgtaaagaaagtgcttcccatttcaaaggaaatcaaccgggcaattatcgagacttacgaatacctgcagaccattcccactcaaaaagagcggcaaaagcacctgaaagctgtggaaaaggggttgaaagaacaatacactccccgtatgaaaaagctttcctttgcacaaggaaaactgttaatcaaactggtagaccggcaaacccattccacttcctacgaactggtaaaagcatttatgggaccttttaaagctggattctaccagacctttgccgcactgttcggagccagtctgaaaaaacaatacgaccctacgggagatgatgcgcttacggaaagagtaatcttactggtagagagcgggcagctctgataacttcagtacatcatttaaaattaatgcccgccttacgtgcctgcgaatgttgaaactgacgttttacggtatataaagtgccttctttaacaaatttagaacctgtctgtttaaaccagaaagaaacattgtttttcacacaaatatcgtgaagcttcataatccagtcgaaattacagatacgggcctcatatccggactctccccctgcaaccacttgttcaacccactctcctatattataggcatccaaactgatttcttccaacaacggctcgcaaataataattttgtgttttataggaatagctctgtaaacaggcaaacgattatccgcacataactgattttcaactgtacaacagatagttacattatcatatccgtctttccaatcgacaggcagacactccataaccctgtttatacgtttggttatcatcaggaaatgaagatcactgcgttgacgaatcatttcccatgcctcagttcgccacgcatctgcatcttcaacaaaaaaatcggaagtaaaacaggtataaacaagagttccgtccggaattttaaaacttccgttcttattcgtccgtacaggcaaatcgaaatttttcgtcttaaccacaaccgaactgtcaacattcctttttgcatctccccggtagacataacaatatctgcatccttcactgaatttatggcaaccgtgccataaattccacatcaccgacctctctgcaataccattcatccggataaaatatcagttaatattatgttgataaacctgttactaacgtaaacatacaaaggaaataaataactgttatataagcaaataagttggttgataaatcaagtataaagctgttaattactaatatttgtccactcacttcaatttattgaataaatcccagataacaatgcctgccgtaaccgatacattcagagaatgcttcgtaccgtattgcggaatttcaatgcaaccgtgagaatggtcgataacttcttgttgaacacctttcacctcattccccattactatggcatactttctgtttttgtctaaagtcaactcattcagcataatactaccttctgcctgctctacggagtaaaccgtatagccttcgtttttaaggttatcaacagcttcaacagtgttattaacatacttccagtcgacggtaaattccgctcccaaagccgtcttgtgcatttcggcatggggtggagtagccgtaatgccgcacaaatagatacattcaatgcgaaaagcatccgaagtgcggaatacggaacctatattatgcaaactgcggatattatccaatacaactacaagcggcagtttttccgcttccttaaactcctctgtactaatgcggttcagttcggttatcttcagttttctgttcataatcgtaaggctttgtgccggtctgtacactatgtaccggctcatgtcgtgcaaagatacttctttccgttcacatccctgttaataaccgttgaaaaggtgtcaatagcgtatggaaagatttttaaaaataatatttgcattattcaaagtaacgcataatacgcctgcataacgaacaaaccaaaaaagttaacctaaactttcaaaggctgtataaacacatttttaagtactatttcactgattaatccctttaaagttattaactttgcggttatcaacaagatgttaatgaagtgaggccatggcagagtagggagcttattatcaagagatataactttaattgcttacgttaataacctaaggataaagtttagccttgtactaataacttcatgggcaagaaaattcggatttatttgtccacactattaacagcctatcatcactatcaaaggatttttaaagaaagaagagaaataaaaattattattatggataatctgatagaagctatcaagcaactgaagaaagagaagaatgcaatcattctggggcactactaccagaagggtgaaatacaagacatagccgactatgtaggcgacagtctggctctggcacaatgggcggcaaagacggaggctgatattatcgtgatgtgcggtgtccacttcatgggtgagacggcaaaggtactttgtcccgacaagaaggtattggtgcccgacatggcggctggttgttcgcttgccgacagttgcccggcggataagtttgcacagttcgtcaaagagcatcccggacatacggtgatatcctatgtgaatacaacggctgccgtaaaggctgttacggatgtagtggtaacttccaccaatgccagacaaatcgtagaaagctttcccgaagatgagaaaataatattcggtcccgacagaaacctgggaaattatatcaactccgttacaggcagaaatatgttgttatgggacggggcgtgccatgtacacgaacagttctcggttgaaaagattgttgaattgaagcagcagcatcccagtgcagtggtattggctcatcccgaatgcaagggcacggttttgaaactggcggatgtggtaggttctacggcggctttgctgaagtatgcggttgcccatcccgaaaaggaatacatcgttgccacggaatcgggtatcctgcacgagatgcagaagaaatgtccgcagacgaagtttattccggcaccgcccaacgacagtacctgtgcctgcaatgagtgtaactttatgcggttaaacacattggaaaagctttataattgcctgaaagacgaatctccggaaatcaaggtggatgcggaaatagcagagaaagcggtgaaaccgatcaagaggatgctggagatttctgcaaaactgggattatagtgaattattcccttgtcgctggcattcttcgatgagggtatgaaaatgatttcaatattttttcaggcacggattacatggaatttacggttttcataaaccggaaccatgtaatccgtgcctgaaaatttatcataatgcaagcatccgctgtagatactaattgaaaagtgcgccgtattctaattgaaaagagctccatccataactggttacaaaattactataagtttaaaatattca

SEQ ID NO: 4083 - DNA, 95608 bp, Unknown
  gut microbiota DNA sequence
acactgagacctccacgccataaagataggggtggtcttgattttttcatatcccactggcatataaatcgtgatttatatctaaatttgctcgtaacttaaacgaataaactgcaatgataaaaatatttcctaccattcagataaaagaactggatgcctatacgatagagaatgagccgattgcttccatagaccttatggagcgcgcttcgcaggctctggcaaaagccatatccgagcgctggggagcggaaaccccttttacggtatttgccggccccggcaacaatgggggagacgcgctggctgtttcgcgtctgctggcagagcagggatatcgggtggaggtatatctctttaatacgaaaggtactttgtctccggattgcgaaacgaacaaggaacgtttggcaagggtttctggaattgattttcatgagataaccacgcaattcgtgccgccagtgctgacagcggagcatgtggttgtagacggactgttcggcagcggactgaacaaacccttgagcggtggtttcgctgcggtagtgaagtacatcaactcctcgccggctacggtagttgccattgatgtgccttccggtttaatgggagaggacaatacctataatattcaggctaatatcatccgtgcagacctgacgctaagcttgcaactgccgaaactggcttttctctttgccgagaacgagccgtttgtgggtgagtggcagttgctggatatcggtttgagtgaggaagccattacagaaaaggaaacggattttgcgttgacggaacacgaagatatggcatcggtgctgaagccacgcggcaagtttgcacataaaggaagcttcggacgcgccttgttgatagcaggttcgcaaggaatggcgggagcatcggtgcttgcggcacgtgcttgcctgcgctccggagtgggattgcttacggttcatattcctttttgcaataactttatcgtgcagactgccgtaccggaggccatgacggaaatagatataaacgatgtccgtttttcttgtgccactgatactgacgactatcaggcggtgggtatcggtccgggattaggcagggcggaagataccgaagctgctttactggatcagatagattcttgccagacgcccatgatagtggatgccgatgcgttgaacctgttgggcgaacatcgcagttacatcggccgtttgcccaaaggcagcattctcactccgcatcccaaagaattagaacggttggttgggaaatgtcagaactcgtacgaacgtttgacaaaagcccgtgaactggcaaaaagcgccggagtatacattatattgaaaggagcttattccgttattattgcaccgtcgggaaagtgctggtttaatcctaccggaaatcccggcatggcgacagggggtagcggtgatgtgcttacgggtgtcgtattggccttgctggcgcaaggatacgatgcggaaactgctgcacgtatggccgcttatgtccatggactggcgggagatattgcttgcaagaagcatggagcaatgggtatgacggcaggggatattgttacttgcttaccgttggcatggcggatgctggaggagaaattgtaaactgcatgttaatgttggtatttcaatattctgatgttttaaaaactaatagattcgtttttttacattcttgtagtaatatggaaacaaccttgcctcagttcatatttaatgtagcacttttctgctctcttcaagtcgcgcaatacctcggacagcaccagcttcaatgtatccgaactgacatcctgtaacggacgtccgtcttcatcctctactttctggaagcgtttccaactgacatcgaatgtcgtgccgtagcaatgagcggaattttcggatgcattgccgttgcgacggcgcagacgcttgacatcgtcttttgtacgcagtacggaagttactgtaatcttgttcggattcaagcctttggcagccagggaatcgagaaagttataaccgattgtatcgagcagggcagccgctcccggaatgagatacgggacggaatgtgtcaaagaatcaaccgcgtacaaatcatttgttgcgatatactgcaacgtttctttcattttttccgcttcctcgcgcgatgctaacggacggatgccgatagcttgcgccacattcaaatgcttttcattcaaatcgccgaaagaacgtttgtaactgataacaccccgtatgttgtgcggttcattcagcttgagggacatgtcttttttcttacatccagccaggcagcaagttattgccatgcctgccaataaaaacagggaaatgaaacggcttttattatacataattaattctgaactttgtagaattgtgtaatttgtggtgaaaactcctgcaaagatagtgtaatcctatagaacaattggaagagtttgctgcttttttcccctctttttgtacctttgcagccaaattcaggaataaaaagaaacgtgcagcgatattttatctatttggcctacgacggcactgcttatcatggctggcagattcagcccaacggtgcaagtgtgcaggagtgtttgatgaaagcactctctaccttgttgcggcgtgaagtggaggtggtgggtgccggacgcaccgatgccggtgtacatgcttccctaatggtggcgcattttgacagtgaaactccgttggatgtgatattcatgacggataagctgaaccgcctgcttcccccggatatttccgtttaccgtctgcgtgccgtacgtcccgatgctcatgcgcgctttgatgccacggcacgtacatacaaatactatgttactacggccaagatgcctttcaatcgtcagtatcgttgccgtctgttccagactccggactttgaacggatgaacgaagctgcccggactttgtttgaatatacggattttaccagtttcagcaagttgcataccgatgtcaaaaccaataattgcaagataatgcacgctgcctggacgcaggtagatgaagtgacctgggtatttaccattcaggccgaccgttttctgcggaacatggtacgtgctgtagtgggtacattgctcgaagtcggcaggggtaaacttaccatcgggggctttcgccgggttatcgaacaaaaagaccggtgccgtgcaggaacttccgttcccggtaacgctttgttccttgtagatgttgcctatcctgaagaaacttttattagcggttagtggttagtgataagtgattacttttactctttctcttcttgtaatatagctaattcataacttataactcataattcatagctaaaatcaatgtggttattattagcctttctctcggcagccttgttgggattttatgatgctttcaagaagcaggcgctcaaagacaatgccgtgcttccggttttgtttttgaatacggtattttccagtttaatatttcttccgtttattctggtatcgtgttttgctcctgctgtgttgggaggtacgatgtttgatgttcctgtagtgggatggggtgtgcataaatttatcatcatcaaatctttcatcgttctttcctcgtggatattcggatatttcggaatgaagcacttgccgcttaccattgtaggcccgattaatgcaacgcgtccggtaatggtacttgtgggagccatgcttgtattcggcgagcggctcaatctgtatcaatggataggtgtgatgttggcagtcctgtcgttctttatgttaagccgttccggtaagaaagagggtatcgacttcaagcacaataaatggattctctttattgtactggcggccgtgacgggtgctgtcagcggattatacgacaagtatctgatgaagcagctgccgcctatggtggtgcagtcatggtacaacatctatcaggtgtttatcatgtgtcccattatcctgttgctgtggtatcccaagagaaaggaaagtacaccgttccgttgggattggactatcatcggtatatccgtctttctttgtgcagcagactttgtgtatttctatgccttgagttatgaggattccatgatttctatcgtatctatggtacgacgtggcagtgtggttgtttctttcctgtttggcgcccttttcttccgtgaaaagaatttaaaaagcaaggcggtagacctcattttggtgctgattggaatgttcttcctatatttggggagcaaatagaatttcaatagcgcgtatggcagaagatttgtgtatcagtaatggcggcaaagaagagaagtatcgtatgttgcttccgcaaattaagtgtctgattgaaggagaggatgaccttatcgccaatctggctaatgttgcggctgcactgaaagagacttttcactttttctgggtgggattttatctggtgaaaggtgaggatctggtgcttgccccttttcagggtccggtggcttgtaccagaataaagaaggggcgtggcgtttgcggaaaggcctggaagagggctgaaatattggttgtaccggatgtagatgcttttccgggtcatatagcatgcagttctttgtcgcgttcggaaatagtgcttccgcttcttcgtgcaaagggagaagtatggggtgtgctggatgtggacagtgaaaacttgaatagttttgatgaggtggatgcgcgttttttgcaggagttatgttcttatctgtaaggtgatttttataataataagattttagtattgataaaatattatagggatatggtgaagaagttgatagtctttttatttgtagtaggtatgggaattggttctttgtcggcgcaactggcaaaaacttgctttaccaatatgcccgattctctgagtccgttgcttacggctgtaaatcgtgccgactttattgacttcttggagagcaagatgaaagcggaagtaaccaatcgttttggcggtaagtcggaaatgactgagcttactcccgattatatccgtgtgcaggtaacacctcaaagtacctggcagatgaaacttttgtcagtgaacgacagtacccgtcttatctgtactgtttctacagtttgtgctccggcttgtgacagtcatatcaagttttatactaccggttgggaagagttgcccgctgtatcctatttggcatcattacctaatatgaatgattttattctgcctgcttccgatacggtagatgtgtaccgctatcagaatgctcgccttcaggctgatatgcttttaatgaaagccgacctttcgggcaaggacgctacgctgacttttacttttaccactcccgactatatggaaaaagaagcagcggaaaaactaaaaccgtttctccgcgatcctataatctatacgtggaaagaagggaagttcaataattaagtataaggtataaaataataaggcttatagaagctaagctaatgtagagtatcagaggggcagtgtagatttccttatttcttatacttaattttcatacttaattcttcatgtttgatttttattttactttgattttgtcgaatccttctccgtatactccgattacctgactttgtgacacaaaggcattcgggtctatgtcttttatcagccggaagataatggttgattcccgttttttggcaagtacaaacagcatttttatttccttgccggtatagaatccggaagcatttataactgtcgcgccgcggtgaggatacacattgatatgtctggctatctcctcatacttttcgctgatgatgaaaaactgcacggattggcgtgcactgtttactacttgatccagaacgaaactacagatgtatagagtgacatagccgtatactactttttcccagtctttcagcacgaagtagctggaagagatgatgataaggtcacaaaacagcatgacccgtcccagtgtaatgtccctgtatttgttaatgatagctgcgataatatccgttccgcccgtacttccgttcgaagagaaagcaatgccgatgccgccgccacagaaagatgctccgatgacacatgccatgaaaggctggtcgttcagtaggtgaacgccgtctgtcagttgctgaatgattggcagaaaggaagtcagggtaaaaacggcaaaaattgtcttgatgctgaacttccatcctaaaatacggatagcaagcaataacagtaggaagttgatgccgaaataaacatattgtaccggcagtcctgttgcaaaatataccagtgaggcaatacctggtactccgcctgtggtaatatcgttagggagcaggaatactgtccacccgataccatacataatcatgcctaaagcaatcattaaataatcccgcatttcacgaaatatgttctgccgggaaggaatgtgcatgttcatttgtagtttgcagttagatttgcggcaaagatagatattttatcaatctcgaaatataagttatcgggtatttgtattagttcggatgaaataaatttgcttgtggtaataattcttttgaaatgcttgaacttagcttcttaaatgttaggtagcctgcatttggcagaactaatgttttttgtacaatattctatttgcattactctaaatcataataaaaatcaaaagagaaagtctttgtatcaaatgtaatatataaatgattttaagaatgcatcatctttgcaatacagatattgtattcgaacacagtacttgaatatcgttaatcttatatttattttatgacattttagctggattgttatattattaattaaaaattatattgttaaactatgagaattctacacaaaaaactttgtctgttgatgttcctgttaacaggctgttctctcggcatttttgcccaaaatagaacaattaccggtacggttcgagacgccgttgatgtggtgattggtgcttctgtcacagtaaagggcaacagttctatcggtacgataactgatatggatggcaagttcaggatctcagtaccttcttccgctagagatttggtgattaaatttatcggatatgatgatgctgtaatcagattgggtacacctactgattataaggttacgttgaaagagtcttccgtgatgttggaagaagtagtagctattggttatgccaaggtgaagcgtaaagatttgacaggtgctatttcatcggtaggcggtaaagaattagctaatgtaccggtaacaaccgcgatgcaggcgttgcaaggaaaagctgccggtgtaaatatcgtaacagagagtggtgctccaggtgcaggtgccaacattaccattcgtggtggtatgtcattgactcaaagtactgaacctctttatattgtagatggatttgagatgggaagtgctcttgataatattgatattaatgacattgaaagtattgacgtactgaaagatgcttcttcgacagctatttatggtgctcgcggttccaatggtattattttgattactactaaatctggtaagaaaggtaagacacaagtttcttacaatacctatttttctttcgataagttagccaaaaaattagatttaatgtctaatgtagaagattttgtgaaatgccagtatgagtttgctgagttgacaggtattactcctacatggagtgctttttatgatgatggcatggctacagatgccacaggtttttatacgggtgtatatgaccgtatacatgagcgttacgctgatgcatcttctattgactggcaggatgaagtattcggtggatatgccatgacgcagagccataatgtaaatatctctaccggaacggaaaagactcaggtgatgttgagttataattataatggacaggatggtctgcttgccaatcattcagccaataaaagtgctttccgtgcaaaaatcaattcagaactttataaaggaattcgcctagatgtcaacgcaatgtttaataacaagagtgtagatggcggcggcagttattctggtatgaagtatgtgttacgtcaacctatcagcggtggtacttactttacccgtgaccaaatgttgacagagcagacctatgtggattttcgtggagctgagagttcctatacggcttctaaccctttgatacagaacgaagcttctacttccaataaacgttctcgtatgttttctgtaaatgccggtttagagtttgactttctgaaacactttacttaccgcattgccggaagctacagatggaatagcagcaaatccacttcattttccgatgaacgctctaccggttacctgatggacccagttaatacgggtatgacgggaagcataggaaatagtgaatcttattcttatcagataacgaatactttgaactataatcagacttttgcaaagaagcataaggtaaatcttttattgggtcacgaagtgagttatagtgaagatgaaagcaattctattagcgtgaagcagatgccctatcctaaccatggaattgatgatatttcattgggaaatgtagaagaaaagaaatcaggtcatggacatagtggaatcgtttctgctttcttacgcgctaactatacatttgatgaacgttatttgctgactgcaactcttcgtgccgatggttcttctaaatttgccaaaggacatcagtggggagtttttccttcagcttcagttgcatggagaatttctgaggaaagtttctggaaagagaatcgtatcaatgatgttgtcaatagtttgaaattgcgtgttggttatggtactacaggtaacaatggcgtgggaagcttctcttaccgcactaatgtttcattgacctcttatcctatgaataatgtaatgactaatcctgcttatgtattaggtacgcagttgggtaacccggaattgaaatgggagacacaagtagctaccaatgttggccttgatgtgtctttattcaatagcagagtaaatttgacagcagaatggtataataatcaggcgaatgacttgttattgaactgtgttgttccatcttctacaggttattctacacaatatcaaaatgtaggtaagatgcgcaacagaggttgggaagtcacgctgaatacagtgaatatccgaactaaaaatttcagttggacaagtgatttgaatttgtcttttaataaatcaaaagtagtagcgttggagcaaggacagactgaaaagacattcagtgcaggtgattcccgttcaggtatggttacctactatgcaacagtcggcgaagctttaggtgaaatgtacggttataaatatgaaggtatttatacagcggaggatttcattgagggaaaagatggtaaactgactttgcgtgaaggaattgtgaagcctaagtcgggaactcctcaaccaggtgatattaagtatgcagccgatgatgtagacgaagaagggaatcctatatttactaagaaaaatgtgaaaatcggtaatggaactccagattgtatcggcggtttcaataatacgtttacttataaaggttttgatttaagtgttttcttgaaatttgccattggccaggatatctataatgcaaataaacagagcttaactacttattctatatttgagaatattccacaggaattcagtaactattaccgtgtagtagatccttctaccggaaaacaagcaacgctgtcacgtatgcaggaaatgaaccccgatggttctgcacgtatttggggattgactaaaaataacaaggaatggggcttctatccttcttcttattttgttgaagacggttcttacttgcggttggctcagattacattggggtataccttgccgaaaacgtggttgaagaaagcgatgatttccaatgcccgtatttattttacagctaacaatgtggctacacttaccggatattcaggctatgaccctgaggtgagagctgctaaggataacgtggttactactccgggatatgacagttccgcatatccccgttcaagaagttatgttgttggtcttaatttaacgttttaattagaaaaagaatatgaatagcaaaatatttaaatgggctggtttgaaaaagaaactggttatggtggcaatactcagtttttcgttgggtatgagcatgacatcatgcactgattggctggaaatggagtcttatacctctgacgatgttgattatatatttgagaatgagactaaagcggatttgtttgtacaagggtgttacagagggcttatacacaaggagatgttttataatcttggtatgggtgaaacggtagtgcatacggcagaggatggtttcagtagtaaatacaaggcatgtaattatgattttgacccattggttcctaccactgttacaactatctttaaagagggataccgtattattgaatcaacaaatgtcgctatcagccgtttgaagaagatgcccgaaactgtgaagcgaaatcaattgttaggggaagcattggccattcgtgcattctgttaccacaacttgatacgtatctatggagatgtacctgctgtatatgttcccctggaagaaatggatgcaaatgatgagaaccgtttttatccgaaacgttcacctcgtgatggtatatatgaccaaattgtttcggacttgcaacaggctacagaatggttaccttggtacgaggagagcggttatacttcgaccgagcgtcttaccaaacaaggagcatatgcattgttggcacgtattgctctttatgcaggaggttattcattgcgctgggatttggagacaaatgatcctgcaactttgaaaatggctcgtagggatgatgctacacgtgttaaggaattatatgaaatagcgaatgatgcatgctttcaaatcaaagaacatggaaagaactcattggtacagggaaaagacggaatgagtggtttccaatatttgtggtataatcattgccagcgtaaacttacggagacagaatctgaaatgatttggcaattggcagaatatggtgacaagaccaactcggaattcggactttatctgcagccaggttcttataatggaacatatggttcacgcaagacattacagtttgttctgccaacttattatctttcatttgataaaaaggatactcgtcgggatgtaacatgtacttcatatagtatctaccccaaagatggcggtaaaaaaggaccatggattgataccggtactacttattcttctatactattgggtaagtgtcgtatccaatggtgtgtggaaccgcaagctgcaagccaaagaaatatcaatattccgcttatacgttattcagatgtacttttgatgtatgctgaaacggagaattacttgaataacggtcctactcccgaggctgaagttgccttgaaggaagtacgtacccgtgccggagtgggtgagttgcctattccaaccgatcagcaaggttttgaggatgcgcttgtgcaggaacgtaaatgggagtttgccggagaatttactcttcgtagcgatttaattcgtatgggacgtttggctaaggagttgagacaagccaagcaggatatgaaagacttgtccgatcgtaagggtgcatatgccaatgtgccgaaatatagattgtataaatatcaggaagacggtcaaaagtacggtgataagttccttgccatagattatattgaactgacagatcctacggagatagctacagtaaaaaatattccagaagacgaaaagcagtatagtgattatgaaacagaactgattgaaattgtgaagaatcatcgttctaatgtaacttcgcaggataaatggtatcctagggcaatgtttgaagctttcagcagtgaattcaatatgaaaggacaagctgttgtcggatttgccaaatctgctagaggtaagatacaagtaggcaagattatttatcaacagcctaccggttcggaggaaaatggaggttcttatcctgcttggattgataaaggggatggttctgatggattattttatggttttaaggagaacttttctgaattatgtccgtttgctgcaaaatctagtggacatcctttgatagataatccaaatctgactcaattgcctggctattgatagcaaacttctcatagactggagcgtggttttgtgactgtggcatttataacgcagtttgagaccacgctttttattaacctctaatattattgaaagtatgaaaatgacgaagacttttcttttaagtatgttgttggcttgtactggatgcactgaagaaataaacacaaaagaagtatatgtcaaaggagattccggaaagtttcccgattatggtgaggtgcttgcctttcctggtgcagaaggttttgggcgatatgctacaggtggacgtggtggagaaatatatcgcgttactaatcttaatgatgatggtgaaggttcttttcgagatgcggtgagtaagtctgaccgtattattgtatttgatgtggctggtatcataaacctgaagtcgacattgattttctcaaaaaatctgacgatagccggacagacggctcccggtgatggtattgtcttgtatggtaatcgtgtatcgtttacggatgcagataatttaatatgtcgtcatttgcgtattcgtatgggaattaaaggttctgatggcaaggatgccgcgggagtggctgatggagaaaatatgatatttgatcacttgtctgtaacgtggggacgtgatgagaatttttctataaacagtactacggcacgtaacataactatacagaattctattattggacagggattacagaatcattcttgtggtggattgatgcaaaccgatcttgaaaatggaatcacattgtttcgtaacctttatattgataacaagactcgtaatccgaaagttaaggggctgaaccaattcgtgaataatgttgtatataattggggaagtggcgctgcgtataacatgagtggtgattctgaaggtagttcgttgacttcaattgaaaataactattttattaaaggtcctgtggttaactggcagaatgtacgtcaggaagatggcagcataaaggtggaattggttgatatgtcaccaactaagccgtttatcggtggaaatgaacgttttaatacttattgcgttggaaacttttatgatgaagataagaatggtgttttgaatggggtagaaatacttcctgcaatcaattgggaagaactttgttctggtaatccgacttttcttgctacgtgtccggaaatatttcctactatttctcagcaatcggatgccgaaaaagcgtatgaatggattgtgaaatatgttggtgcaagtctgcctgtgcgcgatcaggtggatgcttatcttatcagcgaactgacttcattgggagaaaaagggactataatccaaaatgaacaagatacacaacagtttcctttaggtggtgtaggtgaaatagaatctggagtgagcctcttagatactgatggtgacggtatgcctgatgagtttgaagacggatatggtttggataagaataatccggacgatgcttcacaaatggcagaaaacggatataccaatattgagaattatatatttacgcttgatgaaagattagataaataattttttttttatgataaaattattgatgaaatacctgctatttgccggagtaatggcagtagtagttggctgtaccgaagaaaaaatggaggaagtctttatagaacaacctaattcttttcatataaaagtagaaggtgatgaagcttttgctttgaatattccttccggtggaaaaatcggtattaatggtaaagaggtacaagtcttgtcaaaagggttggttagtttatatgaagtgcctgccgaggaaaaatatacggtatactatcctttaagcgtacagctgcaagaggagcgaatgaagtttaacatgcccaaggaccagatttaccgtactggcggagttgatgtagcagcatgtccgtattatgctgttgctgataatgaaggattggcggatttgaaattgaaaccggcattgggtgcgttaaaattgataatacctgccaatcaggaatttgcttctatatcatctgtcgttttgaaatcagaatcggatgatataatggctggatgtatagaattgggtttggaaagtggtaatattatcactaaggaaaatatgtctcgtgaagtcgttttaaaaggaaatattgatataactgagaataatgaggctattattgttctacctccgcaaacatttactgggaaattggatgtgatgcttgtggctccgaaaggaggaggaacgtatagccttgatttaacaggaaaatctatagaagcaggtaaagtacttactgcaacgcttgataatatagattgggaaatgtggacttattattatggtacttctaattgtgtgatagtaccaccgggacagctttctgttacagtgaattgtgctgcctattatactactagttctgtttatgcatatgagaatatctctgcaggagataattatttaccgttgtctgctgcacaattgtggaatgatgtttcttctgattttgtaaagggagtaacactctcttcagatcgtaaatcatttactgtaaatcttgacggacgaccagggaatgcagtgatagctatttatgacaaggatgatcctaaaacggaagatgctaagattttgtggtcatttcatatttgggtgacagaggtcaaggaacagcatttgggtatgaacgtaaagggaaatagctatactgtacttgacagaaatttaggagcgacttccgttattcctggagaacgttcctctataggattactttatcaatgggggcggaaagatccgtttgtaggtacaggggagtatggaaaaaatagtaatgccaaaatgtacaatgaagtaggagaagttgcttttgctacagttaaaggtggagaaagtacaggcaatgtgaaatatgccatacaaaatccaacaaagttcattatgtattctcggagtaaaagcaatacagctaatccaccttattattgtgcttacgattggctatactatgctgattgggcattatgggggaatccagagggatatacttatccgaaagcatccaatcttacaaaatctatatatgacccgagtccagaaggttatatggtagctcctaatgatacatggatgggagccagcgatggttacgataaaacttcaagtatttttgctgcagcagaatggagtaagggatatgttatgatggatgatagcggacaaaactggtggtatccgataggaggatggcgtagtcgcaagaatggaaaattaactgcagcagatactaatggttattattggtgtagttctactgatagagagaaggccgcgaattctgtacatctaactcttggtaaagatgatgtcaaactgaattcgaataatagtcgtgctaattccagtttgatacgttgcgtcaagatacagaaatagaaataaaattttcattctctacgctaatgtgagatagctctaataagaatgaaagtatttcatttgaacagataagatagggaggattagctattataaaaaatatggagctataaaatattttgtgtaaatggaaaatacgggattcaaaaatgagttccgtattttttgtttacacaaaactttgcattgttcgatttgttcttgatagaattgacagacagttttcagttcaaatcttttgttttcgtcattgagtagagtagtggtagtatattctttctgttcagagttgaactctaacattcgttgttgtaactctgtttgtttatcaagaatgattttctgaatatactctttattgggacagtttggttttggcttatttcgtgtaaagtcccaataacggggtaggacagatatgcctaaactttggtatttcttctttccgtctttacagatgcggagcattaatgggtattcaccatttgctaaggttttccacttatagcatactacattaatcgttgcgtttataagattttggttgaactcttggttgaactcactcggttaaaccatagccaaaccgccattgtctaaaaacaaaaatcagatagaaatctttcgataactatctgattttcagaagagcggaagacggggctcaaacccgcgaccctcagcttggaaggctaatgctctatcaactgagctacttccgcaattttagtgggcaaagatggattcgaaccaccgaaggcgtaagccagcagatttacagtctgccccatttggccactctggtatttgcccttttgctgttgagaactactttaaatctctctttaagcagctttgtttctcaattgcgatgcaaaggtacaactatttttgtaaactccaagcaaaatctatcatttttattgcagtaattgcacattcatcacctttattacccagcttgccgcctgcgcgatcctccgcttgctccattgtattggtggtaattaatccgtaaattactggaacatcgccacttgcatttaattgagtgatgccttgagttgcacccatgcaaacgtaatcaaaatgcggtgtttctccacgaactacgcaaccaattgcaattacagcatcaacttcgctgtattctataagttgattggcaccgaaagttagttcaaaacttccgggaacggtttttaccatgatattttcgtctttagctccgtgtttttttaaggtgtcaactgctccttttaaaagagcgccggtgatattgtaattccattcggatactacaataccgaatttcatattctctgcactaggcactgagttgaaatcataatccgaaaggttgtgataagctgtagccataataaattaaagattaaaaattaaataaattggaacgtataaatgaagagcacggattacacggcactcacggttttgacttccgtgtatatccgtgtaatccgtgctcgaaatatcttataaataaggtatgaattacttctttaagagcttagcttgttcgatgtatttatcaatgtccatagcttgatatgaacggaagtatttatccttaatagaagtatatgctttgatggcatcgtcatacttaccctgcttaaccagaatttctccggcttgcttcagatagataggactaagtgtattattatctgcttcatcagctgctttcagcaacatggaagatgccttatcgagttgaccgagttgagcgtagcaattacccatagcgcctttcattgcaggagctaccatttggtcatctccgtcaaagttctccaatgcttttacggcttcatcgaatttgccaagatgtgcatagcaaagaccagcatatgccttggcaagattggctgcatctgtaccgctgtattggtcggctatcttgatgaaacctacgtaaccgatgctatcgccgttcagggcttcttcaaaagcatcagcttcaaaatattcttgtcctttaaaaagggctgcctgtgctttttcctcacgaggtgctgcatagaggttcttgtacattactatacctgctataatgatgattatagctaaaatagcaccgataattgtctttttgtttttgatgagaaatgcctctgattgtgtaagtgcgtcttccacgtttaaggcttcgttcgtctttttttgttctgccatttcttatatattctttttgttattattcattaatagctaattcgacccgcaaaagtaagttttttatagctatcaacgaaatttagcggcatctttttttattttgtattccaaaaccatagatttattttgttttgcgttgtctttcaagatacaatgaagataagttgtactttggcagaataaaatgaatgcattcgttttattctgctcccagtttgtattatctttgctgggaaaagtaacgataaactgtcatatgatactgaaacgcatatccatacttaattataaaaatctggagcaggtagaacttgctttttctccgaaactaaatactttcttcggacagaacggaatgggaaagacaaacttgctggatgctgtttattttctctctttctgcaaaagtgcggggaatcctattgattcgcagaatataaggcatgattcggattttttcgttatacaaggattttacgaagctgtggatggtacgccggaagaaatttattgcggcatgaagcgtcgtcagaagaagcaattcaagcggaataaaaaggagtatacacgtttgtccgatcatattggtttcttgccgttagtgatggtatctcctgccgattcggtcttgataagtggaggcagtgatgagcgtcgccgctttatggatgtagtgatttcacagtatgacaaagaatatttggatgcattgattcgttataataaagcattggcacaacggaatacattgcttaagagtgagatgccggtggaggaagagctttttctggtatgggaggagatgatggctcaggcaggtgaagtggtattccataagcgggaagagtttatcagggaatttattcctattttccagtctttttattcgtttatttcacaggataaggagaaggtcgggttaacttatgattcgcatgctcgtgacgcttctttgttggctgtattaaaggagaaccgtatgcgggatcagataatgggattttctctgcgtgggatacataaagatgaactgaatatgttgctgggtgatttccctattaaacgggaaggctcgcaaggacagaataaaacgtatctggtagctctaaagctggcacagtttgactttctgaaacggacgggtaccacagttccgttactgctgctggatgacattttcgataaattggatgcgtcgcgtgtagagcagataattaaactggtggcaggtgataactttggacagatctttataacagataccaatcgtgaacatttggatcgtattctgcataaggtgggcagtgattataaaatgttccgtgtagagaaaggtaacatttcggaaatggtagagacccaggtagcggttggtgaggaaaatgaagcatgaaacggaatgatgcagaacagataggaaaactgatacgaagctttctgaggcaggagagtttggagtctccgctgaatgaacggcggctcatcaactcgtgggcagaagttttgggaccggtcattgcttcttatacacgtgaactttatataaagaatcaggtgctgtacgtgcatcttacttctgctgcccttcgtcaggaactgatgatgggaagagatttgttggtacgtaatctgaaccggcatgtgggggcgcaggtgattactaacattatattccggtgatatgcgtacttgctgttggcattttaatacatcatcttcaatgtatctgtggttttaatcttcaattcctttagttcttgtaaggcacgttcataatagataggaacttctaaatcgttattgttgtgcgcatccataccgataatggctgtgcatccttcattggcagcaatgtgccagaaattcgggcagggataggtgtttaacccgtgttcctcattgtatgccacatatccgatgttatattccaacggaatgttaagccgggctgcggtccgacagatatgtcggctgattgtggcacagtgatgatcgaatttgggataagagcgcatgaataagtcagggtgggcaagacaattatacagaccgctctccatcccttcgatagcgctctcttcgtataagtcgagcatatcccgattgtctgtgtgatgtccgaaataagggaatttttcatccgtgtggaaatggtggttgccgaaaaggatgtagttcaactggtactttttaatctgttctttcagccaagggatatattcgggaaagtattcgcattccaagcctatttttatgtcgatttgctcccggtatttttctcgtaaatattgcaggctttctatatactccggcaattcctcgggaagcatgcgcatatcggctacgtagctggtacggtacttccaaggggtatggtcggagaaaccaagtatctggaaaccgcctttgatagcgctgagaacatattcttcatcgcttccgacggcatgcatgcaacgtgtggtatgagtgtggtagtttgttttcattgttgtgttatgatttcgtccatacggatgtcgaatggttctgccggaacttcttctactatttgaaacggaaagcaaatgccgactttgtatgcggaaggtatgcggggaagcagccggtcgtagtacccctttcctcttcccagccggtttccgtcacggtcgaatgctacccccggaacaatgacaaggtctattgtggcatagtcggtgaacaatgctcccgtaggctcctcgataccatacgctccaatagcaaggtcggcaggacttgtatatacgcgaagttccaaatcgttacctatgacaacaggcaggagtatttttttctttgtactccattttctgatgaagtcatgtgtgtgtacttcgtccggcaatgagtgatataataatataatgcttgccgctctaaagaccggatgtgcttcgagagcggcaagtatctcagcagattgatgcgtagcggtagatttgtgaagggtcttcagtaaagctatacgcttgcgcagttcttttttcttttccattggtattctcctcttcttggtcggcttgtagcggagctttcgggaaagcttcgccacgttccaggatttccaacgctttctttacagtagcgtcactctcgttgatatatcggatataggcttctttacccaacgtattgtagatgatattgccgtagaggttccgttctagtaatttataggaacggtgtatcagcagattgcgtcttttcactcctttggaatcggcaaaacgtatgaattgctctacaataccttggcggcgcaggtatttcagtaaatcctgttcattttcgaacgcactcaacttggcacggttacggtcggtgtattggaagctgaactgtataatcaaccccctgttgctgacctctatcagataagaagatactccggttgtgtcttgaggtacgaatacatcgggcataatgccgccaccgccgtaaacgggacgtcccagtccggtggagtagcgcaggttttcgtcgagtttgatgctgtctttagagaagaactctccatgttcatagcgggtcagccaatccatttcgtatttagagtctttcccgctttcgtagggacgctggatgcaacgtccggatggagtatagtagcgggcaatagtcaggcgaatggcggaaccgtcactgaaatcaataggctgttgtaccaagcctttgccaaaagaacggcgtccaacgatagttccccggtcgttgtcctgaatagcacctgcaaagatctcactggcagaagccgaaccttcatccaccaatacaacgagcggtgtcttttggcagctacccgtaccgttggcatactcttccatacgcggatatttacgtccttgtgtatatacaatgagtttcccttccggaaggaactcgtttaccatacgagtggcggcttccatgtaaccgccggtattaccacgcaggtcgatgatgaaacctttacatttttgatggcttagctgggcaatggcattcagcagttctacgtgtgaggtacgcccgaacttgctgacttgtatgtagccgaaatcatcgttgagcatataagcggcatcaatcgtgttctggggaatgtcgccgcgtgtaatggtgaaatccaacagctctttttcggtggcgcgcttcactcctaacttcacttgtgtgcctttaggtcctttcagattgcgcatggctttttcattagtcagccctttaccaacgaacaaactgtcgttaaccatgataatgcggtcacctgccatgagtcctactttttcggacggaccgccttgtattacgctgttcacgtgtatggtatcttcttgtatggtaaactggataccgataccgctgaagctgccttccagttcagaattgactgcttccaatttctgtgcgggaatataagtggagtgtgggtcaagttctgccaatatctgcggcattgctttttctaccagatcggtcatgttgacgctgtccacatactggtcgtctaccacccgcagtaacgcattcagcttgttggacgaaccgttgataattcccaaacggtttcctgcgaaatgtttggcataaaaagttccgataagtatgcccgctactacactgattgcaataatgagaggtgtgaaacgggaagagttttttgtacccataatgatatgtactatattttacgatttactatttggctgtgcacgaagttatcaactctcaattgacatatatattacttcgatacctgcacgtttcagcagttcgatgccgtcttccaaacgatatttttcggagtatacgacacgcttgattcctgcctggatgatgagtttggcacattctatacagggagaggccgtgacgtacattgtggcaccgctgctgctgttgttggagcgtgctattttggtaatggcattggcttcggcatggagcacatagggtttggtgagattgttttcatcttcacatacattctcaaaaccggatggcgtgccgttatatccgtccgagataatcattttatcctttacgatgagtgcacccacctgacgacgttgacagtatgagttttccgcccatatgcttgccatgcgtatataacgtttgtctaaggcttcttgtttacttctcttggtttcgtccatatttcagttgtatttagcgggctgtaaatcccatgacttttgttgtatttccgtctttgaagtaaagagtaatattatgtatatccccttcgtatttgaacacattctgtataccgttgataaatactttagccaacttgtcgctttctgtaccaataacttttcctttgatgcttatggtatgttcctttccgtctattttcagaactgcatcattgatactcgagttgacggcatggacattaaccgtaccggtaacttctccgttcacttcggcacagttaaaattgagagtgtagtttccttctgccccgaaagtattgagttcacggtcgatttcttctttactttcgttgctccacaagccttgatagaattgttcttttcctttttcggtggcgatacgaaccaatttccaggttttgttgttgaagatttccattacatcatcctcattgttgcaagcgcccaagccgagaagcatggatgtcatcatcaggcaacagactattgtctttattttaattttttctttcatctttttattccgtttctgattaatagcgcatctatggtaggttcttgtccacggaaacgcttgtagagtgtcatgggatgttccgtacctcctttcgacaggatattccggcggaaagagtcggctatttccggattgaaaatgccgcattgcttgaacagcgagaaagcatccgcatccagcacttccgcccatttatagctgtaatacccggcagaatatccgcccgcaaaaatgtgtgagaactgggtgctcatacaggtctcctctacaacagggagtatttgtgctttatcccaagccttcttctcataagctttaacatccccttcgaaaggggtattgcgtgtataccatgccatatccagcaatccgaaacttacttgacgcaggcaggcataagccacgttgaaattcgatgaatctacaatgcgctgcaccagttcgtcggggatgagttcgccggtttggtagtggcgggcaaaggtgtgcaggaactctttttcaatggcaaagttttccatgaactgagagggcagttctacaaagtcccaataaacatttgtgccacttaaactttcgtaagtggagttggcaaatatctcgtgcaagctgtgcccgaactcgtgcaggaaagtttccacttcatcgaaagttagtagggcgggcttgttttgtgtgggtttggtaaaattcatcacgatagatacgtgcggacggctgttttcgccgcttttctcatctgtccactgccctttgtagctcgtcatccatgcaccggagcgttttccggctctgggatgaaagtctgtatagagtacagcaagatatgtgccgtctttatcaaatacttcgtaggcttccacatccttgtgataaacaggaatgccgggattcttcttgaatgtgatgtcgtacagcctgcttgccagtccgaatactccttctttaactttgcttagctcaaagtagggacgaagcatttcatcattaatactgaacttccggtctttcagcttttgggaatagtaactccagtcccatggcatgagattgaagctttctccttcttcgttgcgtgccagtgcctgcacttcagcatattctttttgtgcggtgggtgtatatgcttctaacagttggttcagcagtttgtatacagcgtcgctgttttgtgccattcgttctttcaggttgtattcggcaaagttgtcgtagcccagcagttgggcgatttccatgcggacgttggcaattttctttacgatttccagattgttgcaggcattgtcatgcgtgcatttggtattatatgccatgtaaagttcttggcgcaggtcgcggttgtcagcatacgtcatgaaagggctgtaacttggggcatgtagggtgaatacccaacctttcacacctttttcctgcgctgtctctgcggcggcatcaacggcgctttcaggcagaccggacaactgtgacttattggtcagcaccaattggtagtcgtttgtctctttcagggcattttcactgaactgcagtgtcaacaagcttaattctttgcacaatttacggtatttttccttggcatctccttgcaggtttgctccgttgcggacaaagccggtgtagatgtcttctagtagcttggactgttccggagtaagtttattcttgtctgtcagctcatatgcggctttgatgcgggcaaatagcttttcgttgaggctgatgttgttctcatgttcgctcattagtggcatgatttcccgggcaagttcctgcaattcatcgctggtttcggcgctgagcagattgccgaatacggtagtgacacgatgcaacagttctccggacttctcgtagggcactatcgtgttttcaaaagtcggagcagcagggttattgatgatcgcatctatttctgcattttgccggcggatgccttcatgtatggcaggtgcgtaatgttcagtctttatcagattgaaaggaacagttccatgtggagttgaatacttttcaaagaaaggatttgaggcttgtatcatagtcataaaacaaagtaatattagtgtaagtttaagtcttgtcatatacctatctcttgaagaaaataaattaattgcaaatgtgcaaaaaaaataggcgacttcataaaagaagccgcctattttttattattttctaactgtatattagcagttaacagatgccatgtgagcaatcaggtcaagaaccttgttagaataaccgatttcgttgtcgtaccaagatacaactttaacgaaagtatcagtcaaagcgatacctgccttagcatcgaagatagaagtgcgagtgtcacccaagaaatcagaagaaacaactgcatcttcagtgtaacccagaacacctttcagttcgccttcagaagcttctttcatggcagcgcagatttcagcgtaagtagccggtttagccaagttaacagtcaagtcaactacagaaacgtccaaagtcggaacacgcatagacataccagtcagtttaccgttcaaagccggaataactttacctacagccttagcagcaccagtagaagaaggaatgatgttgcctgcagcagcacgaccacctctccagtctttcatagaaggaccgtcaactgttttctgagtagcagttgtagagtgaactgtagtcatcaaaccgtcagtgataccccatttatcgttcaatactttagcgataggagccaagcagttagtagtacaagaagcgttagatacgaattgagtacccttaacataagtcttttcgttaacaccgcaaacgaacatcggagtgtcatccttagaaggagcagacattacaacgtattttgcaccagcttcgatgtgagcctgagctttttccttagtcaggaacaaaccggtagattcaactacgtattcagcacctacttcgttccatttcaggtcagccgggttcttttcagcagtgatacggatagattgaccgttaacgatcagtttgctgttttcaacatcagcttcgatagtaccgtcgaattgaccgtgcatagtatcatacttcagcatgtaagccaagtaatctaccgggcaaaggtcgttaataccaacgatttgaatatcgtttcttttctgagcagcgcggaatacgaaacgtccgatacgtccgaatccattaatacctactttaatcattttgtttaaacttttaagggttttataatgtttaaaattaaactttcaaacttttacagcatttcttttacgaattgcgctgcaaaagtaagaaaatgtttttatattcgtatccaaaatcataattaaataattgaaaagatgggaaaaagtttatttttacaggaatttaaggcttttgccatgaaaggcaatgtggtcgatatggctgtcggtgttatcattggaggtgcgtttggcaagattgtatcttcagttgtggctgatgtgataatgcctcctttgggcttgctgataggcggtgtgaatttcaccgatttaaaatgggtgatgaagcctgccgaagtagtggacggtaaggaaatagccgctgtaacactgaattacggaaatttcctgcaagccactttcgactttctcattatcgctttttctatctttatgtttattaagctgataaccaagctgacggaaaagaaaaaagcggaaacgcctgctgctcctcctgcaccgcccgtactgagtaaggaagaagtgctgttgacggaaattcgtgatatattgaaagaaaaataatcacgtttttttatttaaataataaagaaattcatatataaatatcctcggaagatggtaatgcttctttcgaggatatttgattttataggattaaaaaaggattattgcctagtcttctttcaggttgtacttcaatctctgatatttacgaattgtctcccgttgaaggctttcaagtgtactgatctctatggatagttggtggagcttgggatcggtctctttgagaattcgtgctgttttataatcatagatttccggtacaacttcctggtttcttttacattcgtccagtagataggaagcacaggctatataatgctctttgaaggctttgcgctttttttcgagcagcggacggtaagccttatcctcattgtatatgcgttgatagaaaccgtccaaggcaactttgcggtcttttttctgttccgtattgatggctcttttatataaagaatcgagggtgatatactccgggtaggatgtcaatagtgcttcaagttcttttttagccttttcgtaggctaatctctgaggttccagttcttccggttttatggtagtggcaagttgtatcaaccggggttcgcggttgaagttggtgattttgtagagtttcttgcaatattcaatgtatttttctgttatttcccaattgtactgcaaagttttttcttgcaaatcagtctgtatgcttgtcagagcattttctaattgagcaatttcaatttgtagcgaatctgctttggaaaggggctgtgctgctatcggcaataggcagtaaagtgtaaggaccgctgataggatgtttcttttcatgatacttagatatttggtttagtaacagagacaaatataaattctttattttataaatccaacaaatcctttagtttcttgaaagataagcggtgcaggtgttttccgttctctgtatattgccgtattttgttttttgctctgaacaaattttgccatattttgctttctgctctaaacaaattcgtatctttgtgctccaaattactaacacctctgtttctatgcaagaaaagattattattcttgatttcggctcacagaccacgcagcttatcggtcgccgtgttcgcgagttgaatgtatattgtgaaattgtgccttacaacaaatttcctcagggagatgcgagtgtaaaaggagttattctttcaggtagtccattttccgtatatgacgaaagtgcgtttaagatagatttaaacgaaatccgtggtaaatatcctatattgggaatctgctacggtgcacagtttatagcctataccaacggcggtaaggttgaacctgcgggtagccgtgaatatggacgggcgcatttagcttcttttgataaaaacaatgtgctttttaagggagtaaaggaaaatactcaagtgtggatgagtcatggcgatactattactgctattcctgaaagcttcaagactatagcttctacggataaagtgaagattgccgcttatcaggtggaaggagagaaaatgtggggtgtacaattccatccggaagtattccatagcgaggacggtacacagatgctgaaaaactttgtagtggaagtctgcggttgcaggcaagactggagcgcagcttcgtttatcgaaactacggttgcccagttgaaggaacaattgggggatgataaagtcgtgctcggtttgagcggtggcgttgactcttctgttgctgctgtattgctgaatcgtgctatcggaaagaatttaacttgtatttttgtggatcatggcatgttgcgcaaagatgaatttaaaaatgtattgcacgattatgaatgtcttggtctgaatgttatcggagtggatgcaagcgctaaattctttgcggaattggcaggagtgaccgaacctgaaaagaagcgtaagattataggtaagggtttcattgatgtattcgatgaagaggctcataagattaaagatgtgaaatggctggctcaaggaacgatctatccggactgcatcgagtcgctttctattaccggaactgtaatcaagagtcatcataatgtaggtggacttcctgaaaaaatgaatctgaaattgtgcgaacccttgcgactgttgtttaaagatgaggttcgccgtgtaggacgtgagttgggcatgccggagcatttgattacccgtcatcctttccccggtccgggattggctgttcgtattttgggtgatataactccggaaaaggtgagtatcctgcaagatgcggatgatatttttattcagggattgcgcaattggaaagtgaaagatgccggaggaaatgagacaactctttatcatcaggtatggcaggcaggggttattttacttcctgtgcagtctgtaggcgtaatgggcgatgaacgtacatatgaacgtgcggtcgctttacgtgctgttacttccacagacgcaatgactgcagactgggcgcatttgccttacgaatttttgggcaaggtttccaatgacattattaataaggtgaaaggtgtaaaccgtgtaacctatgatatatcgtcaaaaccgccttccacaattgaatgggagtaaaaacggttgctgaagatatattaaagcaaagattatgaagtgaaccccgaaagttatttaattttcggggttcatttcattttaataatcttcttgaagatatttgcattttatgtacttggtcagtttatcaaattttcaacattaggcagtatgatttccccgcggtgtaattcaaccaatccttttgtttgcatagtattgagggcttttgacactcctgttcgggtttcgttgatgatttgagccaaatcctccatttttattttcaatattttttcgcccgacagccgttctgtatgactgaggatgaaatggataatgcggctttcgggactattgccgaatacagcccataagcggttgtgcagcatttgagtgcggttactgatgatattcatgtaattcaagcggaatatttcgtagttgaaaagctctttcactacaaatgctttgctgatgctgaccgtatgcacttcggttcttgcccgatatgtagaagcataatgcgttttcatgccgaatatggagtgagcctcaatcaggaaaggggctggaaaatattcggtgaagcagtaagaagaatcggcggatgatgtggaagatgcaatttctccttttaggacgaagaccagttcatgacaggcgcccccctcttttaaaagaagctcacctggcttatattttgtgaagtacaatttgaccttttccaaaatacgggtgaagtcttcttgggcaagtccttgaaacaggggtaattgtaataacgtatcaaacattgtttccatatcattctcatcttctggtttaagaacaaaagtagatataatcgaactctgccgtaaacacttgccctttctttttgttttttttattatttcttaaacgtgctactcattcacttttaagaaattttgcgaaatacataaaaatagattatttttgtagaaaaaaggagggacatatgttttcagcatttaattggcagcagatgaccagtgcttttatcgtgctgtttgccgtgatagatattataggctctattcctattattattaatttgaaagaaaaagggaaagatgtaaatgcactgaaagctacattaatatcgtttgccttgctgattggtttcttttatgcgggtgatatgatgctgaaattgtttcatgtggacattgagtcatttgcggtggccggtgcgtttgttatttttctgatgtcgctggaaatgattcttgatattgaaatctttaaaaaccaggggccgattaaagaagcaacgctggttccgctggtctttccgctattggcaggagcgggagcctttacaactttactctctttgcgtgcagaatatgccagtatcaatattatcattgcattagtcttgaatatgatatgggtatattttgttgtcagcatgaccgggagggtagaacgttttttgggtaaaggcggcatttatattatccgtaaattttttggcattatcctgttagcaatttcagtgcgtttgtttatggcaaatatttcattgctgttggacagctttcgtcattagttcttcttttctttttcctgtgtagaaggaattgtaacagctttccataaagaaagatattgaaaggcatcatagggcaacttgccgtgtgttgaaattcccggtctatccctgcttctaagaatccaagtgtggatgaagcgaataaatgaaaatagtggtataccatcgccagaactatttgtagcccgtcatgcttcctatattgtacagggatttatcattttcgtacaatgctttggattatttgcttgaaaagcgaaaaaaaaaagactttttattttgcgtgtaggctttaattcgtatttttgggcattgctacaagctttgtagcgcatatacctgaaataattaacctttaaataatgcacaactatgagttatttacgatttgacaagaccttgatggttaatctgcaagaatctttgccaagggagatacttcggactaacaaatcaggagcctatcattgtacaacgattgtagattgtaacacacgcaaatatcacggcttgttggtaattcccgttcccaacctggatgatgaaaaccatgtgctgctgtcttctttggatgaaacagtgattcagcacggtgcagagtttaacttgggattgcacaagtatcagggaaataattttagtccgaacggacataagtatatccgtgagtttgattgcgagcatatcccggcaactacttaccgtgtgggaggcgttattctccgcaaagagaaaatttttgtacatcatgagaaccggatactgattcgttacaccttggtcgatgcccattcggcaacaacacttcggttccgtccctttttggcattccgcagcgtacgcgaatacacgcacgaaaatgcacaggcaagccgtgattaccaaccggtggaaaacggtattaaaacctgtatgtatcccggttatccggaactttatatgcagttgaacaaaaagaacgaatttcattatcagccggattggtatcgtggcattgaatacccgaaagaacaggaacgcggttacgattttaatgaagacctgtatgtacccggttattttgaagtagatataaagaagggtgaaagtatcgttttctctgcgggtatctccgaaatttcaccgcgtaagctaaagcagacttttgaggctgaggcagaagaccgtactccgcgtgacagcttttatcactgtttgaaaaattctgctcaccagttccacaataaacaaggagaagaacattatgtacttgcaggctatccctggtttaaatgccgtgcgcgcgacttgtttatctctttaccgggcttaactttggccgtggacgaacaagatgaattcgaggatgttatgagaacggcggaaaaggctatctatgctttcattgaggataaaccggttggttataaaatatatgagatggaacatcctgacgtgcttttatgggcagtatgggctttacagcagtatgccaaggatacatcgcgcgaacaatgccgtttgaaatacggcaggttattggaggatattatgaattatatctgcgctcgtaagcatgataatcttttcttgcatgaaaacggtttgctttacgcaaatggcaaggaaaaggctgttacctggatgaactctacggttaacgggcatcctgtaatccctcgcaccggatatattgttgaggtgaatttgctgtggtataatgctttgcgttttgtttcagacattgtgcgtgagggtggaaatgacattcttgcagacaaattggatgctcaggcagaaataacaggaaaatcgtttgtggaagtttttcgtaatgagtacgggtatctgtttgattatgtagacggttatatgatggattggagcgttcgtcccaatatgatatttgctgttgcttttgactattctccattggatagggcacagaagaagcaggtacttgatattgtgacaaaagaattgctgactccgaaaggtctgcgtacattgagccctaagagtgggggatataatcccaattatgtcggtcctcagattcagagagattacgcataccaccaaggcacagcctggccgtggcttatgggcttttatatggaagcgtacctgcgtatatataagatgagtggtatttcgtttgtagagcggtatctgatcggttttgaagatgagatgacgagccattgcataggttctctgtccgagttatttgatggaaacccgccgtttaaaggaagaggcgcggtatcgttcgccatgaatgtggcggagattctgcgtatcttgaaattgttgtctaagtataatttataggaggaggaacgaagatgaaagttttaatgtttggttgggaatttcctcccaaaatatatggtggccttgcagttgcatcatacggaatcacgaagggtttgagtcagcagggagatgtggagactactttctgtatgcctaagcctacaggtgaagaagagaaattcttgaatataatcggtatgaaccaggtgcctatcgtgtggcgtgatgttgattacgattatttgaagtctcgtttgtcgacaatgagtccggagcaatattatgctttgcgcgaccatatttactcggatttctcctatatgcacgtcaatgatcttggctgtatggactttgccggcggttatcccggaaatttgcacgaagaaatcaataacttctcgattatagccggagttgtggcacgtcaacaggaattcgacattattcatgcgcacgattggctgacatatccggctggtgtacatgcgaagatggtgagtggcaaaccgctctgtatccatgtgcatgcaacagattttgaccgttcgcgggggaaggttaaccccacggtctattccatggaaaaaaacggaatggattatgccgactgcattatgtgtgtgtcggaacttacccgtcgtactgttatcaacgagtatcatcaagatccgagaaaggtatttgccatgcataatgcggtgtacccgctttcgcaagaataccaggatattccgcgtcctgaacattcgaaagagaaggtcgtgactttcctcggacgtatcactatgcagaaaggtccggaatattttgtggaagctgctgcactggtgttgcaacgtacccgcaacatccgctttgtgatggctggttcgggtgatatgctgaatgccatgattaatatggctgccgaacgtggcattgcagaccgtttccattttcccggctttatgaaaggtaagcaagtgtacgaagtttataagaatagtgatgtattcgttatgccttccgtttccgagcctttcggtatcgccccgttggaagccatgcagtgtggaactccctctatcatttccaagcagtccggatgtggtgaaatcctcgataaggtaattaagaccgattattgggatattcatgctatggcggatgccatttattccatctgtatgaatccgtctttattccattatcttcaggaagaaggaaagaaagaagtggacggaattacctgggaaaaggtgggcttgagaatccgtgctctttacgaggatgtgttaagaaactatggtaaataataaaacaacaaatactaatgagaactatctgtctttattttgagatacatcaaattatacatctgaaacgttatcgtttctttgatattggtacaaaccattactactatgatgattatgccaatgaaacaagtattaatgaagttgccgaacgttcgtatattcctgcactgaatacgcttattgggatggtgaaggattcgggtggtgcgtttaaagtggctttatccatctcaggtgtggcattggagcaactggaaatccatgcacctgctgtaatcgacctgttgcaccagctcaatgatacgggatgctgtgagttcttggctgaaccgtactctcatggactttcttctttagctaatgaagattgcttcaaggaagaggtgatgcgtcagagtgctaaaatgaaacaaatgtttggcaaagcgcccaaggtattccgtaactccagcctgatttacaatgacgaaataggtgccatggtggcaagtatgggttttaagggaatgctgactgaaggggcaaaacatgtgcttggctggaagagtccgcactatgtgtaccattgtaatatgaatccgaacttaaagttactgttgcgcgattttaaactgtcggatgatattagtttgcgtttctcgaattccgagtggaacgaatatccgttgtttgccgataagtatatcagttggatcgatgcattcccgcaagaggagcaggttatcaacatatttatggagctttgttcattagggatgtcacagcctttatcctccaatattctggaattcttgaaggcattgcctgcatgtgctaaggaaaaaggcattactttctcaactcctaccgaaattgttaccaagttgaaatccgtttcacaattggatgtaccttatcctatgtcgtgggtggatgaagaaagagatacaagttgctggttgggcaatgtaatgcagcgtgaggctttcaataaactgtatagtgtggccgagcgtgtacatatctgcgatgaccgccgcatcaagcaggattgggattatttgcaggccagcaacaacttccgctttatgacgaccaagaatagtggagtagggttgaaccgcggtatctatgaatcaccgtatgatgcttttactaactatatgaatattttgggagactttatcaagcgtgttgattctctttatccggtggatattgataacgaggagctgaatgctttgcttactacaatcaagaatcagggggatgaaatagaagaacttcataaagagttggaaaaagcgcagaaaaagttggaaaaggaaaaagccgctgagaagaaaaaagaaccgaaagatgcttctaagtctgcggtcaagtctactacaaaaaaggttacggcaaagaagcctgctgccaagtctgccaaatagcactatccggctttagataatgttagtcctccatgctttatttgagagtatggaggactttttttgtagcttggattaattctattctgcttatgtcagaaccttctctttctttaaagtaaactataaaccaaaatcttcatttataaaaactaaacttcggtttttataaatgaagatttttgtgtataaagatatagaatctaagttcctgctttttttacttattgaaagaagtatatgtaacctctatttgcaatttggttccaccctgttccgggtctccacctttcagcttggcatacgtaggcttcaagtcatgctgaataccaattatggaaggagtagtgctgtttgtatcgtaggtcacaactacggggattattactactttatcccaatcctttccttcgccttcgctccattctgtttcccatgcagtttcattccacgatgtacctgccgcttctttggctttctgtttggcggcctttttttcattgatgcaagcagaaaccagacgggctatattcataaaggtgtattggttggtttcgatactgttgtgagttgcgacaaaagaggttacattgtttgcaagctcattgttgacaaagaaagaatccatgtcttttttacgcagcaacagtacggtttccggtgcactcatgctgaatttatacttgttactttcctgattatagtttgtgaaagtcagcttgacagcattcagtgtgtcgtttgacaactcttcatgtattttatcatagggcaaggttgcctctgtaaagatacctgcaggcgatttgagataactccaaccggtttcattcgctttcttgattaattcctcggagctttcaaacttattggcttgaataacttctttggtggaggcaaacactgttgccgtactataatataaagagtctttaccgtcttttttggtgagcttcactcctaaactgtctacgtaatgaaagcggaattgcatttgcaggtccacacggtcaacgtatagaattgttccgtctccgtaatccgtcttaatatagactcctttcaatacattgtcaataaacttctccgagtttttgaagaaatcgttttctcctctttggtaagctctgttcaactgcaggagttcatttccaaactgcttgcttagaggcagagttacattgggataaaaaagactgtttccattagagtcggtagcatttcttacagagtcgggaacagaggtgtcataagcagtatatgctttgtgcaactcaaaataaccggtttcttcaaaatgcggcttgtcagtttcgtttccgtaatattctttcggattaatatcggtatagtgcttgttttctaatcttttgtccagctcatataccgacattctgcatggatttaaggaatctccgaaccatgaagagtagtatattgtcaactgtgctgaaacgacggtatcacccgccattgttcccacatgcttttccgggtcgtatactgcggggaatttgaagtcatccgtacagttcagctcagtcaggaagctggcttcgtagcttccaaaaccttcgggagcaggatctgtgaatttacctacatatcccgtacttgtcttggcataaactttttctgcaaggagagatttggtggtgacatcaaaagtcgtagttgtggctgaaataccgtcagaatcaggtaacatgctcatgcccaatgtgccggtattgtcatcgcatccgtagaaagccagaattgcaaaaagcaatatccctaaatattttactttcataattcttcgtattgatactttatttttattctgctccccaaacctggtcgtagaagtcgttgcaggcatctgcaaagatttcgggagattgatagcctaagacaggcttgccgatttggcgggcatatgctatcacttcctcattcacgtgttcgctttgctggatgacaccgtcggaatagtccaccgccagtttgcagagagctgtatagtccaccggctctttcaaatcggcaacgtctttcttacagatacccttcagaagaagcttgctggcaaaatcgggatggaacggttccttgaagtcattgtcataaagtgaaaagacaacttttgcatctctgaatgacggttcgtctttatacgctttcttgatatacagcggtgctaatgcagtcatccagccgtggcagtggatgacgtccggacaccaacgcagtttcttgactgtttccaatacaccgcgtgcatagaaaatagcgcgtgcatcgttgtcttcatattcaacgccgttctcatcaaccacttgcaggcggttctgaaagtaatcgtcgttgtcgataaagtaaacttgcatgcgggcagactgtatggaagctactttaatgataagcggatggtcggtatcgtcaatgataaggttcatgccggagagacgtatcacttcgtgcaattggtttctgcgctcgttgatgtttccccatttgggcataaacgttctgatttctctgcctttttcttggattgcttgcggcaggtttctgccaacaagggacatttcggattctgaaacgtaaggggtaatttcttgtgttataaataaaaccttgttcgcttttgtcataataacgatgttctcaattattctgcaaagatataaaaaaaatcgggcaataaagcaagacgagctcatctataattccttatgaattgttaactgtttgtgtatcagtgataaaaagggtcggatacagctttgggtatggaatgacttttgcattaatttatgatatttcttctttatgtggtaaataatagcttattttgcatcgttttgcgaacaactaagttattatataaccaataaaaatggaaatagtacatactatcaaggacttgcaggccggactttcggctatgagagcccagggtaagaaggtcggtctggtacctacgatgggggccttgcatgccggtcatgcttcattggtaaaacgttgtgtggcggagaatgatgccgctgtagtaagtgtttttgtaaatcctactcagtttaatgaccaaaatgatttaatcaaatatccccgtacgccggaagctgattgtcgtttgctggaagaatgtggggctgcgtttgtttttgctccggcagtggaggagatgtatccggaaccggatacgcgccaattcagctacgcacctttggatacggtaatggagggagcctttcgtccgggacactttaacggtgtgtgccagattgtgagcaagttgtttgatgcggtgcagccggatcgcgcctatttcggagaaaaggactttcagcaattggccattatccgtgaaatggtgcgtcagatgaagtatccgttggagattgtaggttgtcccattgtacgtgaggaagacggcttggcgctgagtagccgcaatgcccgtctgtctgacgaggaacgtaaaaatgccttgaaaatttcgcagactttatttgaaagtcgtacctttgcggcttcgcatacggttgctgagacacagaagtttgtggaagatgccattgcagccgctcccggcttgcgtctggaatactttgaactggtggacggcaacacgttgcagaagattgccgattgggaagatacctcgtatgccgtgggttgcattacggtgttctgcggagaagtccgcctgattgacaatatcaagtataaggaataataaacataaaaaagccaatcttatgatgattgaagtgttgaagtctaaaatccattgcgcccgtgttacggaagccaacctcaattatatggggagcatcacgattgacgaggatttgatggatgccgctaacatgattgccggcgagaaggtttatattgccgacaataataacggtgaacgttttgaaacttatatcattaaaggcgagcgcggttcgggcaaaatctgtttgaacggcgcggcagcccgtagggttcaaccggatgacattgttattatcatgtcgtatgcattgatggactttgaagaggccaagacgtttaagccgacggtgatttttcccgatccggtgacaaacaaggtggtgaaataagttctgtatcagataaaaagaaagcgtatcgttcattgcgatacgctttctttctttttatggtgaagcttctttagttcttcagttgttcattcatcgctgcagcggctttccgcccgtcgcccatagcaaggattacggtagcaccgccacggacaatgtcgccaccggcataaatggtcggtatggacgactgcatgttgtcgtttacagcaatcgtacctttgcgccccaattcaagtcctttgatagaactcggaacaatcggattaggcgatacacccacgctgacaatagcaaggtctatgtcaatcgtttcggtagctcccggaatggggacaggactgcggcgtccggatgcatcgggttcgcccagttccattttttgaagaaccacttgttttacttttccttgctcgtcggcaatgtattctatcgggttgtggagtgtaaggaattccacaccttcttccttggcatgtttcacttcctcgatacgcgcgggcatttcttcttccgaacggcggtagataatcatagcgcgttcggcgcccaggcggcgggctgtgcggacggagtccatagccgtgttaccgccaccgataacggctacgcatttaccgaaaggcacaggcgtatcggaatcctcgctggcggcgtccatcaggttgacgcgcgtcaggtattcgttggacgataggatattgatggagttttcaccggggatgttcataaagttcggcagtccggcaccggaagcgacgaatatgcctttgaacccttcttcttccagttgttctacgcttaatgtcttgccaatgatgcagtccttgataaacttcacacccatttgggcaaggttctcgatttctacatccacaatcttgttgggcagacggaactcgggaataccgtatttcaatacgccgccgatttcgtgcagtgcctcgaatacggtgacatcgtaaccatatttcgccatatctccggcaaaagacagaccggcgggtcccgaaccgattacagcaatcttaatgccgttcttttctttgatttccggcacggagatttgtccgctttcccgctcgtaatctgcggcgaagcgttccagataaccgatggcaaccggcttttcgttcatctttaagtggatacacttggattcgcactgtttttcctgcggacacacacgaccgcagacagcgggcaatgcgctggtttctttcaatgttttggctgcttccagaaactcgccgcgttctatattcttgatgaaacggggtatgtctatacctacggggcaaccctccatgcaccccggattggcgcagtccaaacagcgtttggcctctgtcaaagcctgttcctcggtcaatccccggttcacttcttccttgcggctgtgtgaacggtattccgcatccaactcgttcatctccacgcggggaatggcagtacgctctttggctttcatggatttgcgcagctcttggcgccaagcggcattgcggcttttttcatcttctgcctgagtgttctcgccggttgcctgacaagtttgcggttcttccagtttatgcatttcttcgcgttcgatatttttgaatgcacccatgcgtttcagcatttcgtcgaaatctacttgatgaccgtcgaattccgggccgtctacgcatacaaatttggttttaccgccgatggtgatgcggcaggcgccgcacattccggttccgtctaccatgatggtattcaaggatacatcggtgggtatttcgtatttcttcgtcagcaaacaaacgaatttcatcataatggccgggccgatacagaagcatttgtctactttctcgcgtttgataacatcttccacaccttccgtaaccaaacctttacggccgtatgaaccgtcgtccgtcatgataatgacctcgtcggagctttcgcgcatctctttttcaaggataatcagctctttggtgcgtcctgccagcactgtaatcacacggttaccggcagctttcaatgcctgcacgatgggaagcatcggggctacacccacaccgccaccggcgcaaacaacagttccgaagttctcgatatgggtggcttgtcccagcggaccgacaacatcggttatataatcaccttcattcagctcacacaagcgggtagatgagagacctacttcctgtacaaccaaagtgatagttccctttacagggtcggcagcggcaatggtcagcggcatgcgctcgcctttttcgcctacacgtactattacaaagtgtcctgccttgcgcgatttagcaattaacggtgcttcaattactaatttgaagaccttttcagagaaatgttctttgctaatgattttattcattatcttataattttgttggtgtaattacgcgatttctttcagaatgatagattatgcaaagatacgggttatttgttaataacaaagaatgtgcaggggaaaaaagaggcagagggaagggatgaaagggttttgaggatagagaatgaccttttaaaggaagagggacttaaggagtgaggggacaattatggggattttagttttgacacacattcctgtaagatataaggctttcagccttctgctctgtatgaaaggtgcgtcagaataataggaattttatattctgacgcaccttttattattttgaatgaggaaatgatgtttccttagtcaatcatctcaaatcctgtatacggaaccagtgctttcggaatgcggataccttccggtgtctggttgttttccaatagcgctgctacgatacgcggcaatgccaatgcagaaccgttcagtgtgtggcaaagctctgttttcttttccgctgtacggtagcggcatttcaggcggttggcctgataagtgtcgaagttggataccgaacttacttccagccagcgtttctgtgcttcggagtacacctcgaagtcgaagcaaagggcagctgtaaaactcatgtcgccaccacacagacgcaggatgcgatagggcagttccagtttctggagcagtccttccacgtggttcagcatttcctgatgagactctttggaatgttccggcttgtcgatgcgcaccaattctactttggagaattcgtgcagacggttcaagccgcgcacgtctttaccgtatgagcctgcttcgcgacggaaacattgcgtataagcgcagtttttgataggaagctgtttctcgtcgagaattacatcgcgatagatattcgttacgggaacttcggcagtcggaatcagatataaatcgtccacttcgcaatggtacatctgaccctctttgtcgggtagctggccggtaccgtaaccggaagcggcattgaccactgtcggcggcattatttccgtatagcccgatttgcgtgcctcgtccaggaagaagttgatgagcgcacgttggagctgtgcgccttttcctttatatacaggaaagcccgcacccgtgattttaacacccaggtcaaagtctatcagatcgtatttcttggccagttcccagtgtggaagcgcatctttgggaagttcggtttccatgccgcccattttttcaaccacattgtcgtcggcgcctacaccttcgggtacgctgtcgtaaggaacattgggaattgtatagagcaggttctgcaggtcggttgcagcttggtccatttcttcctgcaatgccttgttggcttctttcaattcggctacacggtttttggcagtctctgcctcgtctttcttgccctctttcatcagcattccgatagatttggacagggaattgacttccgacaggttcttatctaagattgtttgggtattgcgtcgtttgttgttggtttccagcacttgctcaatggtttctttggcgtttttgaagtgctttttctccagtccgcggattaccgcgtcggtattgtctgtaatttgtttaatggtaagcatatcttatacttgtttttatgatattccggatttgtgagggcaaagatagtgcaaatcaaaagtattacaaaaaagaaacttgcttatttttgcgcttaaaaagaaagggatgcaatctgtctgattgcatcccttcgctttattttttgtccggaaacttatgcttctgcattttcggcaggaataacagaaacgaatcttctgtcttctctacctactttgaactgtacagttccgtctaccaaggcgaaaagagtgtggtctttacccataccgatgttgttacccggatggaattcagtacctctttgacgaacgatgatgttacctgccttgcaagcttcgccaccaaatatcttaacgcctaatctcttgctctgtgattcgcggccgttcttagaactaccgacaccttttttatgtgccatttcttcttactgttttaatttgattaagctactacttccttaattgttaactctgtgaattgctgacggtgaccgttcagtttgcgatatccttttcttcttttcttgtggaaaacaagaaccttgtcaccttttaccaaaccggaaacaacttcgcaaactatctttgcgccttctacagtaggagcacctacagtgatgttgccgtctttgtctaccaaaagaactttctcgaattctactgttgcaccggcttcagcgttttgcatgtggtgtacaaacagtttcttgccagcttctgctttgaattgctggccgttgatttctacaattgcgtacatttcttatatataatgtataagttagctccgtcgggtggtctctaatcacttagaatacacttaattaaacccggtgcggaataatcgggcacaaaattacctcttttatttggaacggacaaatctttctttctctttttttagacaattaatatttcgtacttaaacaaatgcttctccataagccgggatgctccgggagtgccgttaagcggtggagatgcgaaggcttattcgttccatcgtggagaacattctgttccaccgtggaggaaattttgttccaccatggcagaacaaaactttccccatagcggaacgatttaattgtggcaaggtatttccttaagcattatataaggatgagcaagcaaaagaaagcggcgaatgcagcaaagaagagcagcagaagcgcaatgcgacgtacactgatgttccttggggatgcagcggcgggcaatggttcccgttctaacaattcttccaggctgctcattattttcttgtgcgggtatttcttcagttcttcggcggtggtcatgccgtgcgtgatacctgcaaaatccactccggccttttgtgcggtttctgcatctaccgtactgtcaccgatgtatagtgtttcggccttggtgacatggagttgcctgatggcaagcagcagaccttccggcgatggtttgggcgtttgcacatcttctccgccgatgatgatgtcaagaaagtcttcgggaaaatgctggtccagcaactccttgatgcggtaacggaatttggtggatataattccgatgcgggcgcctgaatctttcaaggctgccagtaccgacttggtttcaaggaaaagcacggtattgacggtcatgtgcgtatctgcctcttttatatattcttttttgaactcagccaactggcgggtatcggttacgccggaaagaatggaaaaagattcttccagcgttttgccgatggtgcgtttgatgtcgttgtcggtcgggtgggtatagccgtggcggttcagtacgttgcggaaacaggtgacgatgccgcgtgaagaatcggcaagcgtgtaatcgaagtcaaagaggtaagttgtatagttcatttgttttttttacgcaaacataaataaaaaacatgagttccgaatgctttatcttgtagaaaactttctttatccgttttggggatgcggacgaaaaaatatgcaaaaagtgtgaaaatatacatgtttttcttatatttgtattcggacatacttatggaaataagtgttatttcatgttgagttgttttaataggcagtttgaatatgttaaccgtatcatattatgaaaatattgagatccatttgtacagtcttgcctgtcctgttgctatcctcttgtatgcagcgggacgctttgaaagtcgcagacgaatgttatgcagactatgtaaatccgtttatcggtacagattttaccgggaatacatatcccggtgcacaggttcccttcggcatggtgcaactcagtcccgacaacgggcttcccggttgggaccgcatttcgggatatttttatcccgacagtacgattgccggtttcagtcacacccatctttcgggtacaggggcgggcgatttgtatgacatttccttcatgccggtaactcttccttataaggaggctgaagaaccgttgggcatccattcccggttctcgcatgccgatgagtccgcaagcgcaggttactatcgcgtgctcctgaaagattacgatatcaacgtagagcttaccgcaaccgagcgttgcggcattcagcgctatacctttccccaggctgatgcagccgttatcctgaatttgaggaaagccatgaactgggactttacgaaagattcttatgtagagaaagtggattccgttactattcagggctatcgtttttctgacggatgggcgcgcggtcagcgcatctttttccgtacacgcttttcccgcccctttgagacgatgcggctggattcggcagcagtcctgaaagatggaaaaagaatcgggacttcggtcatggcacgttttgactttaagacaacaaagggagaacagctccttgtgagcacggccatttcgggggtaagcatggaaggggcagcacgtaatctggcggcggaagtacctgatgatgatttcgataaataccttgctgccgcacgcaaaaactggaacaggcatttgtcacggatagaaatcgagtgcggcaatcgtgatgaaaaggtgaagttttacacggccctttaccactcgatgctggctcctaccatctatgccgatgtggacggttcttattacgggcccgacaggcaggtacataaagccgacggatggacgaattacagcactttctccttatgggatacgtaccgtgcctctcatccgctttatacttatatagagccggcgcgtgtgaacgacatggtgaaatccttccttgccttttatgagcagaacggtcgcctgccggtatggaatttttatggcagcgaaacggatatgatgataggctatcactccgtaccggtcattgtggatgcctgtctgaaaggtataggggattttgatgctaagaaggctttggaggcttgcgtggctacagccaatatggatgattatcggggcatcggcctttataagaagcatggatatgtgccttacaacgtgacggatagctataatgcagagaactggtcgctctccaaaaccctggagtatgcttacgatgattactgtatagcccgcttggccgagaagctgggtgagcggcaggtagcggatgaattctacaaacgttcgcagaattataagaatgtatataatccgcagacatctttcatgcagccgcgtgatgacaagggagcttttatagacggtttctcgccggatgattatacgccgcatatttgcgaaagcaacggttggcagtatttctggtcggtgcagcaggatattgacggactgatagtcctgaccggcgggaaggagcgctttgcgcagaagcttgacagtatgttcacgtaccgccctgccgatgatgaggagcttcctattttcagtaccggtatgatagggcagtatgcgcatggcaatgaaccgagccatcatgttatttatctgttcaacaaagtggggcaaccctggaaaacccagaagtatgcgtcggaggtgatgcgtgagctgtataagaatacgcccgccggcttgtgcggtaatgaggattgcgggcagatgtctgcctggtatgtattcagcgccatgggattctatcctgtaaatccggttggcggtgagtatgaaataggtacgccgctgtatccggaggtaaggatgcggttgtccaatggcaaaacctttacggttcttgctcatggggtgagcgggaagaataggtatatccggtcggtgaagctcgacggaaagccttatgacaaaagttatattacgcatgagcagataatgaacggaagtattctggagttcgaaatgggaagtgaacccggaaaagcgtggtattgagcttaccttgaaataatatatggaagatgagtttgacatagtgtacaggcaacttttccggaaatactatgcgaatctgctgttttatgcagcgcgcatggtaggggaggaagatgccgaggatgtggtgcaggaagtgtttgtggagctctggcacagaaaagacagtgtgacagtgggcgagcagatacaagcttttctgtaccgggcggtttatacccgtgcactgaatgtgttgaaacatcgcgacatcaagaacagctatgaagcagccatgcaggaagtgtacaataaacgcgccctgttttaccagccggatgataacgatgtgctgaaacggatagaagaccgggaattaaggaagcatatcatcagcgctatcgacgaattgccggaaaaatgcaagctggtatttaagctcagctacttgcacaatatgaagaataaggatattgccgaagccatggatgtatcgctccgtacggtagaggctcatatgtataaggcattgagatttttgcgtagccggctggaaggttatatccggaacaaatagctgtaaggttttgattgtaagataaatattttttgtagaaaaaaaagtgtttgctcgcgtaagtgttttccataggtgtggttgttatattatcgtagtgaaaaaatctaatataaagtaattagtttaatcttaaaagagacaagtatgaaaaacaagtatttgtgcaattttcagaaactgcttcgtgcatttcttatttttgccatgtttgcaacctcttctcagattgcggcagctcaactgaatgttgctttgtcaaatgcccgtttagggactatgataaagcagatcaaggcgcagtccaagtaccaatttttttatgatgacaatctggcttccattcctgtacatgcagtgaatttgaagaatgcttcgttggaaaccgttttggacaaggcgctcgagggaaagggtgtcagctatcgcattgaagacggcgtggtgtatctttctaaaaaagaaacgcggacggcagttgcccaggtagcccagcaggcaactcacaaggtaacgggaaccgttacggatactacgggcgaaccgttgattggcgtaagtattcaggaagtggggacttccaacggtgcgattacggatattgacggtaattatacgctgaatgtttcggctccgtcggccaaattacgtttctcttacattggctatgaagcggtagacattgatgtaaacggacaagccgccattaatgtaacgatgaaagacgactcgcagttattgcaggaggttgtggttactgccctcggtatcaagcgcgagaagaagatgctgggttatgcggttcaggaactgaagagcgatgaactgaataaaaccggcgacccgtcggtaaccagcgcactgcaaggtaaggtggcaggtcttcaaatgaacacctcggctaccggcttgggcggttctaccaaaatcaccatccgcggtaactcttccttgagcgacaacaaccagccgttgtggattgtagacggtgtgccgttcagcgataacaataacagcgatgcttccttctatggtggtgtagaccgtggtggcgcagcactcgacattaatccggatgacattgaaagtatttccgtgttgaaaggacctaatgcggcagctctttacggatcgcgtgccggtaacggtgttatccttgttacaaccaagaaaggttccaagaaaaccggtttcggtgtgcgttataacggtaatttcacctggagcagtgtagcggaaacgctggaacagcaaacccgttacggacaaggacaaatcggtgcgaatggcggtgctgaatatactacatcggcatcgggcagctggggacctgttcttgacggcagccagcaaaaggcttggaacggtgagacatacgcttactccaagtatggcaataaactggaggattatttcgataccggtttctctcaaaatcataacgtatctgtgagcaacggtacggaaacttctcattatcgtgcttctgtcggtatttcggacagcaagggcgtattccccaatgaaaaactgaatcgtgtgaatatcgaccttaatgccggtacggaactgaataagtggatgtctatggacggtaaaatctctttgagccgcacgaaggcaacagaccgtccggagtatggtaactacggtgcaatcaatcagttgatgggtattcctcataatgtccgtctggacgatttgaaacaatattctacggagaaccgtgtacacagcaactggtatggtcctacagccggcatccgtaatccttattatgtactgaaccaacgtcacaacagcgacgagcgctggcgtgccttcggttattatggagctaaaatcaactttaccgattggttgcatctttcagccaaatatgcgttcgactactatcgtacccgtgtggagaataccaatggcggtgacggtatcagcggagaatctttccccagccagattaaggatgacaagatggatcgcggtgaagagaacttctttgaaagcaatgccgaatttgtattgatgggcgatcgccagttgactgataacttccgtctgggctttactgccggcgccaacttcatgtatcagaaattcgagaaccttactgccggtgtgggtaatatgcacactaaaggattgtggatgttcaatgcttccaatctgcttcgtaccgctgctaatgtggaacgtgaacgtgccatgaattccgtattcggttcggtacagatgtcatggaaggaatatctgtcactcgatattacggcccgtaacgactggtcgtctactttgccaaaggcacataactcgttcttctatcccagcgccaacttgagttttgttatctccgactttatgaagagcatcgacaagccgttgccgtcgtgggttacctttgccaagttgcgtctttctgctgctcaggtgggtaaggatacggaaccctatcagttgataaatacctatggttataagttcgacaacggtattctggttccggataagagcaatgtgaagatgaatgacaatctgaaaccggaaatcgctacctcttacgaggctggtcttgatatgaaattctttaataaccgtttgggttttgacttcacttactattatagcaagactaagaaccagattatgaaagtgcccgcagcggctccctggagtggcggacaatgggtaaatgccggtttgattaccaatcagggtgtggagttgatgctttattctacaattgtggataccaaagactttacgttcgatttgaatgtgaatattgctcataacgtatctaaggtgaaagaattggcaccggatgctaatgtgaactacctgttctttaacggtgacagtaacttccccgttaacgtaggtgcacgtgccggagaaaaactgggtgaaatctatgctcagaaactgtacaaacgcgatgacagcggtaatatcattatcggtgagaacggtttgccccagacaatcaacgatgagaaagaacgcgtaaacaatcctatcggcaatattcagcctgatttgactatgtccgtatcgcctacctttacttataagggaattaccttgtcggcaatgttcgatatgaaattcggtggcgacatcctttcttattccgagatggtggcagccggtaacggtttggcaaagcgtaccgagaatcgcggtgagaaggataattatatgatggtgttccccggtgtaaccgaaagcggacaacccaatactaccaagattacggcaagccagtattacggtgcgttgctggcggaagatttcttgtacgatgcttcattcatcaaattgaaagagttgtcaatcggttacaatttcccgactaaactgttgaaaaagaatccgattcagtcgctcagcgtatcattcgtggcacgtaatctttgttacctgctgaaacatacaccgggtacaagtccggagggtggttatgatacaaccatgttctcacaggccatcgactatgcggcgctgccttatacccgtacattcggtctgtctgtcagcttaggtttttaaacttgataatgcagtaggaaacttaaaaactcaaatattagaattatatgaaacttaatttatataaatccgttgctctctgctcattgctggcattggccggatgccatgattttgaagaaatgaataccaatccgaacgcacctgtctatgacccgtcggttatggattgcggtccggagggtattgatatcgattataccatttcggagagcgctttggaaagtctgaaggcaacagaaagtgcgttaggctctattttcttcaactttacttatgaaggtctgtataacgattaccagactgctaccaatctgacgcatgatgtctatgcggcatataatggctcgaacggtttcttgaacaattcaccggcgtatgcttataatgacggttggtctgctgcccgttggaagcatttttatgacgaccgtacgattgccgagtacagccagcttatcaagactttctggttctgcaacaaggagtattatcacaatgcgttctatataacccgtatctattacgctttcctgctttcggcacaaaccgatacgtatggtgatattcctatccagtattatgtgaaaggtgcaatgccgcctacggaaaatgttacttatactccgcagaaagaagtgtatgacattatctttaaattgctcgaccaagccattacgggattgcataatccgcctgctgtagatcaatactctttcagtgctgaggacgaccgcatctatggaggtaaggtagagccgtggattcgtttcgccaataccttgcgcttacgtctggctttacgtgtaagcaatgttgctccggaagttgctcgggagcaaggagaaaaagctttgtcagatccttcgggtttgatgaaaggccaggaagataatatgaaactgattcctaaacgtcagtggataaccggtggcaatgagaatatctttgcattgatgttcagctggggtgcaagttgcgttttaccgaaagagatggagtgggcttataaaaatcaggctcttaaagagggtgtagatgccaatgccagtggctttgttgaaaaggttgcccgaaatgcagatgaggaaggtactatctttggattggacgctaccaagtataatgaaaaagaagcgaattgctatttggatccccgttgcaagatactgttcttccgtccttcaccctatgatccgggaatcaaggatgattataaagcagaggaccccaatgctgaatacggcggatacagaaatggggcaaaagaagtcggttctaagtacacagtgaagtattcacctatgaagactaatctgaagagcgatgaaatgcttcccgattgttggtggaatcaggctcgtgaaattgtttggctcggttactctgaatctcttttcctgagagctgaggctgcattgcgtggttggggcaatgaaacaggaactgcggttgccggaagattgtatgaagatggtgtacgtgcttctatggactattatggtattgcttcagataaagcagaggaatatatcgaccatttggaaggtaaaaaggctttcaaagaaggtggttcaagagaagaacaactggaacaaatcattacacaaaaatggctggctgtctatcctaacggtaacgaaggttgggctgaggttcgccgcacagattatccccgttatttgttgctgccgcgttatggcaacaactcaagcggtgaggtggagaataccaaactgattaagcgtgtaagctatccgaacagtgaatccagaaatccgaacaagcctgcttatacgcaaggtactaaagtatggtgggatgtggcagatacgatggatgaaaccggtaagtggaaaacaccggataacttcagataatccgttttaagttatgataggaaaacggtgcattgccgttttcctatatggaaaactaacctaagtatgattgcggatatctctcttaggttagtttttgtttttaatctaaatgaataataatatatgagatatatgaaaataggaacgcttatatcggcaggtgttttaatgctgtcatcaatgatattgaattccggttgctccgaagcgggtaatggcagaaaacagactacggaaaatcccggagcgattttcggggaagtgaagtctgccgccggtgcaaaaatgttgactcccattgcgctcagaggagataaaaaagctacgggacatttgttttttgaattgagtgaaccggcagaacaggaggttgccgttactttcaaactggattccaggatattggatgcttataaccagttgaatggtacggggtatacgatgtatccggcagacaaactgttgctggaaaacaatggcaacgtggttgttgaagccggtaaaagtaagtctgccacacttgcactggatatactgccgggtggaacggaaggggctacctatgctgtggctgtatcggcggtagctactgcgggaacggaaaaacatacggacaacaaggcctttatttatttggtaaaaccgcttgcagtcatgccggaagtcaatgcgggacgcaaggtaaagaatttatgttatgtggaagtcaatcgtgaaagtatgttgaatgcgggtgagtacacgatgaagagcgataaggctcctttctttgacatagccagtgtatttgcagccaatatccgtttgagcgcggatgatgttccttatgtttcgtgtaacgagcaaaccagatttgtacttgataatatcgagcagactgtacgcccgttgcaggcaaaaggcataagagttcatctctccatcttgggagaccacactgctgccggtatgcgtagtctttcgaaagatgccgcccgcgcctttgcaaaggatttgaaagcgtatattgatatttatggatttgacggcatagactttgatgatgagtattccacctatgccaccgaccaggctgtggagccctatattccttcggatgcagtagctccaagtattgaagaatgtacttcgcagcgttatgccgatttggtgtatgaaagccgtaagttaatgccggacaagacaataggaatttactggtatgcgggatacgactatccggtcggtacggtagaaggaaaaacagtggatgaattgatcgactattccatttacggatattacggtaagtggaaggctattcctgccgatacggtaagcatagccaaacaatgcccgtatgctattgaagtcaccacagccagaggagatgtaaagatagatgatgactgcttgaaaaacatccgtcagaacggttggggctattttgctgtttacgatttgaacaatgaacgttcgtatgaaaaagaattcagccgtatatcccgattgttgtacgacgatgaagtagagtggagcggaaagcagtatgaacgtaccgggtggtaaccgaaaggttgccactccgatgtgcaaataggcattttctctttaattatcggtcggattagtaagtgtttttaaagataggattgttctaatattgtaacatgaacaggaaaatgggcaaattggatgaaaaaataatagtaaagtttttagcgggtgaatgttcggaagaggaacttcgctcgttgaatgtctggttggaggagtcggaagagaatgctcatgaattatttacattagaggaactgtaccatttgggaaaatccgatgcggcttctgaggaagcactccttgcgaaggctgaaaaacaattgtcgcaaaggctcggagaggagcggaagcataagttgaagcgtacactgtttcaccggtggatgcaatatgcagctattgcagtcggtgctttttttataggaggtatgggctactggttctatcaggcgggtagccgtagttccgaatctttggtcactgttacggccaatgaaaccataaaggagctgatgcttccggatggaaccaaagtatggttgaataaaaacacgattttgcaatatccccgtaattttgaaggtggcgagagacatgtgtatctgaatggagaaggtttctttgatgtgaagagaaatacagccaagccttttatcgtacaaagccatgccatgcaagtgagggtattgggaacaacctttaatttgaagtccggggaaaacggacaaagggcggtagccaccttattgaaaggtgaggtagaagtaaagggcaatcatggtgaaggcatgatagtgctttcgccggggcaacaggccgaattggacggaatgaccagacgactaacggtgaaacctgcagaaccgggtatagagggctggcatgatacggcattcgatttaaatcagacggacatacgcacgctttgcaagattttggagagagcctataacgtgaaaatcattatagcaccggatgtggacattgaaagaacatattccggaccgttgaagaagaaagaaaacgtagctgccacattggatttgataaagaattccatcggtatcaaatacaaggtaataggcgaaaacgtttttatatcttcttccaaatccaaatagaacaggcttgttttgtttattgataatctgaaattcaaatattatgaaaaaacttttattggcatttgcctttttatgctgttttacgagcataaaggctaaggattgggtacagtatgtaaatcctttggtgggcactcagtccacattcgagctttctaccggaaacacctatcccgccattgcgcgtccgtggggaatgaatttttggacaccgcaaaccggaaaaatgggggatggctggcaatatgtctatacggccaataaaatccgaggcttcaagcagacgcaccagcccagtccatggataaacgattacgggcaattctccattatgcctgttaccgggcaacctgttttcgatgaggacaaacgtgcaagctggttctcgcataaaggtgagattgcgttgccgcattattataaggtatatctggcggagcacgatgtggtgacggagtttactcctaccgaacgtgccgtgctgttccgtttcacatttccggaaaatgaacattcttatgtcgtggtagatgctttcgaccgcggttcctatatcaggattgtaccggaaaagaaccggatcatcggatattccacccgtaacagcggcggtgtaccgcagaatttcagaaactactttattgtagagttcgacaaaccttttacatataccgcttctgttaaagacagtgtaattcaggaatcgcagaaagagcagcaagctgcccatgcaggtgcgattatcggatttaagacgaagaaaggcgagattgtgcatgcacgtgttgcttcttcttttgtcagctacgaacaggctgagcggaacttgctcgaattgggtgcggacagttttgacacgctggtgcagaaaggacgtgatgcttggaacaatgtgttgggcaagattgaagtggagggcggaaacctcgaccaataccgcactttctattcctgcctgtaccgctcgctgcttttcccccgtgctttttacgagttggacaagcagggtgctcccattcactacagcccctataatggggaagtgcttcccggctatatgtacaccgatacgggtttctgggatacattccgttgtctgtttcctttccttaatctgatgtatccgtcggtaaacagggaaattcaggagggacttgtcaatgcttacaaggaaagtggtttctttcccgaatgggcgagtccgggacaccgtggctgcatgatcggcaataattcggcttccgttttggtcgatgcctatttgaagggtgttaaggtagaagatgtaaagactatgtatgaagggctgctttacgggacggagcatgtacatccggaaatatcatctaccggacgtttgggctatgaatattacaacaagttgggatatgttccttatgatgtgaagattaacgagaatgctgcccgtacgctggaatatgcttatgacgactggtgcatctataagcttgccaaagctttgaaccgtccgaaaaaggagcaggagttgtttgcaaagcgtgccatgaactatcgtaatatttttgataaggaaagtctgttgatgcgcgggcgtaataaagacggtaagttccagacaccgttctcaccgttgaagtggggggatgcctttaccgaaggaaacagttggcactactcctggtcggtattccacgacccgcaaggattggtcgatctgatggggggcgaaaaggtatttgccaatatgctcgattccgtattcattgttccgcctgtattcgatgatagctactacggacaagtcatccatgaaatacgcgaaatgactgtaatgaatatgggcaattacgcacatggcaaccagcctatacagcacatgatttatctctataactatatcggacaaccctggaaagcgcaatattggctgcgtcaggtgatgaaccgcatgtacacacccggtccggacggttattgcggggatgaagacaatgggcagacttcggcatggtatgtattctccgcattgggtttctatccggtttgtccgggtacggacgaatatgtattgggcgctcccttgttcaagaaagccgttctgcattttgaaaacggaaactcgctgacgatcgatgccggaaacaacagtgcgcagaatgtctatatacagtctcttcaggtcgacggaaatgaatataccaaaaactacctgcgtcacggagacttgctgaaaggcggtacgctgaaattcgaaatgggcgataagcccaacctgcagcgaggtgtccgtgcggaagattatccgtattcgttttctaaggaaaagcgtaggtagctgcatgttttttgtaccattacacagtaaaaaattaccggaaaaacatgaaaacaatattatggactgtcagtctgctgcttgtaatatgcggatgtactcccaaaccgacagaagtcgtttcgcctgatggtcatatccgccttcagtttgcattggatgaccacaaccgcatgacctatcggatagatgtggatgatacggcttttgtaaccccttctgctttgggattccttgccggaaagggtgtgaatctttcggaaggtatgaaggttgtcggtacggagttttccgctgcggacgagacatggacacaaccttggggagagaataagagtatccgtaaccattataatgaaatggcggtttgtctgtctgatgaggcggatacgaaactgacccttcgttttcgggtatttgacgacggagtcggtttccggtacgagtatgaagttgccggagtagacagcatctttgttacggacgaacttacctctttcaatatggcgcaggatggaatttcctggtctattcctgccaactacgaaacatatgagttgttatatcgtacacagccgctcagcaagactgataacgcaaacactccgatgacctttaaggtaggtaagacttacgccagtattcacgaagccgcattgacggactttcctgaaatgactttgcaaaataccggcggctgcggattcaaatccgagttggctccatggcccgacggcattaaggctaagatagaaggcggcagtttcaatacgccctggcgtactgtacagatagcttcgaaagctgtgggactgataaattcagcacttatcctgaacttaaacgaaccctgcgttttggagtctaccgactggattcgcccgatgaagtatgtaggtatatggtggggcatgcatctgggtgtggagagctgggtgataaacgaccgccacggcgccactaccgaaaatgcaaaacgttatattgattttgccgcagccaacaacatcgaagccgttatgttcgaaggctggaatgaaggttgggagaactggggcggaacgcagaacttcgattataccaaaccgtatgccgatttcgatataaaggaaatagcagcttatgcccggaagaagggtgttgagattatcggtcatcatgaaacgggaggaaatatctgtaattacgaaaatcagttggataaggcttatgaatggtatgccgatttgggtatccatagcgtaaagaccgggtatgccggtggtcttcccaacggtcacaaccaccacggacagttcaatgtgcggcattatcgcaatgtcgtgaaaacggctgccaagtatcgtactaccctcgatgtgcatgagccgataaaggataccggtatacgtcgtacctatcccaacatgatgacccgcgaaggcgcccgcggcatggagtggaatgcctggagcgaaggtaatccgccggaacatcatgtgatgttgccgtttacccgtttgctgggtggtccgatggactatacgccgggtatctttgatgtgctgtacaagcgtgccaaaaacaatcccgaccggaaaaagtggaatatgaaagacagtaaggattgccgtatcaataccacgcttgccaagcagatagccaattgggtgatactttactctcctttgcagatggctgccgacatgattgaaaactatgaaggccatcccgctttccgtttcttccgtgattttgatgcagactgtgactggtcggaggcgcttgccggcgaaccgggtgaatacgtggcaatagtacgtaaggcaaaagataaatattttctgggggcggcaaccgatgaagaggcgcgcagcatagatgtgaaactggattttctggaaaaaggaaaaacttatgccgccgttatctatgccgacggaaaagatgccgattgggagaccaatccggaatcttacgaaatcatagagaaacaggtgacgtccgatgataccctgaccattgtcatggcaaaaggtgggggacaggctgtcagctttatgccgatttgataatcctaatataataccaaagaatatgaaaacaaacttgaaatctaattccatattgctgggcggactcctgttgctgggtactgtctttagctgtacgcaggcagagcaggactatgcctcttatgtaaatccctttatcgggacaggcggacatggacatacatatccgggtgcggttgttccgaacgggatgattcaacccagtcccgatacacgcatctacgaatgggacgcttgttccggatactattacgaggatactaccatcaacggtttctcgcatacccatgttagcggaacaggatgtgcggactacggtgatgtactgctgatgcctactgtagggaaacaggagtatcatccgatgggggcgaagagtcagcaaatggcgtactgttcggctttctcgcacgataatgaagtggcgcaacccggatattattccgtcttgctggaacgctataacgtaaaggcggaactcactgcgacaaagcgtgccgccattcaccgttatacctttccggaagccgaagatgccggtttcattctggactttgattacagtatcgagcgtcagacaaatgaggaaatgaaaatagaagtaatcagtgataccgaaatccgcggacataaaaaaacggtatattgggcattcgaccagtatatcaacttctatgccaagttttccaagccgtttacctatacattggtgacggattctgtggcattggaagaaggcggtccgcttttgcccaccgctaaagttctgttgcagttccctacggcacagaatgaagaggtattggtgaaagtaggtgtttcggctgtcgatatggacggagcgcgtaagaatgtggaggccgaaatacccggatgggattttgacggagtgcggagtgcagcacgtcaggcatggaatgactatctgtccaaaatagatatccgtacgcagaatgccgaccagcgcacgatgttttatacagccctttatcacaccggtttgcagcccaatctctttacggatgcagacggacgttatttcggtatggatttgaaaccgcatcagggcagtgtggacgaacctgtgtacacgatattctccttgtgggatactttccgtgcttatcatcctttgatgacaattatagatcctgaactgaatgaagcctttatccgctctttgatccagaaagagaaagaaggcggtgtattcccgatgtgggagcttgccggaaactatacgggaacgatgattggctaccatgcagcttctctgattgccgactcttacgccaaaggatatcgtaattttgatgtgaaggaagcctaccgtgcctgtctccgcacggcggaatacgatacgacgggcattattactcacccccgtgtattgccgcatttgatgccgcaggccaaatactggaagaataaaataggctatgttccctgcgacaaagacaatgaatcggtagccaaggcgttggaatatgcttatgacgactggtgcatctcacagttggctgaagcaatgggcgatgaaccgaaccggactaagtacgcagcttttgcagagggctataaggtatatttcgatccgtctacccgtttcatgcgcgggctcgacagcgagggcaattggcgtacgtctttcaatcctcgtgcttccactcaccgcaacgatgattattgtgaaggcactgcctggcaatggacttggttcgtaccgcacgatgtagatggtctggtggaactcatgggtggccgtgacgcattcatcggtaagctcgattctctgttcgtggcagattcttccttagagggcgagtcagtatcggtagatatttccggactgataggacagtatgcacacggtaacgagccgagccaccatattgctcacctttataactatgtgggacagccgtacaagacacaggcgttggtggacagtgtgctgcatacgctttacttcaacgagcccaatggcctttccggcaatgaagactgcggacagatgtcggcatggtacgtgctgaatgctatgggattctaccaggtttgccctggaaaaccggtgtattccatcgggcgtccgctgtttgatgaggccgccatccgtttgcagaatggcaacacctttaccattatagcccataataacagtcgtgataataagtatgtccggaagattatcctgaacggggaagaacttgccgctcctttcttcaaccatcaagacatcgtaaacggcggtacgctggagctgactatgggagcggaaccgctgatgccggataatgagttacggaaatagaaagtaccgatagcaacgaaacatatatgagccggaattatcataatccgatatcttggattccaaccgtttatttcgccatggggcttccctttgtagtgctgaacatggtttccgtacttatgttcaaggggctgggagtgggtgatgcccaaatagctttgtggacctcactgataatgcttccctggacgttgaagtttctttggagtccttttctcgagatgttcaagacgaagaaattcttcgtggtactgacgcagttggttacgggagcggggttcgcactggtcgcctttgcactgaatcttccgttcttttttgctctttccatttttttgttggcggttatcgctttcagcggcgctacgcacgatgtggcaacggacggcgtgtacatgtccgagctgaataagcaggaacaggcaaagtacatcggctggcagggagctttctataacatcgccaagattgtggcgtccggcggtttggtatggctggctgggtggctgctgaaatacttcggcggagtgcccggtgctacggatgcagtgcgtcatgaggcaactgtccaggcttggatgtgtgtaatgctggtaatggctgccgtgatgatattgctggcaatataccattggcgtatgctgccttcgggcggtgctgcggctgccgaaaccaagtcggcgggcgaaacgctggagaagttgcggagcgtaatctgggatttttttcagaaacgtcatatagggtattatattgcctttatcattctctatcgccttgccgagggtttcgtcatgaagattgttccccttttcttgaaggcggaacgttcggcaggcggcttgggactgaatgagcaggagatagggttgtattacggcacttacggagctgccgcctttgtgctgggctctttgctggccggttattacatatcgcaccgcggactgcggaaaacgctgttctccctgtgctgcatctttaacctgccttttgtggcatataccctgctggcgatatatcagccggagagcggcatgctgattggcagtgccatcgtgctggagtatttcggttacggcttcggctttgtggggctttcgctgtttatgatgcaacaggtagctccgggcaagcaccagatggcgcactatgccttcgcttccggtatcatgaatctgggtgtgatgcttccgggaacaatcagcggatacgtgagcgattttctggggtatgagaatttcttcatcttcaccctgttcgccactattccggcattcctcattacctggttcgtaccgtttacgtatgccgatgaggtaaaaggcggagcggccacatagtcggtggaaaaacattggcgggacgtgttccggatagtggtttcgattgatgccggcttcccgtacattcccggtttctatgacagattatataagtaattatagatagatttaatttcgtgttattacatagaaaatgaaatgagtatgagtaacaaagttattattccttgggaagaacgtccggcaggatgcaaggacgtattatggcgcagtgtggcaaaccccattattccgcgtgatttacttcccacttccaacagtattttcaacagtgcggtagtacctttcggcgacgggtttgcaggagtattccgttgcgacgatactaaccgtcgcatgcggctgcacgtagggttcagtaaagatgccataaactggaacattaaggaagagccgttgaagttccaatgcgatgatgaggaaatcggtacatgggtgtatggctacgacccgcgcgtgtgctttatcgaagaccgctattatgttacctggtgcaacggctatcacggtcctactatcggtgtggcctatacgttcgatttcgagacgttccaccagttggaaaacgcttttattcctttcaaccgtaacggagtacttttcccgcgcaagataaacggtcgttttgccatgttgagccgtccgagcgacaatgggcatactccctttggagatattttctacagtgagtcgcccgatatggagttttggggacgccaccgccacgtgatgtcacctgccgcttttgaagtaagtgcatggcaatgcaccaaaatcggtgcaggtcctatccctgtcgagactcccgagggctggctgctgatttatcacggtgtgctgcattcctgcaacggttatgtttacagtttcggctctgctctgctcgatttggacgaaccgtggaaggtaaagttccgctcagggccttatctgcttgctccgcgcgaaccgtacgaatgtatgggcgatgttcctaatgtatgtttcccgtgcgccgctttgcacgacaatgaaacgggcaggattgccatatactatggctgtgccgataccgtaaccggactggcattcggctatattcccgaaattatagaatttaccaaacgtacaagcatcatctgatgtacataaacttttgagaaccatgaaacgagcattcctttccggcgtatttgcctttgttctgctggctgtgtctccggctgcggagaaaagtttttctcctgtagactatgtgaatccctttatcggtacgactaacttcggcacaaccaatccgggagctgtctgccccaacgggatgatgtctgttgttcctttcaacgtgatggggtcggcggacaacaaatacgataaggatgcccgttggtggtccactccctatgagtatcacaactgcttctttaccgggtattcgcatgtcaatctcagtggagtgggatgtcccgaacttggttcgttgctgctgatgcccactacgggcgagctttccgtagactacaaggagtatggcagccgttatgaagacgaacaggcctctccggggtattacactaatttccttacccgttataatgtaaagaccgaagtgactgccacgccgcgcaccggtgtggcgcgcttcacttttccaaaaggccggagtcatattctgctgaacttgggagagggactgaccaatgaaaccggagctttcctgcggcaaaccggagagtgtgaatttgaggggatgaagttgctcggtactttctgctataatccgcaggcagtatttcctatttacttcgtgatgcgtgtcaacaaaactcccctcaaaaccggttattggaaaaaacagcgctccatgacaggcgtggaggccgaatgggatccggacaatggcaagtataaattgtataccggttatcgcaaggaactggcgggcgatgatatcggcgcttttctgacattcgataccggggagagcgagcagatagaagtgcagatgggtgtttctttcgtcagtatcgagaatgcccgtctcaatctggacaaagagcagtccggcaaggacttcgacaaggtattggcggaaagccgtaaacgctggcacgacgatttgtcgcgtatcattgtggaaggcgggacggacgagcagaagattgttttctatacggcgctttatcatgcgctgatacatcccaaccttttgcaggacgtcaacgggcaatatccggcaatggaaagcaaccggattcttacggcaaagggcgaccggtataccgtattctccctttgggatacttaccgtaatgtgcatcagcttcttacgctggtgtatcccgaacggcaactgcaaatggtgcgttccatgctcgacatgtaccgtgagcatggctggttgcccaagtgggaactctatggacgcgagacattgacgatggagggcgacccttctataccggtcattgtggatacctggctgaaaggtttgcgcagcttcgatgtggagctggcttatgaggcgatgcgtaaaggggctgtattgccgggagcggaaaatctcctgcgaccggataatgacgattatctttcattggggtatgtacctttgcgcgagcagtacgacaactccgtatcgcatgctttggagtactacatagccgataacgccctttcgcgcatggcagaggcgcttgccaaggatgccgaggtgaaaggacagaaggaaaaagcacgccgctacaaggaggatgcccgtcttttctataaccgttctttgggatataagcattattatagcaaggagtacggcacattccgtcctatcttgccgaatggtgagttttatgctccgtttgacccgaggcagggcgaaaactttgaacctaatccgggctttcatgaggggtgtgcatggaactatactttctatgttccccacgatgtaaaggggctggcgcaacttatgggcgggaagaaggctttcgtagacaagttgcaacgtgttttcgatgaggggctttacgaccctgccaatgagccggacatcgcttatgcgcatctgttctcttatttcaagggagaggagtggcgtacccagaaggagttacaccgtcttttgcagaagtattttaagaatgcccccgatggcattcccggcaatgatgataccggaacgatgtctgcatgggccatcttcaatatgatgggcttctatccggattgtccgggcgaaccgtcttacacgctttccacaccggtgttcgacaaagtgaccatccgtcttgataccgaagtgtggggacgtgagcagttggtgatagaaacggagcgtccttcggacgattcgctttatatccgtgaaatggagttaggaggaaagagactgtcacgtttccgaatcagccaccaggagctggtagagggcggaaagttgcggtttgtgttacgttgacgaatcggatgatacgtaaccggatttcacagatttactttattcttcttctgtgaaatccgtgtaatccgtgcctaaaggaaacaaataataagtgaactttcatattggcataccctctttttaatgttggatggagtcttatttcactcttccgccgcagagccaatgctttgtataataatcttccttgaggctgctcacgatgactccttgtccggtactggcatgaacgaatttgccgtctttcaggtagatgcctacatgtgccactttcttgcgtgacgcccggctggtaaagaataccaagtcgccttcgcgcaggttgcggcgggctatcctgttgctttctttcaactggccgtccgtgctgcgcgacaggcgtatgcggtaggttttcttataaagttgggataccaggccggaacagtccgttccatgtttactgtcgccgccggcacggtagggagtgcctatccactcggcggcattgacgtacagcttgtggttgtctgtcagtccgatatccatacccaggcgtacagaggcttgtgccaatgctttatagtcgagacggggagaggcagtatggcaggaacttaaacagaatattaacccggtcaaggcaattatacaggaaaaggagtgtttcatatttattcctctgtaagtgtttcttcttcagtattagtttcagtttcaatgttttcttcgacactgacattgaaataagcttccaattccttttcggccgaattgttttcgttctgtatatcacggataatgactccgtgttccaacagggcgatacgcggacatacatctaccgtatgattgaggttgtggctggaaatgatgacggttgctttgtgttcctcgttatattttttcagcagttgtttaatgatggactgcgaactggggtcgaggaagttgaaaggttcgtcaagtatcagtagttgcggatgatgcagcatggcggagatgatgcctatcttttgcttgtttccggcggagaagttgcgtatgaatttcttttgtcccatgacttcaccgttcatgaaacgttcgaaaggagcgatgcgtccgtctacttcttcttttttaagtccgtacatcttgccgatgaagtagaagtattcttccggcgtgaggtagtctatcaggaaaccgtcgtctatgaaagcgccggtaaagtttttccagtcttcgcttttgcatacgtctatatcattgatggtgacctttccgcggtcggcttgcagcaaatccaatatcagccggaaaagggtggtctttccggctccgttgtttcctaccaagcccagcatatcaccttgattgatgaggtagttgtcgatatttacggcggtcttttcgccgaacttcttttgcaaattacttatctgaatcatagccataaatcttaaattgtaaatcttactgtctgctgtctctaaatccttccatgttcttatagcgccgcttcataaagcggtggtatacattcttcaaccagaagcgggacgtcaatataaaacccgcaccgatggcaatcaatatccaggctgtaactgtgggaccgaaaaaggttgtcagcataaaattcataagcagaggtacgccgaatgctgctccggaaatcagattctgcaatccggttcccatgttctggcggttggtcattttggcgttcaaatccactgtcctgttattgtatacggccaattggaacaggcagaaatatacacagcctgcaacaaatacagcccaaccgatgcagctcagtacagccagtttgccggttgccatagccggtatcatcaggaacagggggatgagtatggcgatgctgtacagaatatatttggcacgcaacagtgtgtagatggactccttgcggctcatcagcccgtcgatgtagttgccttcgtaactcatcaggcttgataaaaaaagaatgccgaaaatcacaaagttgtaaaccaggataaagcttttcataccttgcccgtcgtatgcttcggtaaagctcagaatgcaggtaaatgaaatcactaccaggaatactgtgcgcagggccgttttgcagactttattgcgcaataacattttcagttccagccgcatgtattcgccaatctctccgtagcggtccaggaatttgtattcggatacatgctttaccttggtgtcttctactttattgatttcgttataaatcaattttatcatcagtccgcgattgatgaaccacagcactacgatagctgcaaatactccggtgaaggtgagaagatgtccgaggataaagccttctcctaagtcgacggaccagtcgaatagcggactgttgtccggtacgaacattccggcagcgatactcccgtatgccagtataggcaggattatccaccagacgcgttcgttcatcaatgtccggcatagcaggaaccagtaattgttgagcaccatcaataaccatattccgatactataggtcagtacacccgttatgccgtaaaatctggtgatgctgatgatggcgaacggaacgaagaagaacagccatatcaggttgaagccgttcaatccggaacgtatcagcagggagtcgataagacggttgcgttttaccggtaacagcagatagggctttacctcttgggcaggcgttttctgaaatggaaaacgcatcaggaaatccaggcagaggataaatatgagcccgctgttcaggacatgatatgcttcggttgccccgtcgttgaaagcaaaggcaaaactcgttccgaagaataccagataaccggcccagaatacagccatgaagtacatccagaattttccgaatttattcttctcgtacatcgggtttcgcttggctgccaactttccgtgcttgcgtaattctataaagaggttcataatggatagatggttaatgtatatgaaaaaggctgcgctgcttcacgaacaacgcagccttttgaaaactgtgactttggttgtgagttgaaaaatcagactgctgatagtacggtttgtaaagagctactttacgcctctaaaggtcaactctgcaacgctaaaggtctactttacgactcctgatgcagaccccctatttcttttcggggctgatcattgaaacagtgatttggttcttctgcttcaggagttcgttggcaaatttctggatatcttttgctgtgattccattgacaatctgctcgtaatcctttatcggattgataccggtatagagatattcgtctatgctgttcagccagtaaccgttttctttcagattttcgttatgcttcttcagcatgtactctttcactttgttcaggctggcttcatcgggaccgtttttggcgaaagcttccgcttcggcatagataatcttcatcagcttgtcctgcttgtcgggagctgtattgaagaagatttgcagaacggctctttccgtaggatatttaacaagctgtcccataggatatacaccataagtaccaccttcatcttcacgtactttctccgtatagattaagttcaggagctggtcggtcatactcatgagaatatcgttgcggagcgtgtatgcgcaagtaccgctgtaagagatgaagttattaaccttcggagtctcttgctgacggataaactcgtttttgtagattcctttgcgcatttcgatgtggttgtccttgaatgtttctttgcggttgatagagggtaatgaacccagataagattcaatcagaggtttcacggcttccacatcgacgtttcctactaaaataaaggtaaagtcgctggcgtctttgaaacggtcctgatacatggaaagaatcttgtcataatccatcttgtctaccatgtcggctttcattctcagagttctggggtgcttcatgtaaagagtggacgtgatggagtcgctgaacgaagaattcgggttcaggtccatgttctgcaattcggccttgctgcggtttttataagatgcaaaagcattgtcgtcacgtcttggagctgtgaaagtcagataggtgagctgcatcattgtctcaaagtctttgggtgagcaactgcccgttacggcttctgtcttatcgccgattccgtagtttacggaagcttttttaccggccagcactttttccagttcaatagcgctgaaattgccaagaccgcctaatgctactgcatccaatccgttgatattgatgatttccgagtcggggaagagtgagctaccacccatacttacacctttcatacgaatttcatcggctttgaaatctgtctttttgatgataaccttaactccgttggacagtgtcagcatagtagttccgaagatatcgtctttcttttcagatacgattttaccgcctttcggggcttctttcatcaagggctcgttggaaactttatctacatacggagtaagtttctctgattttaccgctttcagaaggttcttgatagcgtcctctgtggggagctttaagccttctttctcagggccgaacagggctaccacctggttgctgtctgtcaccatttgctgcatcatctggttcagggcggttacgggaatagccggtgctatctggttgatgatggtatattcgttggcaatgcccggaataggttcgttgtcgaggaagtgacggacatattcctttacatagctttcattcttacgcttgtcgcgttcctggaaagccgattccagatggcgcagatattctgcacgggcacggctgtactcggtttcggtaaagccgaattggcgtgcacgctcgatttcgcggagaacggttgagataccgttttcaatggcatcttccttgcagactataattccggtaaaagcatcctttgtcttggctacgaagaagtcatcgtcataggttgcggcatagatataaggcgggttagctgcctggagcaattcgttcagacgtgcattcaacatgttggtaatcagtgttgctgcatagtcttgcatcagataacccacgttgcttttctcctctctgggagttgtttcgtgcttattgaaaataaaggtttgcacataaggctgttccttgtcacgtgcaaccaatatgataggttctttattatcgtttaccgggtagtattcgcgtttggcaccattgggctgggcgggaatatctgcaaacatcttcttaatcagggcttcagtggcatctacgtcaatgtcacctaccaccatgataccttgtaagtcgggacggtaccatttttcatagtagtctcgtaaagtctgaggcttgaagttcattacaacgtccatagttccgatagggaagcagttggcgtattttgttccggcaaacatggcgggaagcattttctcctgaaagcgttgcatggcactcatgcgggtacgccattcttcattgataacgccacgttccttgtctatttctttgggatccagagtaaggtcgttgctccagtcgtgaagaatcagcagacaagagtcgatagcacccggagtattgaccggtacattggaaatgttataaaccgtttcgtctatggacgtgtaggcattcaggttttcaccgaatttcacgccgatacgttccaggtattgtatcagggactttccggggaagtgagtcgttccgttgaaacacatgtgttccaggaagtgggcaagaccgcgctggttatcctcttcttgtatggagcctactttttgggcaatgtagaagtcggcgcggttagccggaagactgtttttacggatgtaataggtcaacccgttgtccagcttaccgatacgtacatcctgatcgataggaataggcggcagttgttgcgcagatacctgttggaagttgcagcatacgattaatgcggcaatccataagttacgtaataaatgtttcatcattatttgattttaaaatgtttttgccttatctgtcgaagtgataaataataaatcacaaaagagtcttgtttttttatttgattgcttcccggatacgtactaatctggttaaaagtccttccagtaaatccagtttcagcatattggcaccgtcacttttggctacggcaggattttcgtgtgtttcgatgaacaaaccgtctgcgcctactgcgatgccagcctttgctatggtttcaatcagttgaggcatgccgcctgtaacgccgctggtttggttgggttgttgcagggagtgggtgacgtccagtatgacggggaagccgaaggtttgcatttccggtattccgcgatagtctactacgaggtcttgatagccgaaggttgtcccgcgttcggtaatcatcacgttcttattgccggcttccaccaccttgtctgcagcgaattgcatggcaagcggagagaggaactgtcctttctttatattgacggtcttgccggtcttggctgcggctaccagcaggtcggtttgtctgcaaaggaaagcagggatttgcagaatatctacatattcggctgccatggcagcttcttcggcggcatggatgtctgttacggtgggtactccgaatgtgtcgtgcactttttttaggattttcagggctttttcatcacctatacccatgaaagagtccagacgcgagcggttggctttacggtacgagcctttgaatacgtaaggaatctgcagtttgtcggtaatagctactacgcgttcggcaatgcgcattgccatgtcttctccttcaataacacaaggacctgccagcagaaagaagtttccggcaggattatttttcagttcaatcatacgtttttttgaattatgagttatggattacgagctatgaaaagttcatatctcagttgggtataatcaatgttatcgcttcgtgcagcacaccgatgtccaatggaaaatgccggtcgaggatacgtccgtccaaatcgacggaagcattttgtgcacgtaatacctttatcttttgggtacggtagggttttaccactttatggtttagaatccgtccttccatcaacatccatattcccgaaaagagttgcaacagttcggggcggtagataaccgatacatccagccagccattgtaaggtactgcactgggtgcctgtccgtatccccatgcactgcctatgcacaccgtcataatgcgcccgcgtatatgctcgccgtttattttaaggtgcatacgatataatttccgctcaaaaatcaaggagatgaatgccataaaataagaaaggaactttaccccccagaagcgcttgcattggtcggtgatttttacaatgcgggctccaagaccgatattgatggcattcaggaaatagcgggtcatgtgtttttggccgtcatagtaataacatgtgccgacatctattttacggcggcggttatttatgatacaatctacggcttccttgtattccgaactcatttcccaatatttggcaaagtcattgccgatgccattggggataatgccgatagcgatgttctctttatcttccgcgttggaaagcattatgccgttgattgcatcgttcagtgcaccgtcacctcctacaacgataatggtgcggtaaccgttgttggcaagtatgcctgccagacgttctacggatccgaacccttcggactgcacataatcgtaagacacgcctttgctgtccatatatgctttaatctctttccaccgtttctgcactttgcgcgttccggctttggggttatagattacgccccatttatcgggttctacactcatatatccgtttctttcaatcggtccaacattttcataaatctgccgcttaagcggtgttgccgtcaaagatactaaatctctttgagttttgactttacaaaagctatcttttcttccatgggccaccgggcgtccatccaatggatagtaaagcctcgtctttccatcccccggaaccaggtcatctggcgtttggcaaattggtggatggctatttccagttggctgaacatttcatcataggtcagcttgcccatgacgtaaagtgtcagatacttgtattccagtccgtagtaaatgaggtcgtcgggacaaatgcctgaatctatcagccggcgtacttcatctaccattccttcgtccagtcgttggcgcaggcgacgggtaattttctcacgccgaagttcccggtctatgtctacgccgatgatgaggctgttcagttgtgggaatgagcgtgcgtctatcggagtatgagcataatattcttcgatttcaatggctcggatggcccgtttcaccgtatccacatccgttgtattgtgcaggctcttataggtttgcaatatttcggtaagctcttccagtgatttatttgccaggcggttgcgcaattccggattctcgggtacaggcagtagtttgtatcccttgagtacggattccaaatacattcccgttccgccgcatacaatgggcaggcagcctttttgtttaatgctttcataggcggttaggaaatcgcgttggtattcaaatacattgtatttatatcccggatcggctatatcaataaggtggtaaggtacttgtcttccgtttacaatgtagtcggccaggtcttttcctgtaccgagatccatgctccggtatatttgccgggagtcggcactgatgatttccgtattgagttctgctgccaacgcggcggcaaatggagttttgccggatgctgtagggcctaatatggcgattaaatcatagtcaggcatatactaagtatttgtaattcgtttacaaagataatgcaatttgcgggtagataaaaagaaccggttcattttattctgtgaggatataatttctctttacatttaaagcgtgtatctgaaaaaggaagtaaaaaaaacgtccttcttcttaaaaggtgttataaaacatatcttttcctttggataatttgcagatttagcaaatgtccgtatctttgcaatgtgtttttcatagtattagatttaaggttaacaaaggttggagtacagcggtactccttttttttgctctatactttccttttcttgctgcatatttttataggactattacggtaatataaaatctatctttattctttaatatattgatatatagaagattaattgagtgtatgttacatgtatgataaagaatgtaacatataaaaaaaatatgtaatgtcatcaaaaaaacatgttatacgattttcagaatcacatgtgtgtcttttgtacatttgttgcggaaaagccggaaatataaaactactcatattaaatatgcaaatatgaagaactctttatctttcgtgtgccttaaaaatattaataactataaaatcgagtattgatgaataaaagatctttttttgcaattttatcggccttattagtctctgccggtatattgggaagtttttcttcttgcaatttgtccaaagcaaatggaaatttacctgctgtaaaggattctacagccctttttgattattttacttataaaggtgatgatgatttttacaaggaaaatccactgcctgatgatgagtcgttttataatcctattttgcctggttggtattcagatcctagtatatgtacaaatggagaaggagactatttcttagtgacttctacttttacttattttccaggtgtacctatctttcatagtagggatttagtaaattggaaacaggtaggacatgttcttagccgtccttcccaattggttaatatgaaaggacagcatgtgagtgggggaatttttgcaccggctatttcatataatcctcacaataagacttattatatggtaaccactaatgtgggagcgggtaatttctttgtgaaaactcaggatccttttggagaatggtctgatcctattatgttgcctgaagtgggcggtatagatccgtctttcttctttgacgaagacggaaaagcttatattgtaaataatgatgatgctccggattataaaccagagtatagcgggcatcgtacaattcgcatacaagagtttgatgtaaagtcagataaaacgattggacctcgcaaaattctggtaaacaaaggtgtgcatccggaagaaaaacctatctggatagaaggtccccatatgtataagattaatgggaaatatttcctcatggatgcggaaggtggtacgagtacctggcattctgaagttattttccgcagtgattctccgatgggaacttttacgccttggacgaaaaatccaatattaacacaacgccatcttagtgctgaacgtcctaatccgattacttgtgccggtcatgctgatttgatacaaaccaaagaaggcgattggtgggctgtgtttttggcatgccgtcctataaataataagtttgaaaatttagggcgtgaaacatttttaatgccagtaaggtggagcgaagatggttttccttatatgacgcaagaaaatgaaatagttcctctgattctaaaacgaacaggcgtaaagcgtgatgctagtgtgacatttggtaacttcgaagaatttgaagattttgataacacttctttgggaatgcagtggatgacattgcgtgctcctgctactgaattgtattctttatctgatgctccgggctttttgactttgaagtgtgccgctgtcagtgctactgaaaaggacactcctgcttttgtttgccgtcgtatgcagcatcataaattcgaatctactacccgtatgttgtttaatccttccaatgaaaaggaagaggctggtatgttattgtttaaagatgaaaagcatcaatatttacttgctgtaaataagcaaggagaaaataaatctgtttttctaaaacgaataggtgagtctgaacaagtcttggcttctgatacaatatctgaaaaaacaaaagaaatttatttgaaagtaatatctcaaggtactcattatgatttttattattctttaaaaggagagaaagattggactttgctctgtaaagatgtcgatgcaagctatctttccacagctacagctggtggatttacgggtagtgtgatagggctgtatgctgtttgtaagtgatatttattgttgcatgtaacatgaagaataatttctgttacatgcaacaaatcctatgtaacgtttgtatggatatgtggaacactttcacaattatttttttatatatttaaaatatatttacgcggtgaaatcaatcatgttaactgttagcgtttattaatcttatactaataaaaatgaaatgtatgtatgatgatagctaaggctattaaagaatgactgatgattagagaacaatgtagttaattaacatcttaaactaatggtaatgaaaaatgtagtaaaaaaaaatcaaaagattccttacctctttttactcatgctgttctgttgcctgatggcatcggcacaaagtgggataacggtaaggggaactgtttttgacaataatggtgagacggtcattggtgcctcagtggtattaaaaggtaataattcaataggtacgatttcagatatagatggtaattttatgttgactgtgcccaatgaaaaccctactcttattgtttcatttgtgggaatgaagaccaaagaagtaaaagcgacttcaaaaggtttgatcaaaataactttggaagatgattctcaacagttagaagaggtggtggtagtcgggtatggtcagcaaaagaaagcatcggtagttggtgctataacccaaacgacaggtaaagttttggaacgggcagctggtgtttcagatataggtgctgctttgacaggtaacttgcctggtgttgttactactcaaggtacgggtatgcctggcgaagaagaaccgaagataactattcgtggtgcaagctcatggaataacaatgaagatccattggtattagtggatggtattgagcgtcctatgagttctgtagatattagttctgtacaatctatttctgtattgaaagatgcttcagcgactgcagtctatggtgtaaaaggtgctaatggtgtaattcttgtaacaacgaaacgtggtacggagggtagtgcgaaaatagatgtaggttttaatgctactttgaaatctccttcaaaattgcctaataagtatgactcctatgatgcattgatgttccgtaatacggctattgaacatgagttggctttgcgacctgattcatgggaatatattcgtcctcaatcttttattgaaaactatcgtaatcagactactattgaacagagagaacgttatcctaacgttgattggcaaaaagctttgtttaaagataatacaatgtcttataatgctaatataaatattagtggtggtacgaaatttgtaaaatattttgcttctgccgattatgtgcatgaaggagacctttttagaacttatgataacgggcgtggttataactctggttatggatatgaccgtatcaatgtgcgcagtaatttagattttaatattacaaaaactactgtattaaaagtgaatttggcaggctctaatgccattcgtaaggctccatggagcaatacaggaaattctgaatggcaaattggtcagcaatggtcaggtgcatacaatattgctccagatgtgtttctaccgcaatattctgatggtagttggggtatgtatccacttgtgtccaatacaactaactcagcggaaaatatttctttagggggtacgatgcaggtaacaacaactcgtattaatacagattttacattggaacaagatttaaagtttataaccaaaggactttcagctcgggctactgtttcttgggataatgtttttgttgaaaacaatcgtggtatcaatgatttgtataatagtgcacaacataagtggatagatccagatacaggtcaggaacggtatgaacaatcctatgataccaataatggtttcgattggactcaaggagtaaattggagtacttctcctggtgctgtagataacagccagacagttcgtaacctttattatcaagcacaattgaattgggtacgtagttttgggaaacataatgtgacagccatggggttgttcagccgtcaggaaaatgcaaggggaagcgtgatgcctacctatcgtgaagattgggcattccgtactacttataattacgctgatcgttattttattgagtataacggtgcatataacggttctgagaaattcagtccggaaaatcgtttcgcttttttcaattccggagctattggttggatgatcagtgaagaacctttcatgaaattcttccgggaaaagaaaattgtagatatgttgaaagtacgtgcttcttatggtgaaattggttctgaccaattgggacccgatccttttgattctagtcgtcgctggctctatatgaatcagtgggcttatggcggacatactacgatggaccttaatcagacgcaaagtatttatacatggtatcgcgagtctgctattggaaataaagatattcaatgggaagttgtgaaaaagttgaatgtaggtatagactattcatttcttgaaggcttgtttgctggtagtgtggaatttttccgagatgtacgttctaatatttttgtttatggtggtgatcgttctattccttcttattttggtggaacacctccatctgttaataaaggtaaaattcgtacaagcggatatgaattggagttacgtatcaataagacgtttgctaatgatttgcgtgtttggggtaacttcagtatgactcatgcaagaaataaggtccttgtgaaagatgaccaagctttacgtcccggatatcagaaagctgctggacatgctgtaaatcaatatacctcttatattgatgcaggttttattcagagttatgaccaattgtttggcgctccagctcatgatgccaatgattctcaaaaattagtaggagattattacattgtcgatttcaatggtgatggtattgtagataacaaagaccaagcaccttatggttatacaaattcgccagagaatacgtttaatgcaacagtgggatttgagtggaaaggattcagtgcatttgcacaattctacggtgtaactaatgtaactcgtgatgttgcccttaatagttttggcagtaaattaaatactgtatttgataatggtacatggtggtcaaaagctactcccaatgcagatgtagttgtacctcgttggaattctacaccaagttacaatgatggaactcaattcttatatgacggctcctatattcgtctaaaaaatgttgaattagcttatacttggaataaaggatggatcaaaaaacttggattaggcagtttaaagatttatgtcaatggtaataatctttggttatggacacgtatgcccgacgaccgtgaagcaaatctttcaggagctggttatttaggtgcttatcctacggtgaaacgttataactttggtattaaattcacattataatagtgtacaagatgaaatataatacatataaaactctgttttatgcaggtcttttgtctttttcagtaggattctgcatgacatcttgcgaagattatttggacaagagtccagaatcgacggtatctgaagaagatgcgttcaagaactttcgtaattttcaagggttcatagaagaaatatacaattgcatacctgataaagaaaagtgtaattattgtacatcttggaattggggtgatgatgaacttttcaattctatgggggatggacatatgacgcatcaagccgatttaggtaatttccgggcttggcaaagcaatggtcagtgttggttatacagggattctagtaatcctgcttctaccaatgcgtttgaccattctttgtggccacactcttggtattgcattcgtaaagctaatgtaggtcttgctaatttggataaaatggtaggtacgcaagaggaaaaagacatgattgccggtcaactttattttttccgtgcatggtggcatttcgaattgatgacttattggggtggtctgccttatgttgatcaggttcttgatgctacacaagaactgaatttacctcgcctgagttatcaggaatgtgctgataaagctgctgctgattttcgtcgtgctgctgatttgcttcctattgattgggacaagacgtctatcggtaaagctacggaaggcaagaatcagttgcgtgttaataaaatcatggcattaggatatcttggtaaaaactatttgtgggcaggaagccctttaatgaagaatggtgcacaacttggaggcgctaatgcttacaattatgatgaagaatattgtaaaaaagcagcacaagcattcggtgagttacttactttggtagagggaggacagactcaatatgcgcttgctgagtttaagtataagaatgtttataaccatgagaaggcaagtgacgctaagacttgctattccgatattttttatacccgtcgccaaggctggttgatgcccggttcagttgaggctatattccgtggtccttctggtagtgatggtaatgctaataacagtaattggaatatgacgaaaatatggggaccgaaggtcgcagggcttgtttctcatgataagattattcatttgcctactgctaatcttgtggaaatgtatggtatggcaaatgggcttcctattgatgacccgaactctagatttgatgagagatacccgtttaaggatagagatccgcgtttttatcatgatattgtatttgatggcttccactttgttttggctgaggataaattatctgatgcgcaaaaaccttatgcttattgtgatctttctactggtgcagatatgcgttctgcagatctcggtagtcgtacaggttatttcttccagaaacttgttcctcatacttgtaatgagggtgataaggaatatgattggggtagtaacttacatacttatttaccgtatatgcgtttggcggatatttatttaatgtacgctgaaagttgtgctgctgtcggtggtgcatctttcaaatcggagaactgttcactaaccgctcttgatgcaattaataagattcgcactcgctgtggtgcaaaaggcgttcatacttcttatatagcagataataagaagtttatggatgaaatacgtcgtgaacgtgctgtggaactatctatggaaggttttcgtttcaatgatcttcagcgttggttgttacttacagaagctccttatacagagaaatattctgtagaattcgatcgcgtagaaagccctgaattttataagacaaacgatcctgcgaatgcggaagttgcaaactatcgccatgaattgattgtaaagcgtgtgtttggtacgaagcattattggttccccttgcccgatgacgatgtgtatctttatcctgaattcggacagaatcccggttggtaatcgtggaaagctacaaagtatgtttaacaataaatgaataaacaatgaaatatatacaagcaagattcattctctgtgctatgctggccacttcttcggtgcttgccagtgctcaggttgcagattggaatgaaaccgattcattggcaaacaaaaaagaccaaatggtacaggtagcttttcgtaaggtatcccaaaaagaccttttgggtggtgtctctgttgttaatgtagagaaacttacgaaaaaaaattataacacctatagtttagataatatgcaaggctatgtcggtggttggaatggtaattcgctgtggggaatggatggcgataatgctggttacttagttttagttgatggtgtgcctcgtgacgcagataatgtaatgccttctgagatagcccagatttcctttctgaaaggtgcacaagctgtggttctctacggtagtaaagctgctaaaggtgcgattgtgattactactaaacgtggtaatgtagaggggttaaatgttagtgttagagctaatacaggatttcatgtggctaaggcatatcctgaatatttgggttctgccgaatatatgaccctttataatgaagctcttttgaatgatgatcctactgcaaagcctctttatacagcagagcaaatctataatcatggttctggattgaatccttatcgttatcctaatatcaattattattcttcggattatgtaaagaaggcgtataatcgttcggaagtaacggctgaaattactggtggtggaaaacgcgcgcgtttctacagcaatgtgagctattatcgtaatggcgattttcttgattttggtgaagctaagaataatatgacggaccgtttcaacgtacgtggtaatgtggatgtggatatcaatagttttataagtgcttatattaatgcgaatgctacattttataattcgaaaaatgcgaagggggactattggaatgctgcagcaacagtacgtcctaactttccgcaaaatgcagctccacttattcctttagacatgattgatcctaatgcttcagctgtatgggaactgttaagtactacttccaatattattgatggtaagtatttcttatccggtagtcaagcaaattctacaaatgcatttgctgatagttatgcagcaggaagtagtaaatggacaagtcgtcaatttcaatttgatacaggggtaaatattaatttggacaaagtgctgaaaggtctttcttttaatgcaatgtttgcagtagattatgcaacttcttattcaacctcttttgataataactatgcagtgttcatccctacttgggctaactacggtggaaaagatgttattgtagcgctgactaaagaaggaaatgatgaaaaaccgggtacccaaaatgttggtggaagttttgatgagcaaacgattgcattttccggacaattcaattatcagaatacatttaaaaagtgtcataatgtatcggctatgcttattgctaacggctatcagcaaacaatctctgctcaatatcatcgtatcagtaatgctaatttggcattgcagttaggttataactatcagcagcgttattatgctgattttggtgccgcgttgattcattcagctaaactagctaaagggcatcgtcaggctctttctccttcgttaacattgggctggcgtttaagtggggaaaacttcttgaaagattctcctgttgttgatgatttgctattcagtgtgtctggtagcattcttaatcaggatattgatttggtaatgggagataaggaattttacctttatgaatcagtatggacgcagaatgatggctactcatggtatgatggtccggctggtaagtatactatttctactagagggcagaataatgacctttcattcataaaacgtaaagagttttcagcgaaccttaagacgtcactgtggaatagattaataacagcagatgcttcatttttcattaactctactgaaggatatttgattaatcagcccactttcttcccatcgcatcttaatacaggttatccggctgcatcgttcatggcagttatgaattataataataatcgccgtatgggttttgattttagcgtgaatgctaacaagaattttggggaatttgatttgtcacttggtgtgtcaggaacatattatgataccaaaataactaaacgtgatgaaatttatgatgatgcttatcgatatcgtaagggtaaaccagttgatggcgtttggggacttcaaagtgcaggattatttcaaagtgaggaagagataaaaaatagtccggaacaaaagctgggtagcacagttcgacctggtgatataaaatatgtagaccagaacggagatgatgtaattgacgagaaagatgaaatttatttaggtaaaggaggatggtatggatcgcctttcacgctcggcattaactttacggctaagtggaaaaactttacgttttttgcattgggtacaggaggattcggtgcttatggcatgaaaaataattcttactattgggtagatggagatgataaatattctgctatcgttcgtaatcgctggactgaagagacagcagctactgcaacttatccacgcttatcagctaaaagttcaagtaataacttccgttcttcagactattggttgtataaaaccaatcgttttgatttggcaaaagtacagattacctatgatttacctaaacgggtattgcgcaatactttccttcgtgaattttctgcttatgtaagtggagcaaatctgcttacaatctcaaaagagcgcaaacatatggagatgaacgtggggagtgcaccgcaaaccagattctataatattggtgtaaaagcagtattttaattaaaaaatagaacaaatgaaactaagaaatatcatattatctacagttctactagctacattttccgcttgtgaggatctttttgaacctgctaaggagaacaatcgtggtgttgaggaaatgcttacagatcccaattatgcagtaggtctattgggatatggttatgctatgttgccatacgaaaatactagtgtaagtgatgttgctacagatgatgcagtaaccaatgataaggaaagtaattattccaaaatggctcttggctcatgggcatcaaacaacaatcctatggaacagtggcaagctcgtaaagccgccatacaatatctgaatacatttttgagcattgttgatcaggtgagttgggcaaaaaatgaggtgaccaataaaatgtttattgataaactcagtggagaagcttatggacttcgtgcacttaattattactatttgctaatggctcatggtggctggacagaagatggtaagttattaggtgtaccaatgcttcttgaaccggaaagtactacttctgatttcaatcaagcacgtgctcctttcagtgagtgtgtacagcagatttttgaagatttggaattggcatccgaattattaccgctagattatgagaatattgatagtgatgctgaagtgcctgctaaatataaagagataggtgctcagttgggaaactataatcttgtttttggtacttatcaacgcggtcgccttacaatgagaattgttgaagctattaaggcgcaagtagcgttacttgctgctagtcctgcgtacagagaaggttcagaagttacttcagaaacggctgcaaattatgcagcggcagtgttgaaccgtattggcggtgtaacagggcttgatcctaaaggtcatacttggtatatgaatacggaagaacttgacaatttaggttcgggtgaagtttctgctgaaattctttggagagggaataaaagcattggaacggaagattgggatatgggaataaagcaggaaaaagataatttcccacctacattttatggtagcggacgtatcaatcctacccaaaacttagtagatgctttccctatggccaatggttatcctatcgctgataaggctaatagcggttattcggaaaacgctccttacacaggtcgtgaccctcgtttggagaaatatattttgtttaatggtgctgaatttaaggataagactattattacaggtctttatcctgatgaggataataaacaagataatggtttgaatcaattgaatacctccacacgtacgggttattatatgcgtaagttgttacgtgaggattgtaacgctaacccgaattcgctgaatgctaagtatcatattccggttcgtattcgttatacggagatatttcttgcttatgccgaggctgctaatgatgcttggggaccgacaggcaagggcggtaatgcctatagtgcctatgatgtgataaaagcaattcgtgtccgcggtggagtgggaactgataatggagatgcttatttggaaagtgtcaaaggggacaaagacaaaatggcccagctcattcgtaacgaacgtcgtatagaactttgttttgaaaataaacgtttctgggacattcgccgttggaaaatgcctttggacgagaaagctaaaggtatgcagatagaaaaagcaggtgagagtctgaattataaggtgattgaagtagaaaacagaaactataaagattatatgtactacggccctattccttatagtgagatgttgaaatggagtaatctgcaacaaaataagggatggtaatctcataattataaaatgcaaaaaagaatatggaaatgaaattatataaattgttatctacaatggccttaggaggcttgacatttgcttttgcttcatgtgagaatgcagataaatcttttcccgattatgagggggggacctctgtgtattttgcctatcagtatccgatacgtacaatagtgctcggtaatgatgaaatagtagacaattctcttgaccgtcagcataagtgtgccatttatgccacgatgggaggtgcatacggaggtagagatattactatagatattgctgtggacaatacactttgcgacaatctcttttttgaagatgggacaccggtattgcctatgccttccacctattacacactagctggagataaaatttcttacaatggtgaacattggggaaatgtagaggtacaactcactgatgcattttttgctgatgaaaaagcattaggatgtaattatgttattcctgtggtgatgaaaggacagactggtgccgaccgaattttaacaggcactcctctgattgaaggcgataaaccggtgcgtactaattctgattattggagtgtgttgccaaaggattatgttctctattgtgtaaaatatatgaacccatggcatgcttcttatttgcgtcgtggaatagacaaaattacagaaaatggaacggttacaacctctgaacgtcatgctcagtctgtggaaaaggatgaagtttgtggtattactacccgttcgttaaacacagctgtttttcctattagtacgacttctactaatggtacaacagtgaactgtgatttgctattgactttcaatgatgataacgaatgtaccataacttcgggaactacaggagtttcggcaacaggctctggaaagtttgtagaagatggagagaaaaattcttggggaaataaggaccgggatgctatctatctcgaatacgatgtggatttcggatttaaacaaattgctacaaaagatacgttggtgttgcaaacacgcggaactaataagttggaggtatttgctcccaagtataaagctaattaaattttggagatatgattatgaaaaatagcataaataaatatttcggtttggctttgttgtttatttcagcctcctgtgccgacgataaattcgtcgattttaagacggagaaaccagagagcatagcccaatatgagtatcttaatgcgtatgacgcattgaaaacatatatagaccgtagtactcatcctaactttaagttgggagtaggggtcgcagctaatgattttctgaaaggagaaatggttcgtagcgtagctgttgctaattttgatgaagtagtagcaggtaatgctatgaagtatgcatccattgtggcagatgatggaagtatggatttcggtacagtaacgaagtttgtagaggcggcaaaaacttctgggttgacagtttatgggcatacactttgctggcattcacagcagaataataagtggctgaatagtttgattgctaataagcctaagcctgttgatccttcttctgtaaatcgggtgttgcatattgtagctggtgagcccaaagacaatgtgtgggactgggagatctattatgacttagataacgtattggaaataggtaaacaatatactcttactttacggataaagggatctaatcctggtgcattttctttttggccggggatgaaagatggttccaatacccattatggttttcctgaatgtacttctggtgagggctggattgataatacgattgtttttacaccgacaagctctatagaccgattaagattttgtttcggtaagttaggaggggatttgtattttgatgacgtagtgctaaaagctgatggctctgaagctaatcttttggtaaattcttcttttgatgaagatgatatttctcattggacaacagtaagttggatgggcttatcttatggtgttgaagaattaggagagtctggttctactgtctggtttgaaagtataattactaatggtgatgctgaaggtgaagatgtttcttgtttctatgcaacagaagatggaaaaggtggaccatatgctgctccgataggagaaactggtacaggtgctgatggcgtaggacgtgcttttattgtaaagtctgctgataatccagctgaagatcatagcactcagttctttgttaaagcaaatactgttttaaaagaaggtgatatttgtaaactttcatttaagtataaggctgataaagcagccggttcagattctcagacacacaagaaaccgggagagtatatattctatgatgcaggagtttcggttaattttactactcaatggcaaaaatttgaaaaggaatttacggttacagaacaaatggtaactaatgaaggtgttcagcctttccaaacaatagcatggaatttagccaagtttaaagaggctaatacttactattttgatgatattgaatttggtattcaaaagaaagctgagggtattcctttgactcctgaagaaaagaaagaagtactcaccaacgagcttgagcgttggataaaaggcatgatggaagcttgcggaggctctgtaactgcatgggatgttgtgaatgaacctatttcaggaggtggtgatgatggtaatggtaattatgctcttcaatcagctactaatccggatgataatggagtagggggacagaacttctactggcaagactttttgggcgatgattatgttcgtattccaattaagtttgcccgcaaatattttgcagaaaatggtggtaattctggagatttgaaactcttcatcaatgactataatttggaatcttggtgggataacaataaaaaagtaaaaagtttgattaattggattaaacgttgggaatctgatggtgaaacaaagattgacggtatcggtacacagatgcatgttagttatattttgaatgaggctgatcagaagaaacaggaagaatctattgtcaatatgtttgagttattggctgcaagtggtaagttgattaagattacagaattagatatgggtattgtggaaaaagcatttggagaaggtatcaaaactgaattggttacttttgaacaatatcagaaaatgtctgatttttacaaattcattattcagaagtattttgaaatcattccggtagcgcagcagtatggaattacacaatgggctgctacggacagtcctgcagattcaggttggagaaagggacaacctatcggtctttgggatttgaactataatcgtaaacatacctatgctggttttgccgatggcttagctggtaaataatagcatcttatagaaataggcgacggaattcgcagagcgaaatcgtcgcctttatagccttttgtccgttattggaaattaggttagttaattcagtaagataattgacaaccatgaaaaatatagtaaatctgcttttatttttgttcgtatttctctcggcttgttccgatgattcgatactagaggagttgaaaccggaaccaccgaaatcggatgtggaagaaccgaaacccgatgatgattcggaaaatagtggagataatcagaacagtgtgttacccattttgaatgtggtaggtcgttacctgaaaaatgaaaagggagaaatcattaatctgcatggtttcacgcagacttacagtcctttctttaataataatgcttggaatgattatgatgtgcagggctgtctcaattataataagagtatggtggacggaattttggctgctggatggaagtttaattttgttcgaatgcatcttgatccttattggagcgatgatcctactatgcagtctgtacggtatgagggacacgagcgcttctccgaaactcgtttccggaagtatcttgatgaattgtttgtaccgatggcggaatattttatgtccaagggcatgtacgtagtgatgcgtccgccgggtgtatgccccaacgaagcaccctatcaggggattgagttaggagactcttatcagcagttcttgctcaaagtatgggatattgtttcgcaacatcctaaattgaaaaacaatactggtgtaatgttcgaacttgccaatgaacctgttaagataaaaggcacggacggtacttatggcagtacggacgatgggcattttcagaatcttcaactctatttccaagctatagtagataagatacgtgctaattgtcgtaatattatctgggtaccgggattgtcctatcagtcgtcttatgccggttatgctaagcatcgtattcaaggtgagaatattggttttgccgtacattgttatcccggttggtatggcagtgatgccgaggaagatagtagcgaaggcataggttcttctactggtggaggttatgaaagcttccaacgcggttgggatgctcaagtaggaccggtggccgcttttgctcccatcatggtgaccgaaatagactgggcgcccaaaaagtacaatgctacttggggaaagagcataacgggagtggcaggaggagagggctttggggccaacttcaaatatattgccgataattcaggtaatgtatcctggcttttttttaccacgaggtcacatgaattggcagcttttaaagatataccgggcacttccggcaattatacgtttctcaatgatcccgaggcttgtccgtgggctatgtaccattggtttaaagagtatgccgatggtgtggtggtgaatggtgcacctgtaagattggaacttatggggcaagaggatactttgaacctgccgatgggtggggtaaattatcttaaagtacgtgctgtttattccgacggctctacacgaatggttacagcagacgctgaaatcagcagttctaacccttcagtgctggctgtggaacgggcgggtaaactggtaggagttactccgggaaatgcaactgtgacaataaactatcagcatcctgtgacgagagtttccagtacactggcacttgtagttacggttctccatcctttttcattgacgaaagaagcttttaatccttctatctgggaaaagggcagttttgatgaaaacacccgtacgttgataaccggacgatatggttttggtggctggcaattctcttctggactgaatctttctgcttatcgcacgattactgtggaattgggcaatgataatacgagcagtgtctcttttcgtatttttgacaaaaataattattggacggaacccgcagcctatgatttcggttcatca

SEQ ID NO: 4084 - DNA, 31389 bp, Unknown
  gut microbiota DNA sequence
ggtagccgttgttgtccataagatttctgagttagttttatgcaaagataggatttttacaaatattacccctcaggtttttacattgacccgtttcttcccggaaatagaagtgcaagactttcctattcgtggcaaagctgtatatctacgcgtcaagcgccgtcgttgggaagacccggaaacaggacaatatctcagactcctctaaactgtgctctaaatgctttaatttttcggactgccccgataaatacttcttgccagcaattttgaggagaatgattgctagaactttacataaaaaaagagatgtgtcaatttcgacacatctcctccatatatactaaataagatttgtactcagcatttaatattcaattcatccaatatcttccgcattgcttcaaaagtcgtgattctggtaggcactaatggtaggcgaagtttgttctcaatcattcccattgcattcaacatggcttttactccggctggattaccgtctacaaagagtaatttgaataattctgcaaatttgtggtggatggtcagcgcatttgagtaatctccttgcaatgccagacgtaccatacgactaaattcacgcggaaaggcgtttcctatgaccgagatgataccaacggctcctaaggtaatcagagggaaggtaatgccgtcatcacccgaaataacgtcaaaattggcgggtttatttttaatgatgtcatccatctggctgatatctcccgatgcttctttaattgctattacattcttaaagtcgcgtgcgatgcgcaaggttgtttcggctttcatatttactccggtacgtcccggtacattataaagtacaatcggaaggtcggtagcctcggaaatcgctttataatgctgataaatcccttcttgggaaggcttgttataataaggaacaacagaaagaatggcatccactccggtaaaatcgtcattcttcagagtttctactatggcgcgagtgttatttccacctactccaagcagaataggtattttcccattcacgcgctcgataaccattttcttgattttctttttttcttcttcagtcagcgtcggagtttctgctgtagtgccaagcacgcataaaaaatcagtgttgttttggagctgatagtctactaaacgcatcaatgcatcgtaatcaacgctttcatcctctttaaatggagtaatcagcgctacccccattcctttcaatctagtctgtatcatgagtattataaagtaatctctaattaaacgactcgcaaaagtacgatttttttcaatttaccatacaaatataagccataaaaaagctttttgtagaaatttgttaggatatgagtgtcagaaactcatcttcgctcatgagctttatccctaatttatgagctttttccaatttggcgggtcccatattctcgcccgccagaataaagctggttttggcagagatactgcctacattttttccaccgtttttttctatcagctctttgtattcatctcgtgaatgatgtgtgaaaacaccgcttatgacaatggattgtcctgccaacttatccgtatatccgcttaaatcttcttctctgcgatagagctgtaatccggtggatttcaaacgttctatcaactcgcggttcaatggatttgcgaaatacgtcagaatgctttgtgctattttttccccgatttcatcgatgtttatcagtttttcgaggttggcattttccagctcgtctatgtcattaaaagacttggctattttcttggctacagtttcgcctacaaaacggatgcctaaagcgaagagcactctttcaaatggaacctctttgctcgcttcgattcctttgatgatattctccgctgatttttcacccatacggtccaggttcttaatatcatctgctgtgagctgatataaatctgccgtattcttgattagtcccaaacggtagaacatatctacggtttccgggcctaagccatctatattcattgccttacggctaatgaaatgctctatcttacctttaatttgaggtgggcaggatgtttcgttaggacaataatgggctgcttccccttcgtatcgtatcagtttactgccacattcgggacagtgagtgataaatttcactttttcaccgataagcatgctgcgggcgtctttgtctactcccgtaattttaggaatgatttctccacctttctctacataaaccatgtctccgatatgtaaatccagcccttcaataatatcggcattgtgcagagaagccctcttcacgatagtgccggacagttgtaccggatctaaattggcaacaggagttacggctccggtgcgtcctacttgataagtgaccttgtttaaacgagtcaaggcgcgttctgcttgaaacttatatgctatagcccatcggggagattttgcggtaaaaccgaggtttttctgctggcgcatactgttgacttttaaaacaataccgtctgttgctaccggcaagttctttcgttcggtgtcccaatatctgatatattcaaatacttcttccaggctatgagcctttttcatgtgttccgaggttttaaatccccagccggctgctgcttgtaaattttcataatgtccgtcacagggcaattcttctcctaacagataatacaaataggcatcaagcttgcgtgaggctacaatagcggaattttgcaactttaaagtaccggaagctgcattgcgcggattggcgaaaagcggttcttcacgcgcttctttttcccggttcagttcttcaaacacttcccagggcattaatatttctcctctgatttcaaacgactcaggatagctgccgtggagcactaatggtatcgtgcggatcgtttttacattatccgttacatcatcacctttttcaccgtcaccacgggttacggcacgtaccaatttgccgttttcgtaggtcagtgaaatggatgtgccgtcgtatttcaattcacagcatatttcaaagtcttcgttcagagccttcttcacccggtcataaaagtctgtcacttcactttccgaataggtgtttcccaatgagagcatgggatatttatgggctacctgtgtgaagtttttattcaaatcgcttcctacgcgcatggtaggcgaattgtcgtcctggtattcgggatgttccttttcaagctcttgtaattcgcgcatcctgttatcgaactctttgtctgatatttcgggagcgttcaatacataataattgtagttgtgccgatgtaagtcggcgcgtagctggtctatcttttcttttactgtcataacgattttggagtttggacacaaaaatacgggtttctcccgaatattttttgcttttactcttaacttacactatttttgcggaaaaaataaaatatatgcgtattgatatcattactgttctgccggaaatgattgaaggcttcttcaattgctctataatgaaacgtgctcaaaataaagggcttgcagaaatacatattcataaccttcgtgattatgctgaagataaataccgtcgggtggatgattatccttttggtggttttgccggaatggttatgaagatagaacctatagagcgctgcattaatgctttgaaagccgaacgggagtatgatgaggtcattttcacaactccggatggtgaacagtttaaccagcctatggctaatacgctgtctctcgctaaaaatcttataattctttgcgggcattttaagggaattgattaccgtatccgcgaacatctcataacgaaggaaatcagtatcggagactatgtattgactggtggcgaactggcggcggccgttatggctgatgctattgtacgtattattcccggagttatctctgacgagcaatcggctctttccgattcttttcaggataatctgttagctgctcccgtttatacgcgcccggctgattacaaaggatggaaagttccggaaattttactatccggtcatgaggctaaaattaaggaatgggagctgcaacagtcattggaaagaactcggaaattacgtccggatttgttaggtgagtaatctgtaagatgtaaataaaaataaaaagggcattcagtttgaatgtccttttttatgaaaatagtttgcgaatggctatgctttgttattcgtcatacctcaagtgcaccgattatttctttaactgacttatatccgtgtctgttcagatagtcatcaataccttctgcaaccttcacggtgattgccggatcaataaagtttgcagtaccgatttgaatggcagaggcacctgcgagcataaattccacagcatctttccagttcatgatgccccctaaacctatgaccggtatttttactgccttagcaacctgccataccatacggagtgcaataggtttcactgctgctccggacatgccgcctgttaccgtggaaaggatgggacgtctgcgttctgcatctacagccattcctaacaaggtattgatgagtgatacgctgtctgcaccgccattttcagcagcacgtgctatttctgtgatgtctgtaacattgggtgacagttttacgataagtgtctttttgtaaactgagcgtacggcttttaccacttcctccgctcctttggctgtgacgccaaatgccattccaccttgctttacattagggcaggatatgtttaattctatggcaggaatatttacaagttcattaatgattgcagccgtttccatataatcttcgatagcagagcctgaaacattcacaatcatattggtttttatatccttgatacgcggatagatatgttcaacaaagtaatgtacacccttattttgcagtcccacagcgtttaacatgcctgatggagtctctgccatacgcggatacggattaccttcacgtttgtgaagagtagttccctttacaattataccacctattcgcgatatatcgatgaaatcggcgaattcttcaccatatccaaaagttccggatgctgtcatcaccggatttttcatttgcaattcaccaatgtttacacttaaatctgccataatagtttgtttatattaaaaaccggaccttctttacatacgcataaatgaccttctgtggtattttccacacaacataagcaagcgcctatgccgcatgccatcatgttttctaaagacacttcacaattagtgcctttacttttggcatatttggctacagccatcatcattggtttaggaccgcaggtatatatttgttcgaagttcaccttgctcaatatagaatgttgggtgacatatcctttttcgccatgactgccgtcttccgtggtggtatatacatctccataggcagcaaaatcttctaattgcaacaagtctttatcgcttctggcacctaataagaaggtgggtttgcttccgtttttcgccaattgctcgcctaaatacaacatcggtgctgtacctacgccgccacctactaataagagcttatccgagggcttttcaggcattgtgaagctgtttcctaatggaagtaccacattgattatatctccttgtcttgccgctcctaatcgcttggttccatctcctacaagttggattagaaaccacacctcattccgttgtttgtctacataattaatagagatagggcgtcgcaggaaagtagtgggtgaaccgtctacgcgaatttcggcaaattgtcccggaagcatttccgggagcagggacggggaagtcaatttcagcagcgcataattggcatgcagtcggacgttctcggtcactgtcagatctaaaatatattttttcatattatctataaagaaggattatcttttgactgcaaagatacgggaatttgtgcaaatagccgtagttgcctcttaattttccggtttgaatgtttcataagtattatcatcaaagaaaattcttatttctgttatttttttaggtggtctttctttatagataatctcttgttttacaatctctttaggcgtatttactggagcttctaacgcgatttccttgcgattttccggagtgcttggctcattggacggattttccggattgtcagcaaataaaggatagtcgaatccgttgttttcaacggatggagaattattgctcatgtttccttttcctgttagcagccattcaaggttgatgtcattataccgcttgtgaagtttcagaataacttctgtacttggattattacgggaggctaatatatgggaaatagtggcttgagctacttctatactttcggcaaatgctccagcagttaactgctccctgtccattatcatcttaaatctatcctttatactcatggcgtagatattattacaattgtataagtctttaaatccgattacaaaagtaaataataggatttacaaaagcaaattacgagtgtaatattttaaaatttacaatcgtacttggcaaatttacttatgtcaagcttatatttgtaaagaggttatttttcatgaaaaacatctctaatattagctttaataaaatacattattatgctgatttacagtttaatatattgtattataataggagtattacagagattacaaatgttttgacgtatatttcttatatttataatttaaaagtctaataaatagttatatatatcagatttataatgatatacactatgattaatatgttgttaactgctcacgggataaagatgtaataatgtatataatagacgtaaacacccctatttacaaaagtgttaatcatctattatgtatacatgtaatatgtttagctttgtaatatatacgtttgtgaatactgtgtattacattggtaatgcttcatagttgtatagtacaactattcctctatccggtttataaatcctggtaaagtaatactcgattctaaaagaaaattggtgacaaaattgggaagcgactctatgttatcagtcttatgaaggtcaacaataaattctttgctttatttcaatataaatacccgaatgattgaaaagaaacgattctcagaggcttattttgaatgtattatactgtattatagtatattatgtgtatatttaattgccggataaatcatgataatagaaaaaaagggggaaaatccccctaaatatgataaaatgacacataaatgaatcattttcgtattttcttcttttattaaaaagatatggaatgagaaaatcaatgcaggattttaaagaccaattcccgtaaaaggtcgctatcgtttaaggaagggtttcctactcctttagacttggcatctgtatatcgtatctctccgatgatctgcatggtttttattccattgtacatcctcatggcatttagatattcgcgggactgccacgggctcttcagacctaagaatgctgcgatgccttgctccgatttttcgggggcataataggccagcatcagattggaaaagaatccgaaaagtaaagataaagtcatttgaatcggattggttttcggattttcttcaaaatattttattattctgtttgcctttagaacatccttttccacgatggcgctgcggagttcaaagttattataatccttgctgattcctatgttgcgttctatctgttcgggggtgacacgtgtctgaccttttggaagtgtaataatcagtttttccagttctccggtaaggcggctgaggtctgtccctacgaagtcggcaagcatggaagtggctttcggttcaaggtctattcctttacgtttcatataggatgtgataaatgccggcagttgggactctttcactttcctggactcaaacagtatgcccgacttctctatttcagctgcgagttttttccttttatccaatacgccatgtttgtggcatattaccaatattgtagatagcaagggtttttgaaggtagtaggaaagctcttctatattgcgtatgttctgtgcttccttcactactaccacttggtgctcggacatcatgggatagcgtttggcggcattgataattgtagccacgtccacatctgcgccatatacaacggtgaggttgaattctttttcggtttcattcagtacgttgtccgttatataatccgagatgaggtcgatgtaatacggttcttcgcccatcaggtaatagatgggacgatattgcccggctttcagttcccttaagatatcatcgcacgtaatttcttgcttggccatatttcttggttttaccagtcgaatttcagatgttttacggttttcttcgcatcaataatcatgcgcagagatgcaatgccgatttcaacatgttcctttacatagttttgggttactatgttatcgcttttatcggttttgacgccttccggaatcatcggttggtcggacaccagcaacaaagctccggtggggatatgattggcaaagccgcaactgaacaaggttgccgtctccatatcgactgccatggcacgggtttttttgagatactccttaaagtcctcatcgtgttcccaaatacggcggttggtggtatatacagtaccggtccagtaatcgcgggcatggtcgcgaatggcggaagaaacggcacgttgcagcataaaagctggcagtgaaggaacttccggcgggaagtagtcgtttgaagtaccctcaccgcggatggcggcgattggaaggataagatcccctatcctgtttttcttgtcgatgcctccgcacttgcccaaaaacaggcatgctttgggctgaatggcacttaataagtccatgatgatggcggcgttggggcttcccattccgaagtttacgatcgttattccttccgcactggccgaaatcatattagcgtccctgcctagtatgggaacattgaatttttcggcaaaaatttcgacatacttgttgaagttggtcaacagaatatactcttcaaaatcctccaggttacgttttgtgtaacggggcagccaattagctacgatttcttcttttgttttcataagatttcattaaatttgttccgtaaaaccgttagggaacgattatttaactcacaaaaatacaataaaaaagtaaaaacaagaaattaaaatagaatgttctcactgaacctgccggcgtttgaagccaagattattacaagggatggaaaaagaagtattttcgatgttatccgccgccgatatgttgccttgaccccggaagaatgggtgcggcagcatttcgtacattttctcatgacgcataagggctatccgcaggcactgatggcaaacgaggtgcaggtgcagttgaacggtactaaaaagcgctgcgatacagttctttataggcgtgaccttacggcacgcatgattgtggaatataaggctcccgaggtggaaatcactcagaaggtcttcgaccagattacccgttacaacatggtgttgaaagtggactatctgatagtaagtaacggtatccggcattattgctgccgtatggattacgaacagaacagttatacttttttacaagatattccagactacgcaagcctctgattttaccggctgaatgaaccgtaatgaatcagggagtgaatgcctttcactccctaactcattacatcccctttcagaacaccttcctgaggggattgaaaagaacggcaaccatgtaaacacgatagcaaaaaagatgcacttcccccactctttcctacttcatttcgtcgtataccatccgggaaatgtgtgcgatgatggcggcattctcttcgtccgtttcacttgagtccgttacgaagacagcgatataatacttcttgccaccgggcgtgattactactccggcatcattatccgccatcttcacgcctttcaaattacgatcggaagaaccggttttatgccccacaaccgtattggaaggcaataagccttttagtttgttgcttcctgtggctgtttcggtcatagttttccaaaggaaatcccggtacacgggggcgaataaatttttctcatcggccattttcagtaaccgtaccatttcagagggggtgctccaattggagtatgcctttgggggattccggtgcatggagtcttccgtttcggacaagttgaaatcattgatgcccaatttcctgatgtactgatgaatatgccctattccaccggcatattctatgaggatgtcgcaggcattgttatcgcttagcgagatgctgtattgtaaaagctctcctaataatatatccagatcttgaccggaatgcttttgccgcagcggactgtaggtatttggctgtaattgggaagcttttacatgaacaatatgtttcaatgggatttcctctctgttcattttatccaatacggccagggctacatggaatttgaatacgctcagaagcggatagtgcacctcgttgttgtgtagtatggtttcgtctttgtctgtcagtacggctacgccgaccgtggctttcttccctttaaggaaaccggcaattttgccttccaatgcctgctgttgtgcttgtagaacgatgtttatgctgaaacacaacacgcctatcaaagtatatctaagcttcatattattaatttcatacatttgttcgagtcaacaaatgtatgaaattaatttaaagagaaaaactgcatttccttatttgcccttattctttccgaatttttcctgcagcttttgcatcagctcatagaagttgggaatatagaccgttgccagcaatgtattcagcgccataccgaatactactgccgctccaagggcgacgcggcttcccgctcccgcccctgtggcgaacagaagtggcataactcccaatacaaacgccaatgaggtcatcagaatgggacgaagccggatatgtcctgcctggaacgcggcgtcacggatactgttgccctgtgcacggaagtcgcgtgcaaactccacaatcaggataccgtttttggcggatagcgccactaacaggattataccgatttgcgtatagatgctgaccggagttcccatcacatagcaacccagcattgcgccgagtaatgccaccggaattcccattactgctgccaccggacttgtccagctttcatactgtgcggcaagtataaggaaggccactaacaacgccatgataaagactacggtagtggtggttcctgcctgcgtttcctggtaggcaacggaagtccattcatagccgaattcattgccgagttgggtctttatcaagttttccgcttgcttgatggcttctccggaactgcttcccggggctgcattgcaggtgacggatgcggtagagtacatattataccggttgatttggtccatacccagttgctcgtctatctgtgtgaaggaagagaaaggaaccatttctcccgaagcattgggtacgcctaacttgaggacgtcgtcgataatgcgttgggcacggtcgccagcacccagcttcacctgatatatacgtccgaactgtacataatcattaacgtaggcttctcccatataataccctaaagccgtgaaaacactgttcaactgtatgcccatcaattgcactttgtcgcggtctatattcaggaaatattgggggacattggcctgatactggctgctgacggatgccaaagccggataattgcggtaattttccattaaagtttccacggcacgctgcatttcggtggcgccgagattgttacggtcttccaattgcagttgcagtccgccggtagcgcccagccccggaatggcaggcggaaccattgcaaagacctcagcttcctgaataccataggcttccatgttgaaacgatcgacaatggccgctgccgtgtgttttttccccttacgctcatcccagtttttcaggactacgaagtaggtagcggcattactctgctctccgccacccataacggaaaagccggatatgccgatgtaatcctttacttcgggataggtgtcgagcagagcgtttatttgtttccccacctcttgcgtgcgctccaggctcgatgcgggtggaagttgcacaacagcgaggaaatatccgtcgtcttcttccggtatgaaagtagagggccacttaacgaacagcaacacagcgattatggtaaatgcagcgtatgaaatcactgcggcaaaaggtctttgcagcagatagcccactgttttgtcatacattccttgtgtcttgtcatacagacggttgaaacctttatacagagggaatttcgagggtttggtgggttggagcatcaatgcgcagagtgcgggcgtcagcgtcagagagttgatgccgcttagcacggtactggcagcaatggtcaaggcaaactgcttgtacaattgtcccgaaatcccgctgacaagcatggtagggataaatacggcaagcaacaccagcactactcccacaatggggcctgtaatctctcccattgcttcggttacggcttgccgggcggtgtaccgtcccgtatccaacagacgtgtggagttttccacgaccacaatggcatcgtccaccacgatggcaaccgccaatatcagcccgaacaacgttaaagtattgatagagaaaccgaataatgacatgattgccaacgtgccgatcagtgaaacgggaattgtgatacaaggaatgatgacagcccgccaattctgcagaaaaaggaagattaccagcactaccaatagcgttgtttcaaagaaagttaccattacttcatcaatggatgcatggataacgtctgttgtatcgagcgttacattatattgtacacctgccggaaaattctgcgataattcctgcatcttcgctttgacgcccgtcgatacatccagtgaattactgcccggttgctggtagatggcgatggcagccgtaggccttccgtccagttgggaaacaacgctgtaagatgccgatcccaggtctatatgggctacgtcacgcagacggagaatccgcccgccgctttccgtacggaggataatgttaccgaactcttcgggtgaagtgagccgcccctttacagtcaggctgtattgataggcattcttgttctcatttccgatgggttgtcctacgttgccggcactgacctctacattctgcgtctgaatggcttgatacacatcagccggtgagagattgcggatgcgcatggcggcagggtcgagccagatacgcatggaatagtcccctgctcccattacgttgactgcacccacaccgggcacgcgggtcagttggtctacgaggttcagtttggcatagttgctgaggtaaagaccgtcgtaatctttgttgtcggacttcatggtcaggaacataacgatattgctggactgcttctgcaccgtaaccccctgcactactacgggagtaggcagcgatgactgtgctacgctgacgcggttctgtacctgtacggtggccatgtcgatatctgtgcctactgcaaaagtgacagtgagcgaatacgcccccgatgaggatgagttggacgacatataaagcattccgtccactccgttgacctgctgttcgataggaatgccgacggtttgagctaccgtctgcgcattggctccgggataaacggcgctcacctgcaccgtaggaggtgttatgtccggatattgcgcaatgggcagaatacccagtgtgaccagtcccgctacgacgatgagcagtgccagtacggttgcgaatatgggacggtctatgaagaattttgaaaacatgattctttggttttgaatggttatatatacagtgtggattattgaacgggatttatccgcatgccgtttctgactttcatcagggctttcgtcacataccgctcctgcggggaaagtccttgttttatctggcgcagactgtcacctatcagttgtcctgtttcgatgtgacggtagtgtacgatgtccgagtcgttgactacgtacacgtatttacccaactggtctgtgccgatagaagcatcgggtatcaggattgcgtttttctgttttccgtaaggcagcgtgatgctgacataaagcccgctcttcaagattcctttgggattatccagccgggcacggatattcagcgtcccggtgttcaagtctacattgggcgacagataatccaactgtgccgggtaattcagtatgccgtctttccccaggctgacgttaacctgtttgggaatgctgtctccttgctgcaataacatggcaagccattgattgtcggctacattaaaataagagtacagatgatcgtctttatagacagtggccaaagttacaggttgtacgctgccgtttatatagcttcctgcatctgcaaggttgcggctgattgttccgttgaacggggcacgtaccgtacagtagctcaaattggtccgtgccgtatttaatgcagcttcggcattgcttaccgctgccagcgaagtagctacatccgacttggattgcaatacctgtatctggctgacggcatctgtttttgctgcttcctgcatacgcgcataattactctgtgcatattcaagattggcacgtgccgtattcaaagcggcttccgcttgcctcacattatcctgataaacagtaggctcaatctggaagagcacctgcccttggcgtacccggctgccgggtgcataggctatggtctgcaacgttccgctgactctgcccactaaatccactgttttttcagaagtcagatagccgggatagtttttggtaagcgtaatgttttgcacacttgggcgggctacactgatttccggtacgggcattgcatgcgacgtttcttttttattcccgcatcctgccaacaaaggtagggcaagcagggcgatgtacatttgatttttcatatatggttcagtttaaattcagttgagtatgtatatattatatatgtttatttatgatttgcggctgatgtacctaaaatcataatcctgaaatgatgtttccgtatcctccccctaatgctttatagagagagatgagctcctgcagtgagtttccttgtgcttgcgtcagttggttttgataagccagcaatgaacgaagggcatccaggacattttgaaaaggggttagcccctgcttatagaggtctaatgacagcttcaacgtctcctctccctgattgcatacttcgcgcagggctacaatctgcttgatggaattgcggtagccgttcatggcattgtctgtttcctgtacggctgtgagcacggtttggttaaactgatggatagactcgtccaattgcgcacgtgccagccgggtggcattaaccagttttgtaccgttgaagagtgtccaactgaggcttggtgctatttcaaacgtcatactgttccgtttggtgaaatctttcaggtcatgggaagaatatcctacggaaccttttaggaaaacctgcggcagccaatcgcttttagaagcaccgagcagggctgcctgtgcgttgatttgccgttcggcctgccggatatccggacgacggagcagcaagtcggcaggaatacctatgcctacaggttccatatagtcgggaagtttgccgttctgctccaatgtgggacgaaggtcttggggataagttccgagcagaatggccagagtggtgatatattgattgatacctgcctccagttggggaacagacgctttggtactgtaatatacagacttggcttgagacacatccagtttggaaaccaatccggtcttgtagcgcacttgggtaatctcaagcactgcggcttgcgtattgcaattgcggatgaccacatttaattcctgctgtaattcacgcagcccgatgtaggccgatgctacctgcgcgcatagcgatatcatgacagaggtatattcttccttgctggcggcaaaattttcacgttgcgcttttacccgttgccggatactgccgaatatatccagttcccagcttgcattgagcgaggcgctgtatgccccggttatggattgcggtgcttcacttacattgccgctgctttgttggcgtgcccatccgccattcagggaaacggaagggaagaaactcccccgctctatccgccaattggctttagccatatccatacggtctatggctgaaagcaccgaaaaattcccggcggatgccgttgctatcagcgaatcgagcatcggatcgccaaaggctttccaccatttatcgtctaccggctgtatttggctgccgaacagattatcgtctccgggaatggtatgggcagtgccggttccccagccttgcggaagcggcttttccaagtagctattgcctttttgcgcccatgccgcaaaagagaaacatagaatgagcaatgtactgctccaagcttttagagtcataaaaaaaggtttaagttgttattttatgggattgataacaacctaaacctttatttgtttatcgcgattcttgcggaatttattcagcgtctgctgctttctttctgcttcttgttgtcttttcctttaccggttcctctttcacttccggagcaatacctgccagttccgggtcaatcatgatacgtccgcagtactcgcaaacgatgattttcttacgtgaacggatgtccagttgtctttggggcggaatcttgttgaaacagccgccgcaagcatcgcgctgtacgtaaacgatacccagaccgttgcgtgagttcttacggatacgcttgaaggattgaagcagacgcggctctattttagtttcgagttctttggctttgtctctcagcttttcttcttcctgtttggtttcggagatgatttcgtccagctcattcttctttacttcaaggtctttttgtctttcttccaaggcagcggtactgtctgcggcttcctgagacttgacttcttcatcggcagagaactctttgattctcttttcgcagagttcgatttccaaggtctggaactcgatttctttgctcaggaagtcatactcgcggttgttgcgcacattttcctgctgctctttatatttggctacagaagcctttgcggtttcgatttccactttcttcgttgcgatagcagatttcaaatcggcaacttccgactggattctttcgatgcgggtgctcagaccggcaatttcatcttccaagtcttgcacttccaaaggaagctcgcctctcaacgtcttgatttcatcaattttagacaacatggtctgtagctggaacaaggctttcaatttctgttccactgtcaattcctggggatctttttttgcttctttagccattttaattacatgtattttatgggatttgtatttatcttgctttgttgtacttcaacattaggaaataaatcccggattattgtataaaatatttcttttgtatattgttcgctttcataatgccctatctctgccagcagaatatccgtgtcatggccgaaataatcgtgatactttatttcacccgtgatgaaaacgtccgcacggttgcgtatggcaagcggcatgagaaaagctcctgcaccgccacacaaggcaacggtctgtatctcccgcccggtgagcctgttgtgtttcagacaacccacttcaaaggttttcttgatacgctttaggaactccaactcggtttccggagtttccaattcgccgataacgcctgctccggcttgttgccaagagttctgcaacggatataaatcaaatgcaggttcttcgtacggatgtgcggcaagtaacgctttgataacttctgctttccggtaagtcggcagaatggtttcgatgcgcgtctccttttccacatgcagctcgccgatttttccgcaataaggattggcgctttcaagagcacggaacatcccctcgccttccacattgtagctgcacgaatcataattgccgatacatccgcatccggcagatgccaatgctgtgcgtacttcttccgcccgggttgcaggaacaaatgtaaccaatttcagcaaagcgttttccttagcttccagtacacgtacattcttcaatccgattttttcggcaatcttgaaattcactccttccggcgcattatccagattagtgtgggcggaatagatgacaatgtcgttcttgatagctttcaagatacaacgctccacgtaatcttttcccgtaatggatttataacccttaaaaataagcggatgatgcgatatcacaagattatatcctaacgcaatcgcttcatccagcacggcttcagtaacgtcaagacacaacaaagcccctgttgcttccgcatctgtcaatccgacttgcaggccggcattatcaaatccgtcctgcaatggcagaggcgcgaaccgttcaagggcgcttactatctccttaattttcattatcagtagaaaatttggttgcaaagatatgaaaaagtagcgaattacggcttacttttaccttttttttctaccatgaccggccgtagctttccataagcgtcgaaagacttacgcgaagccagtgaaatggttatcatcagcgaaagcatggatgccgtaaatgtgataaccataatcatcatctgatatttgatggcgacattcggactgcttccccctaatatctgtccgatcattgttccgggaaacgccaccaagcccatgacggagatattggcgatgagcggactgaatgccttgataatagcctgacggataaacggcgcctgcgcttctgtgcgggtagccccgttgccaagcagatagcggtaaagctgttgctcgcgtttcaatccgctataataggtattcagggctataacattgctggatagcatgtttcccatcagtatgccgaaaatgggaatgaagtattgagcgctgaatacattttcaagacgcaacacgattcctataaaatacattcccacgcatactacgctacataggaaacctacggatataggtatcagcagtatcttgcgcttcagttgtgtgcgcgccagtgccgtttgcgaagctacgagtatcatgacgattacccacaggaaattaatccacggattattccaaagaaaaaggtatttcagataaatgccgatgaagaaaagctgcacaatcatgcgtgccgtaccgataagggttgcacgtagcaggccggtcttgaatttccatatatagaataatgggattgacagcaagagcagtccgatacccaagctgaggtatgatatgtcgatagttcccatgaatactttgaattagcgggtaaatatgaaaaccaatacagatgcaataataatgcaaactcccataacaatcagcatcatgcgtacggtatgtttctgttcggaacattccttttgccgggtaagtctggttattttctccatatcttctgcggttgtgttgtggggcatgccgcaccctttgtgcattttatccaaacgctcgttgagacgttcccggcgaagaaggcgtaaattacggttctccttatcacggcgtatcatatcaaaaacaaatccggcaaaactcatggctttatttttatcaggtttattacattattatatgtctgtcgcatcctttggcgaaacccatgtcgtgcgataccgccagtacggcggttccctttcgggtttgatgccgtaaaaaggcaagaactctttccgtagagcccgaatcgagtgccgaagttggctcgtccacaatgattaacggcttgttggtcatggaagctacagctatcatcatacgttggcgttgaccgccggatatttcatttacacgtttataatatagctctctttccaatcctaattcttcaaagcaattgaatagttgaatttcggagaacggtgtggctcgattggctttcaggctgaaaggcagttgtatcatgtcttttacccattctaacggtagtgccaattcttgtggaatccaggctatttgtttgcgaataaggtctatgctgtttttatccgatacgatgtcattgaccgtaatgcgtccttcttttaatggagtaaaccccagtatggcattgagaagagatgtttttccacaccccgacgagccggaaatgctggcaatctctcccctcttcaattgcaggttgaagttggagaatagcacatcattaccgtatgcaatactggcatcctctatttgtagcataaataaattctttagtcgttagttgcaaaggtaaggaaaaaagatttgcatacataactttatacttttatctttgtgtcactaattaattcgggagaaaaagtatgatacagaacgaacgggattgccgccatgaacatgtgttgggcgtggcaaggcaaatgatgactgccgcacgcacagctcctaaagggaaaggtgtagatgtaattgaagcagcactggttacaggagaagacctgaaaaagctttcagaaaaaatgaatgccatggcagaagaactgggtatgaagttctttctgcgtgatgcggcaaatgtcctgcaggcagaatgtgtcgttataataggtacgcgcgagcaggcgcagggattgaactgcggtcattgtggctttcctacttgtgccgggcgtacggagggtgtgccatgtgccttgaatacggttgatgtggggattgctgtcggctccgcttgcgccacggctgccgacatgcgggtagatacccgggtaatgttctctgccggactggccgcacagcgaatgaactggctgaaagattgcaagactatattcgccattccggtcagtgcctcttccaagaacccgttctttgacaggaagcctaaggaagaaaagaaataaagcgcattgccgaacctgaagttgagaacgggaaacgtaaagttgaactttagcggcgtagagttgaacttcagaactctaaagtggcactttagaaatgcagaatagaactttgcgtaaattaagattaaggggcatcggtattcaggcttcattatcttacttgacgcattaaataacttagaattgatatgggatattttgttggaattccattgggcggagctgccgaaaaggactgtcaggtgcgtttcggtaagaacatgacctttcaagtggaaacgcgcgctcctcacctgccagcggagtgggcattacagagtggcgtacagcttacatggcctcatgcggatacggattgggcctatatgcttgaagaagtgcagcaatgttttatagccattgcttccgagatagccaagcgggagttgctgttgattgtaactccggaacctgaagaggtaagaaagcaaatttccgcgacagtggatatggataatgttcgtttcctgaaatgtgaaacgaatgatacttgggcacgcgaccatggagctgtcactatggtagatacggaagggccgtctctgcttgattttacttttaatggctggggactgaagtttgcttcggataaggataatcaaattacacgtcgggctgttgaagctgaaatcttaaaaggccggtatataaaccgtttgggctttgtgctggaaggcggatccattgagagtgacggcatgggaacattgcttaccacttcggagtgcttgttgtcgcctaaccgtaacggccagttgaataaggtggagattgaggagtatcttcggtctacattccatcttgaacgggtactttggctggattacggttatctggccggagatgatacggacagtcatatagatacgcttgcccgtttttgttcgccggatacgattgcctatgtgcagtgcagggacgtgaatgacgagcattatgaggagctgcaccgaatggaagaacagcttaaaacgttccggacacttgccggagaaccttatagactgttggcattgccgatggccgataagatagaagcggagggcgaaaggctgccggctacgtatgccaacttcttgataatgaatgatgcagtgttatatcccacatataaccagccggagaatgatatgcatgccaaagaggtgttgcaaatggcttttcccaagcatgaaattgtaggtgtagactgccgtgctttgataaaacaacatggctcgctgcattgtgtcacgatgcaatatccggtaggagtaatcagataaaggtatgaaagttatcaatttcgttttttgtgggatatttgtagccatgtatatagcaggttggctctttcctaagtttcggcggtatattaaaaagaatatatggttggataacttaccgggagtgttggagcttatcttctttataaatctctccgaatatctttttgtagagcaatggaattgggaatatggcgaggttctttcctggcttgctcctgttcttatcgttttggtaacttcttattggtgggatagattagaccggaaaaataaaaaacatttaaaagaaatatagattatgagaaaaataaaagtcggtattattcagcaggccaatgtggcggatatgcgcattaatctgatgaatctggccaagagtatcgaatcgtgtgctgctcatggtgcacaattagtggtgttgcaggagttgcataactcactctatttttgccagacggagaatacacaactgtttgatttggcggaacctattcccggaccatcgaccggtttctattcggagttggcggctgccaacaacatagtattggtaacttcattgttcgaaaagcgtgctccgggactgtatcataatacggccgttgtgtttgagcgtgacggtagcattgccgggaaataccgcaagatgcacatccctgatgatccggcctattatgagaagttttatttcactcccggagatttgggcttcgaacctatccaaacgtctttgggaaaattgggcgttttggtttgttgggaccagtggtatcccgaagcagcacgtctcatggcgctgaaaggagctgaattattgatttatcctaccgccatcggttgggaaagcagcgatactgatgatgagaaagtccgccaactcaacgcatggataatctcgcaacgcggacatgccgtagcaaacgggctcccggttatttcggtgaatcgtgtgggacacgagccagatccctctatgcaaacaaatggcatccaattttgggggaacagttttgtagttggaccgcaaggtgagtttttggcacaggctggcaatgagcagccggaaaatattgtggtggaagtggatttggaacgttcggagaatgtccgccgttggtggccattcctgcgcgatcgcagaattgacgcctatgagggattgacaaaacgttttttagactgagggtttgtttgaattctataagaaaagaattctcaaaagcatgctgaataaaaataaggcaagttccgaagaaaggagcgcttctatttaaatgtaacttttttgttcatcaggaagttgactccgccatatacaaataatcctaagaactgggcgaggtattcattacagttcaatccctctaccaagccgatgaggaaaaggaattgcgcacaataagccattccgaaagctatggaaaagagcaacacttgccgccaagtgttgctcttcttttctgttgggaatacccaatacttgcaccagataaagttatgagtctgtgccagtatatatgcagtaacattggagagcatgtaattaatgtccaactcatccatcattacccagatggtaattgctgttatcaaggcgtttaatgtaccgattactgcaaaacggcaaatacgtgtggactctttcactctctcctattctcttgtttttattcttttacctccacaataaggttaagctcgtccaattgtttttggtcgataaccgaaggtgcatccagcataacatcgcgaccggaattattcttcgggaacgcaatgcagtcacgaatactgtcaagaccggcaaagatacttacccaacggtcgaggccgtaagccaaaccaccatgaggaggtgcgccgaacttgaaggcattcatcaggaaaccgaattgttcttcagtcttttccggtgtgaatcccaatatctcaaacatcttggcctgcaattgagcatcatggatacggatcgaaccgccaccgacttcaataccgttacataccatatcataagcatcggcacgaacggctgcaggatctgtgtccaacaaaggaatatcttcatccttcggatgggtaaacggatgatgcatagccatcaggcggccttcttcttcgctccattcaaacatcgggaagtcaactatccaaagcaatgcaaacttattcttgtcgcgtaagcctaattggttacccatttcaaggcgaagctcattcagttgcttgcgggtcttcattacgtcatcaccgctcaagataagaatcaaatcgcccggttttgcaccgaaagcggctttcatctcttgcagcacctcttgcgtgtagaatttatcgacacttgatttcacagtgccgtcagcttctacacgggcatataccattcctttggctccgatttgcggtttctttacgaattcggtcaaggcatccagttgcttgcgggtgtagcttgcagcgccttccgcacagataccgccgatgtatgcggcattgtcgaatacagagaaaccatgacctttcataatatccattaactctacgaatttcatgccgaagcgcaaatccggtttgtcgctaccgtaatatttcatagcatctgcccatggcatacgttggaacggttcggtcaactcaacaccgcgcagttctttgaagaggtactttgccataccttcgaaaagttcgattacatcgtcctgctgtacgaaagacatttcacagtcgatctgtgtaaattccggttgacggtcggcgcggaggtcctcatcgcggaagcattttgcgatttggaagtaacggtcaaaacccgaaaccatcagcaactgtttcaatgtttgagggctttgcggcaatgcgtagaattgtcccggattcatgcgtgaaggaacgacaaaatcgcgtgcaccttccggtgtagaaccgatgagaagaggagtctctacttcaatgaatcctttgctgtccaggtatttacgcacttcaatagtcatcttatggcgtaattccaaattcttgcgtactgctgcacggcgtaaatccagataacggtatttcatacggatatcgtcaccgccgtctgtattgtcttcaattgtaaaaggaggagttaaggctgaattcagcacattcaattccgatacgatgatttcgatatctcccgtaggaatatttttgtttttgctgaaacgttcgttgaccgttcctactatttgaattacgaactcacggcccaagcggttggcctgttcgcaaagttcggcatctacttcttcattaaacactaattgggtgattccgtaacggtcgcggaggtctacgaatgtcatgccgcccattttacggctgcgctgtacccaacctgccagcgtcacttgcttattaacgtcggagatacgcaattctccacaggtgtgtgatctatacatcttattatttactattttacaatttactgtttactgtttggcgatgcaacatcagagatgtaccattgctaaaaacggataaatatcgtgcaaaaatacataaaacatattacagacgtatcaaaacagataagtttatttttaaaaagcgactttatataatagccggacagaaaaatatcaatcttccatacagttccggctctcttgcagaaggcattagttctttctaagttttttaatctgttctttgcctttatccaatatcattctgtttgtatgggtaatatcttccagaatggcttcgtttatttgtttcaagccattgatgtagtcctgggcgcgctgcaatacattcgaggaatctttttccacattcttgggcacaatgacctgcaatcctcttttgattatgtttacatcgatgttctctcccattatcatcggatctccatcgaaatgtataaccccctgtttggaacgatggatgcggagcgtcttacagcggaaagtctttatacggctattctggtcgatagtcttgttgaacaactggaatgataatgccggtacatccaatacggtaaaaggctccagaattgtaacgtccagcaatccgtcatttaatgtggcttgcggagtgatataagcattattcccatactgtgaggcattgccgcatgctatcaggaaagccttgtatcgcagtgtgctgccatccatttccaattcgtatgtctccggtttatattttaggctttcaagcaatgtcttctccagatatatgagcgggcctctcctgccagctttggaaaactgcaggctgacaaatgcgtcgaaccctaccccgcaggtacagaagaaaggaacatcattgattttgccatagtcaataatgtctatcaatccttcgttgatgatgttgattgcttttttggcatccatagggatttgcagatggcgtgcaagcccgtttcccgaaccgcatggaatgattcccaatgcagttttggtatgtaccagtgaacgtgctatttcattaatagttccgtctccgccgatagcaacaacggcaaaagcttcttctttagcttttagggcggctatttcaactgcgtgccccgcccgttccgtatagattacttccggtatataccggcttttatccaacttttcatcaagccatttcaatatttgctccttaccctgagtaccggatatggggtttattataaatgatattttctttttactatcgtccatttaaacggatattactataggaaatttcttcatgcaaaagtaatataaatcctttaaattttaaccatatgaatctcttaaaacgagttagggcagattttttagagtaaatgaaacagataacaacatattttgctatctttgccccctgtttttaagaacttgtttttaataggattaatattcattatataaaagacatttcatgggtttactgcaagacaaattcgcgaaatatgatttgccgcaacaatttatggcaaaaggggtatacccgtatttccgcacgattaacagccatcaggatacagaggtaatgatggatggcaaaaaagttctgatgttcggttcaaacgcatatatgggactgacatatgacaagcgaatcattgacgcttcgatagctgccactgaaaaatatggtacagggtgtgccggttcccgctttttgaatggtactcttgatatacatgttgaactggaaaaagagttggccgagttcgtaggaaaagacgaagcgctctgtttttctaccggttttactgtgaacgagggcattattcccgcagtggtaggacgtggtgactatatcatctgcgatgaccgcgaccacgcttctattgtagacggacgccgcctttcgttcgccacacagttaaagtataagcacaatgacatggaagaccttgaaaaagagcttcagaagtgcgaaccggatgcggtgaaactgattattgtagatggtgtattctcaatggaaggcgatttggccaacctgccggaaatcgttcgtctgaaaaagaaatataatgccagcatttatgtggatgaagctcacggattaggtgtattcggtaagcaaggccgcggtgtatgcgatcatttcggagtgaccgaagatattgacttgataatgggaacattcagtaagtcattggcttctatcggtggttttattgcaggcgacaaggaggttatcaactggttgcgccacaatgcccgctcttatatattccaggcaagtagtacgccggcggcgacggcagcggctcgtgaagcactgcacattattaaatccgaaccggaacgtatccaacgtctgtgggatatcactaactatgcattgaagagtttccgtgatgcaggttttgagattggtgaaacagagtcgcccattatacctttgtatgtgcgtgatacggaaaagacctttgtcgtaacgaagatggcttttgatgaaggcatctttatcaatccggttataccgcctgcatgcgctcctcaggatacattggtacgtgtggcattaatggctacccatactaaagaacaagtggattatgcagttgagaagttgacaaaatgctttagggaattggggataatcaagtaaaggaacaatttgaagtaaagataaaagccgtttaatcgtgaatcggttaaacggctttctttttataaacccatttaaactaaccaaacaacatgaaaaaacaaattctgatttttactgctgttgtatgtggaatgacttgtactacaactgcttatgcgcaatttaaaattggtggtaagaaaatcaatgtaggtaaggttgttcaagccggtacggatgctgctaaagctataactctttcggatgctgatattgcagctatgagtagggagtatatgcaatggatggatactcacaatcctttgacgaagcctgatacggaatatggcaagcgtctggagaaactgaccggacatatcaaagaagtggatggtttgaaagtgaattttggggtttatgaagtggttgacgtaaacgcttttgcctgcggtgacggcagcgtacgtatttgcgccggattaatggatattatgacggatgatgaagtaatggctgtagtaggccatgagataggtcacgtaattcatacggactccaaagatgccatgaagagcgcatatcttcgttctgccgtgaagaatgctgcgggtgctgcgagttctaccgtgtcaaagctgaccgactccgagttgggagctatggcggaagccttggctggtgcgcaatattcgcagaagcaggaaacggaagcggacgattacggctttgaattttctataaagcataatttggatccttatgccatgtataatgcattgaataaactgctggaactttcagcggacgctcccaaagaatctaagttccaaaagatgttttcatctcatccggatacggcaaaacgagtagcccgtgccaaggagaaagctgatgaatatatgaaaaacaagcaataagaggttgcatttccaaattacagaaagaggcgggattccatttgaattcagcctcttttctttataataaaagaataaaacgtacttttgcttcaaattattgactttacttatccgattgctttgatattggttttattttagtatgtttgctgttattattaatgaaaagcataacatttgaatgaaaaagcaagatttccttttcgttttcatcctaatcgtaatcttcttaccttttttcgtgagtgatgcagtttacggctggtataagtctttcaatgccgcacatggtatggtaatgagtttcttgaaattcggagtgcttgctactttaggtgagatgctggggcttcgcatcagtgccggagtatataacagaaaaggatttggagtgctttcccgtgcggtcgtatggggtatcttaggcatgggaatcaatatggcgatgattgtattttctaaaggtgtgccgcagttcatggagtatatggggatggcggatgcttcggcgataattaacggcgattgctgtttggacaagttatggattgctttggctgtatctgttaccatgaacacaatctttgctcctgtatttatgacatttcataagataacggatacacacattctggattgtggcggttcgctccgcagccttattacccctattccgatggcacgtatcattacgcatcttaattgggatacgcaatggaattttgtttttaagaaaacgattccttttttctggtatccggctcataccattactttcttgttgccggatgaggtaagagttttgtttgccgctatcttgggcgttgcgctcggggtactgctggctattgctgcaaggatgaaataatggttctctatttccataccgttgccaatgctttttactgtgagataaagttcatctccctgttactcccaatatttgtatgccagtgtagccatattaatggaagaggcatctccaccctcttccagtttgatactctgcatttttcccggttgcccttcgataggcattatccatgagtcaatgatagagtccttgcttttcttttcattacaagcagacattgcaataaccaatacggcggttgccaataaaagtctttttatactatatatttttaaaagtgagtcaatgtattttcgttatggcagatgcaatattaatgccgggctcatcttcggtgaccgtgtatgaaacctctaatgtatctcctattaatagtcctttttccaaggctatattccgatccgttgtacttatatataaggtgtcctttttcgaggtaaccattgtaaacccattcatggtagcatccatgactatgccttgtgcttgatgtacggaatcgttaatctcttctgtgccgagctcggcattttcttgttctatagttccggctttatttttgcaggaagcacatcccaacaagataatggaaacaaataaaaaaggtttagtcaacttcatattctctgatcttattaagattatttctacaaaaatagatataaaagagaatgtatcaaagaggcagagaataattaaccgttcctgtatattgtatttcagatatttataattttatttcagataaagttataaaaatatttggtctatatcaaaaaagattttacctttgcactcgcttttaagaagtaaagcactcggggtgtagcgcagtccggttagcgcacctgctttgggagcagggggtcgtgggttcgaatcccgctaccccgacagcaagaaatcaaggagttacagtaaaatgtagctccttttttgttgcttgattgggcggttgaattgacggttgacttagataatgtcaaccaagatgtcaaccattaaaacaatgaatgcaactgtaaatgtagtatgttacaaatggaaaacattatccaatggcgaacatccgttgatgcttcgcatctgtaaagacggtaaaaggaaataccaaagtttgggaatatcggttaatccgagatattgggactttaagaagaatgcaccaaagtctaaatgtcctaacttagaatatatccaaaagataattcttgataagaagttg

SEQ ID NO: 4085 - DNA, 37909 bp, Unknown
  gut microbiota DNA sequence
agaagttaagttcatttgtctgccttgccttgttttgcttgctttttggggggcagcagatttttagtgcggattattcttatacttgtgaagtgttttttctttcttagtttttaggatattatatcgtatcgtctaaaagaatgctatacatcctaaatcccccttagtacagagaatttactgtgcagccagaacaacaccccgaactacatccccctctctttacgttcttttgttcttctgtctaaaaaagaatataaaaataatgtcacaaaaaatgatagtgtcaccagacaaacaatcaatttaccgataagtttattcttacttctcttcttcctcgttttggaaaaccaggttgtttttcgtatatttgtcagcgaactgattttttaattaatatttaaagcaaattgaagtatgaaaactaaagttttattcgctgctgtggcagtagcattttctttcgctgtaacatcatgtggtaacaaaaaagctgctgatgccaatgctgccggagcagactcttgttgcgctgcacaaacagaacaggtatgtgactctgcaaaggcttgctgccaggctgattctgccgtttgtccgaaagccggttgcgcgaaagctgattgtccgaaggccgcttgcgacagcgccaagtgtgacaaaccttgtgaaaagaagtaattcaggatttgtatcgaactgaaacataaaggaaaggcgtgcctgtttggtacgcctttcttgtgatatattggtgcgataaatgaatataatcttataaaatgatattatttcagatgaaaaagttactgatttatttgcatgctacaaaataatctatacctttgcatcattaaacaaaaaaacaagatgattcagaactttacatatattctactgtgtggtattattattctactggcaaagtttagtggaagtgagtgctgtgcataaatatatgtaagatataacaatatacgaaagcctttctcacttccctgtgtgaaaggcttttttttatggaatatgaatttataaatacaatgaagcgatgagtgataaattatttattttcgacacaacgctccgcgatggcgagcaggttccgggatgccagttgaatacagtggaaaaaattcaggtggcaaggcaactggaagcgctgggcgtggatgtgattgaggcgggattccccatttcgagtccgggtgactttaactcggtgattgagatttccaaagctgtgacgtggcctacgatttgcgccttgacacgtgccgtacagaaagatattgacgtggcggcggaagctctgcaatttgccaagcataaacgtattcataccggtatcggtacttccgactcgcacatcagatataaattcaattccaaccgcgaggagattatcgaacgtgccgtagcggcagtgaagtatgcccgccgctatgtagaggatgtcgaattctatgccgaagatgccggacgcacggataacgaatacctggcgcgtgtggtggaagccgttatcaaagcgggcgctacggtggtgaatattcccgataccaccggttactgccttcccggtgagtatggtgcgaagataaaatatctgatggagcatgtggacggcattcataacgctgtcatctccacgcattgccacaacgacctgggaatggctactgccaatacaatggcaggtgtgctgaacggagcccgccaggtggaagttactatcaacggtatcggcgaacgtgccggaaatacttcgctcgaagaggtggctatgattatcagatgtcataaggatattgatattgaaaccaatatcaacacgcagaagatttaccctaccagccgtatggtatccagcctgatgaatatgccggtgcagcctaacaaggcaatcgtaggccgtaatgcctttgcgcactcgtcgggcattcatcaggacggcgtattgaagaatgtgcagacttatgagattatcgacccgcacgatgtgggcatcgatgacaactctatcgtactgaccgcccgtagcggacgcgctgccttgaagaaccgcctgcaggtgttgggcgtgtctctggatcagcagaaactggataagatttacgaagatttcctgaaacttgccgataagaagaaagatattaacgacgatgatattctggtattggcaggtgcggaccgctcgcagaatcatcgtatcaaactggaatacttgcaggtgacgagcggcgtaggtgtccgttcggtagccagcatcgggctgaacatttcgggtgagaagttcgaggccgccgccagcggaaacggtccggtagatgccgcaatcaaagccctgaagaagataatagaccgccacatgacgttgaaggagtttaccattcaggccatcagcaaggggagtgatgatatgggtaaggtgcacatgcaggtggaatatgataaccgtatctactatggcttcggcgccaatacggatattatagctgcgtcggtggaagcgtatatagactgtattaataaattttagcggttagtgattaacgattagtgattgataatttgtaattaatacttattctgatgaatacattatttgataaaatttgggatgtccacgttgtacagaaggtggaagacggccctacacaactttacatagacaggctttattgccatgaagtgaccagcccgcaggcttttgccggattgcgtgccaggggaatcaagtgtttccgtccggaaaagatattctgcatgcccgaccataatacgccgacgcacgaccaggataaacctatcgaagaccccgtgtcaaagacgcaggtggatacgcttgccaagaatgcggaagatttcggactggagcatttcggcatgatggacaagaagaacggcattatccatgtggtgggtccggaacgcgggctgaccttgccgggcatgacgattgtatgcggtgactcgcatacgtccactcacggcgcaatgggggcggtggctttcggcatcggtacgagcgaagtggaaatggtgatggcttcgcagtgtattctgcaaacccgccccaagacgatgcgcattaccgtagacggcaaattgggtaaaggggtgaccgccaaagatgtggcgctctatatgatgtccaagatgactaccagcggcgctacgggctactttgtggagtatgccggagaggcggtgcgcagcctgtctatggaaggacgccttacgctgtgcaacctcagcatagaaatgggtgcgcgcggcggtatggttgctccggacgaaacgaccttcgagtacattaagggacgcgaatatgctccgaaaggcgaagcgtgggacaaggcgctggcatactggaaaacattgaaaagcgatgaggatgccgtgttcgataaggaagtacgcttcgacgccgccgacatcgagccgatgattacctacggaaccaatccgggtatgggcatgggcatcacgcagcacatccccgctaccgagggcatgggcgaggccgccaaggcgtcttttatgaagtcgatggagtatatgggcttccggccgggtgaaccgttgttgggcaagaagattgattacgtgttcttgggtgcttgtaccaacggccgtatcgaggatttccgtgcatttgcctctatcgtgaaaggccgtaagaaagcggcggatgtagtggcatggctggttcccggttcgtggatggtagatgcgcagatacgtgaggaaggcttggacaaagtgctggaagaggcgggattcgctatccgccagccgggatgttcggcttgtctggcgatgaatgatgacaaagtgcctgccgggaaatatgcggtgtccaccagtaaccgtaactttgagggacgtcaggggccgggtgcacgcacattgcttgccagtccgctggtggctgcggcagcggcggtgacgggggtgattacagacccgagggagtttatctaaatcaaggttcactacagagggagaaactgagggcctatgtcctctgtagtgaagaaagaacaatcaaataacagcaacaatgaaacagaaattcaatatcatcaacagcacttgtgtacctcttccgttggagaatgtggataccgaccagataatccctgcacgtttcctgaaagccaccacgaaagaaggctttggcgagaacttgtttcgcgactggcggtatgacaagcaaggcaacaaaatagaatctttcgtactgaacgaccctacctacggcggacaaatccttgtggccggcaagaacttcggttcgggaagcagccgcgagcatgcggcatgggccattgccgactatggtttccgcgtggtggtgagcagcttttttgcagatatccataagaacaacgaactgaataatttcgtgcttcccgtggtggtgagcgaaccgttcctgaaagaacttttcgactcggttttcgccaatcccaaaacggaagtggaagtgaacctacccgaacagaccattaccaacaaggccacgggcaagagcgagcattttgaaatcaatgcctacaagaaacactgcctgatgaacggattggacgatatagatttccttgtagagaacaaagacaaaatagaatcctgggagaagaaacatgaagcataatcatccgaagatagaaatcatggacaccacgctccgcgacggcgaacagaccagcggagtgtctttcgtgccccatgagaagctgatgatagcccgtttgctgcttgaagacttgaaggcggaccgggtggaagtggcttccgcgcgggtgtctgaaggggagttcgatgcggtgaaaatgatatgcgactgggccgcccgccgcaatatgctgccgagggtggaagtgctcggtttcgtagacgggcatacgtcggtggactggatacacgctaccggctgccgcgtcattaacttgctgtgcaaaggctcgctgaagcattgctcctgccagttgaagaagttgcccgaagaacatatcgaggacattctggcagtggtggactacgcaaacgtgcaggacatggaggtgaacgtctacctggaagactggagcaacggcatgaaagattcgcccgaatatgtgtttcaattgatggacgcattgattcggaccaacataaagcggtatatgctgcccgatacgttgggggtgctgaacccgttgcaggtcattgaattcatgcggaaaatggtgaaacgctatccgcacgcgcatttcgacttccatgcgcacaatgattacgaccttgcggtgagcaatgtgctggcagccgtgttaagcggttgcaaggggttgcacaccaccattaacggtctgggcgagcgtgccgggaatgcacctcttgccagcgtgcaggccatcctgaaagaccatttcagcgctgttaccaatatcgacgagagccgcctcaatgatgtgagccgtgtggtggagtcttattcgggcatcgtaattcccgccaacaaaccgattgtgggtgagaatgtgtttacacaggtggcgggcgtgcatgccgacggagacaataaaagcaacctgtactgcaacgacctcttgcccgaacgcttcggccgtaagcgggagtatgcgctgggcaagaacagcggcaaggcgaatatccgcaagaacctggaagacctggggctggagctggacgaggatgccatgcgcaaggttaccgaacgtatcatcgagctgggcgataaaaaggaactggtgacgcaggaagatttgccgtacatcgtttccgatgttttgaaacacggcatgatggacgagcgggtgaacctgaaaagctacatcgtgaaccttgcctacggactgaaaccgatggctacgttgaaaatagaaatcaacggcaaggagtatgaggagagttccagcggcgacggtcagtacgatgcctttgtgcgtgcgttgcgcaagatatacaaggtgactctggggcgcaagttcccgatgctgacgaactatgcggtgaccatcccgcccggcggacgtaccgatgcctttgtgcagacggttatcacctggagttttgaagacaaggtgttccgtacccgcgggctggatgccgaccagacggaagcggccattaaggctacggtaaagatgttgaatataatagaagctgaatacgataaataagatgcccaaccatgattgataagagaataaaggattatttcgaaagaaaacccaatgtaagctatctgttttttgcttgcatgatatttttgtttcgtgttttcttgaattggtatgcaaatgagctgcagctcgtcactcttatggatgtgatatggacgcttatgctgactgcgggatttgtgacgggtgaccgtgttcgccgcaagaataaagcaatgaaagataagatagaaaatgaattgaaaaagaaataataattatggactttaaaattgcagtattggccggtgacggtatcggccccgaaatatccgccgtaggtgtggacgtaatgaccgccgtttgcgagaaattcggtcacaaagtaagttatgagtatgccgtgtgcggtgcggacgccatcgacaaagtgggcgaccctttccccgaagctacctatcaggcttgtaagaatgccgatgcagtgctcttttcggcagtaggcgacccgaaattcgacaatgaccccaccgccaaggtgcgtcccgaacaaggactgctggctatgcgcaagaagttggggctgtttgccaatatccgcccggtgcagaccttcaagtgcctcttgcacaagtcgccgctccgtgcggaactggtggacggtgcggacttcatctgcatccgcgaactgacgggcggtatgtatttcggtgagaagtatcaggacaacgacaaggcctacgacaccaatatgtatacccgtccggagattgaacgcatcctgaaagtgggctttgagtatgccatgaagcgcaacaagcaccttacggtagtggacaaggcgaatgtacttgcctcttcgcgcctgtggagacagattgcgcaggaaatggccccggactatccggaagtcaccaccgactatatgtacgtggacaacgccgccatgcgcatgattcaggaaccgaagttcttcgacgtgatggtgaccgagaataccttcggcgatattctgaccgatgaaggctcctgcatcagcggctccatgggcttgcttccttcggcttccacgggcgaaagcacgccggtgttcgagcctattcacggctcatggccgcaggctaagggcctgaacatagccaacccgctggcacagattctttccgtagccatgctgtttgagtatttcgacctgaaggaagaaggcgcgcttatccgcaaggcggtggatgcttcgctcgacgccaatatccgtaccccggaaatccaggtggaaggcggcggcaaatacggcacgaaagaagtgggtgcgtggattgtggactatatcaaacactaatctttattaaggaaagaaagggcgaaacgtttttttcctacctttgcgaggagatgcgtcaagagtacggcgatagcgagcctgcttttggtgtgtctcctcatttgtgtcttattctgtataaactcggacgaattatggcgaaaatagcgaataacttgacggaacttatcggcggtacgccgctgatgaaactggcggggtacagccggaagtacggattgcaacgggaggtggttgccaaactggagtcctttaatcccgcaggcagcgtaaaagaccgcgtagggctggcgatgatcgaggatgccgaagcgcgcggagcgttgaagcccggcgccaccattatagagcctaccagcggcaatacgggagtagggctggcaatggtggctaccattaaaggctatcatctgatactgaccatgcccgaaaccatgagcatcgaacgccgcaacctgctgaaagccctcggagcggaaatcgtgctgacggacggactggcaggcatggcgggttctattgccaaggcgcaggaactgaggaacaagatacccggcgccgtgattctgcaacagttcgagaacccttccaacgcccggatacacgaacttactacgggcgaggaaatctggacggatacggacggacaagtggacgtatttgtagcgggagtaggtacaggcggcacgatttgcggtgtggcgcgcgccttgaaaaggcataatccgaatgtctacattgtggccgtagaacctgcatcgtctcctgtgcttgaggggggcgaggacgcgcctcaccgcatacagggcatcggggcaaactttattccggccctttacgatgcttcggtagtggatgaggtgattcccgtgccggatgatgaagccattcgtgccggacgcgaactggcatccaccgagggactgctggcgggaatatcttccggagcggctgtctatgcggcacgtctgctggcggtgcgtcccgaatttgccgacaaaacggtggtggccttgctgcctgatacgggagagaggtatctctctacggagttgtttgcttttgacacctatcctttggattaaatgccggggacggacgtttgtttcacccggtggtagcggtcataccgacgggtggtagcacttgtaccgtcgcttggtattgcccgtaccatcctttggtactctttgtaccagcgcttggtactgtccgtaccaccgcctgatattctttgtacccttgcttggtacttcctgtaccggctggtgaaaccggtacgggtgcattaataaatttagaatcataagtatgaagaaactgatttttctcgcagtatgtttattggcaagcggtatgcctgcattcgggcaaacctatcaggaactttgcgaccgtgccgtaacttatacggagcaggatagtctgccgcaggcggaaacgtacatccgcagagccttgaagctggagcctgcgaatcctcataacgcccttctgttctccaacctcggtacgatacaacgccgccagcggaagtacgaaaaggctttggagtcctataacttcgccctgaatatcgccccgcgggcagtgcctatcttgctgaaccgtgcgaccatttatatggaactggggcgcaacaacctagcacaagccgactatttgctggtgctggatttggagaaagacaacgaagaagccctgctgatgcgcgcttatatttatatgcagcagcgtgactataaaatggcaaaggcggattacgaacgcttgttgaaagtgaatcctaccagctacaacggccgtctcggcttggctactttagagcaaagagagggaaaatacgaagaagcactgaggctattgaacactatgattgccgccaaaggagagaaccggcagttgtctccttcccaatatgccatgctttatgtggctcgtgccggagtagaaaaagacttgcaccatacagatatggcattggtagacctggaagaggcgataagcctggatagctcgcagcctgaaatatacctgatgcgcggcgaaatctacctcgcccaaaaaaagaaagaacttgccaaacgcgatttcgagaaagccatatcgttaggagtaccgcaatctgatttacgcaacttcttacaacaaacggggaaatagggggtagtggttagtgattagcgtttagtggttagtgattaagttatgtacaataaacagttaattgctaatcgcaaaacactcactgctcaccactaatccttaatcgctaatcactaatcactatattttcgtattaggttgataaattctttgccgtatttcttttttttgtgttctccgatgccgctgatgttgccgaactcttcgagattggtggggcgtgaggtgctaagcaagtggagaaccttgtcggacaggacgatataggcaggcagggcctcttcatcggcaagacgttttcttaatttgcgcaatgcttcaaagagggcttcgttctctgtattgggaagtcctaagggtagctcttgggcggggacggttgctttgcgttttctgccacgtttggtttcgtttgtttcttcccggcgtatcactaccaatcgggcggtggctctgccgaagaggacatcgcttcctgcggaagttattttcagatgattattttcgttgtaggcaatctcgaagtatccgagttgcagcatttgtaataaataatcatgccagtcgcgggcgggaacatcacgtccggcggcaaaggttttcagttgctgatagcctttgcctacgacttcgggcgacatgtttcctctgagaatatccactaaaacgcctgtaccgatttgctggtctgtgcggacaatggcgctcagggctttttgtacgatgacagttccgtcaaagcgttcgggcgggttcttgcagacgtcgcaattaccgcagtcatgatctgctatttctccaaaataacttaacaatatgcggcgtcggcagatgtcggattcggcgtattgctgcatgcgttgcagtttctccaggttgatgttctgctgtccgctctcggtagcgaatttggtaagcaaaatcaggtctgcaagcgagtagaacagtagcgtgtcactgggcagtccgtctctgccggcacgtcctatctcctggtagaaactctcgatgctctttggtaaattataatgaataacccaacgaacgttactcttgtctatacccatgccgaaagcgatggtggcgcacactacctgcacgcggtcgttgatgaaatcgtcctgcgcttcgtccctgagggagggggagaggccggcatggtagacggcggtgcggataccctgcttctggagcatctgcgccacggattccgtcttgctacggctcatgcaatagatgatgccgctttctccgggatggcgggctatgaagtcaagaattgtcttggatttttccttctgctggtagccccgttttacggtgaggctcaggttgggacggtcgaacgaggagatgaacgtccggggatggttcaggtgaagctgcctgatgatatcttcgcgcgtgattttgtcggcggtggcggtcagggcgatgatgggcacgtgcgggaactgctggtgcagaatccccatctgtgcgtattcaggccggaagtcatgtccccattgcgagatgcagtgcgcttcgtcgatggcgaaaagcgagatgtgcatgtcccgcaggagataattggcttctgcaagcagcttttcgggcgagatatacagcagtttcagtctgccttccatgcaggcacggcgcagggcagcattttccgtttcgtcattgctgctgttcagcgcaccggcgctgatgccgttggcgcataatgcctctacctggtccttcatcagcgagatgagcggcgaaacgactaccgcggttccttcgcgcagcagggcgggaagctggtagcatattgattttccaccgccggtgggcattaacacaagtgcgtcgtttccgtccagaatgtgacggataatctcttcctgaaggggacggaaactgtcgtatccgaagtatgttttaagcgtttgtagcataagcagtgccggtatctttttatcaggggacaaaggtacgttaattcttgcataaaatgcaaaaggaagtggcgttcagtcaaataacttaataatgaagcagttgtgttaaataagcttgtaattaaacgtatcctgcttcttttcaagctttttcgttgtttgtatattaaaaatatgtacgggaaaagttgcgtattaaaaaaaaatgttagacttttgtgtaatctaagggaagctcctttggatttccgtatttaaacaaccctaaccagttaatttaatgagtgatttagaaaagaatgcacaggaggaggctacaaagaagcatccctataacctgcgcgaaaagaaagaaaagaaggctgcctaccgttccttgatacggccggaactggcagacgagctgtacgacaggatattgaatatcattgtcgtgcagaagaagtacagagaccccaattactctgctaaggatttggcgaaagaactgcagaccaatacccgttatttgtcggcagtggtgaactcccgtttcggcatgaattattcttgtttgttgaatgagtacagagtgaaagacgctttgcatttattgacagataagagatatgctgacaagaatgttgaggaaatcagcacgatggtaggctttgccaatcgtcagtctttttatgctgcattttataaaaatgtaggagaaactcctaacggttatcgtaagaaaaatgcagtgaaaggtaaataatgcagtaaaactgaacttataaaaggaaatattccgagccatgtgctccggaatacttccttttgttattttaatactaatcaatcttttccaaacacgcatgaaaaaacaactgatttccgtaatggttgccgcgtccttgctgacagcttgcggcggagcaccgaaaactactgccaaggcagaaaaatttgattatacagtggaacaatttgcagacttacagattttacgctatcgcgtaccggagtttgagaacttgtctctcaaacagaaagaattagtttattacctcacggaagccgctttgcagggacgtgacatcctgttcgaccagaacgggaaatacaacctcagaatccgccggatgctggaagccgtctatacgggctataccggcgacaagactgcggcagacttcaaggctatggaagtgtacctgaaacgggtatggttctccaacggcattcatcatcattacggctgcgagaagttcgtaccgggctttactcccgaattcttcaggcaagcccttttaagcgtggacgccgctacactgccgcttgcagaagggcagacggtggagcagctttatgaagaggtggctcccgttatcttcgaccccaaagtaatgccgaagcgtgtgaaccaggctgccggtgaggatttggtgctgacctcggcatgtaattattatgacggggtgacgcagcaggaagccgaagccttttacagcgccatgaaagaccctaaggatgaaacgccggtttcttacggattgaacagccgcctggtgaaagagaacggcaagattcaggaaaaagtgtggaaagtggggggcttgtacggtgcggccatcgggaagattgtgtattggctgaagaaagcggaaggcgtggccgagaaccctgaacagaaagcggttatagccaagctgatagagttttatgaaacaggtgacttaaagacctttgatgattatgccattctgtgggtaaaggatttggattcccgcatcgacttcgtaaacggattcaccgaaagctacggcgacccgttgggcatgaaggcaagctgggaatctttggtgaacttcaaggatttggaagctacccgccgcacggagattatcagcagcaatgcgcaatggttcgaagaccactctccggtggaaaagcagttcaagaaagagaaggtgaaaggtgtttcagccaaggtaatcactgccgctattctggcgggcgacctctatccttcgacggctatcggtatcaacctgcccaatgccaactggatccgcagccatcacggctccaaatccgtaacgattggcaatataacggatgcctacaacaaggcggcccatggcaacggcttcaacgaagagtttgtatatagcgatgccgaactgcaattgatagacaaatatgccgatacgaccgatgaactgcataccgacctgcatgagtgtctgggacatggttccggcaaactgcttccgggcgtagaccccgatgcgctgaaggcttacggctctactatcgaagaggcgcgtgccgacctgttcggactgtattatgtggccgatccgaaactggtggaactggggctgactccgagtgcggatgcctacaaggcccaattctatacctatctgatgaacggcctgatgacacagcttgtgcgtatcgaaccgggaaacaacgtggaagaggcacatatgcgcaaccgccagctcatagcccgttgggtatatgaaaagggcgctgccgacaaagtggtggaactggtgaagaaggacggaaagacttatgtcgtaatcaatgattatgaaaaggtacgggaactgtttggcgaactgcttgccgaaatacagcgtatcaagtccacgggcgactatgacgcagcccgtgagctggtagagtcctatgccgtaaaagtagacccggaactgcacgcggaagtattggaacgttacaagaagctgaacctggctccgtataagggctttgtcaacccgaagtatgaggctgtgacggatgcggacggcaacataaccgatgtgaaggtgacttatgatgaagggtatgccgaacagatgctgcgttatagcaaggactactcggcattgccttcagtgaacgattgaatggtaatttagagattttattgttttcttttaggcacggattacacggatttcacggaaacggaaaaaaggataaagtaaatccgtgcattccgcgtaatccgtgcctaaaaaaatcatcaggtgcattttgacacacctcttttaagataaaaggctttttgcctcaggtgataaccggaactctcatttctgaaactaatggaactaaaagaacaactcaaagaaataaaaacccagctccgcctctccatgaatggggctgtgtctcaaagtatgcgtgagaaaggtttggtctacaaacttaacttcggcgtggaactgccccgtattaaaagtattgcttctgcttacgggaaagatcatgccttggcgcaggcactttggaaagaagatattcgcgaatgtaaaatattggcgggattgctccagcctgtcgacagcttcttgcccgaaatagcggacatatgggtggagaacatccggaacatcgagattgcggaacttacctgtatgaacctttttcagcatcttccgtatgctcctgcgaagtcttttcactggattgccgctgaagatgaatatatgcaggtctgcggtttccttaccattgcccggctgttaatgaaaaaaggtgatatgaacgaacgggtggagaatgaattccttgaccaggcaatatcggcgttcctctcaggctcttatcatgtgcgcaatgccgcgctgaccgctatccgccgtttcatgcagcacagcgaggaaaatgcgtttcaggtttgccgcagggtagaaggcatgggagattcctcttcggagacagaacggctgctttacaatctggtaaaggaagaggtagcgttatgataaaacggtaaagtgatagagtgccggctactttaccattctcatcattaatttttctttttttgtttgctttccgcaaaaaaggcttaactttgttggctgttaaaaaactgcgcctttaaatggaaagtcagaacgtgaaagatacggttagacagatattcaccgaatatctcaatatgaacgggcatcgcaagactcccgaacgctatgccatactcgacactatttattccatagacggccatttcgatgttgacacgctttattcgctgatggcagaccaagagaatttcagagtgagccgtgcgacgctgtacaacaccatcatattgcttatcaatgcccggctggttatcaagcatcagttcggaaattcctctcaatacgaaaaatgctataaccgtgatacgcatcatcaccaaatctgcacgcagtgcggcaaggttaccgaattccagaacgaggaattgcagcacgccattgagaataccagattgagccgctttaacttgacgcattattcgctgtacatgtacggcttgtgtagcaagtgcgaccgcgcaaacaaaagaaagaagaaaaataataaccataagaaagagaaatgaaagtagacattctattaggattacaatggggcgacgaaggcaaaggcaaagtcgttgatgtattaactccgagatacgatgtagtggcacgttttcaaggcggcccgaacgccggccatacattggagtttgaaggtcagaaatatgtgctccgttccattccttcgggaatcttccagggtgataaggtgaatatcatcggtaacggtgtagtgctcgacccggcgctgttcaaggcggaagcggaagcattggaagcatccggtcataatttgaaggaacgcttgcatatttccaagaaagcacacctcatcctgcccacgcaccgcattctggatgctgcctatgaagctgcaaaaggagatgccaaagtgggaactaccggcaagggcatcggtcctacctatacagacaagattagccgcaacggtgtacgtgtaggtgatatcctgcacgatttcgacaagaagtatgctgctgccaaagcccgtcacgaacaaatcctgaaaggcttgaattacgaatatgatttgagcgaactggaaaaggcatggttcaagggtatcgaatacctgaagcagttcaagtttgtggacagcgaacatgaaataaacggtctgctgtcggacggcaagtctgttttgtgcgaaggtgcgcaaggtacgatgctcgatattgatttcggttcttatccgtttgtcacttcttccaataccatttgtgcaggagcctgcacgggcttgggcatagctcccaataagattggcgaagtgtacggtatcttcaaggcatattgtacgcgtgtgggtgcgggtccgttcccgacggaactgttcgacaagaccggtgaccagatttgtacgctgggacatgaattcggttcggtaaccggacgtaagcgccgttgcggatggattgacctggtagccttgaaatatgccattatggtagacggcgtaaccaagctcatcatgatgaagagcgatgtactcgactcattcgaaacaatcaaagcctgtgtggcatataaggtcaacggtgaggaaatcgattacttcccgttcgatatcgaaggcgtggaaccggtgtacgtggaattgcccggctggcagacggatatgacaaagatgcagagcgaagacgaattccccgaagaattcaatgcttatctgtcgttcctggaagaacagctcggtgtgcctgtgaagattgtatctgtaggtcccgaccgcgaacaaaccatcgaacgctatacggaggaataacatagattgacaaatagacaaccttacgtacgggttacgcgaattttgtggcttcgataacggactgtataaattcgggtaacccgtactttttttatttattaccatgaaaacacgtattatctctttattgcttctgctctctctctgctcttccgggaggtcgcaaccttatcagcctacggcagaaaacttacagtcgcgccaggagttcagggacagcaaattcggcattttcctccattgggggctgtactgcatgttggcaaccggagaatggaccatgaccaataataacctgaattataaagaatatgccaaattggcgggcggattttatccttccaggttcaatgcagccaagtgggtggcggctatcaaggcttccggagcaaaatatatttgtttcacttcgcggcatcacgagggcttttccatgtttcatacccgttattccgattataatattgtggacgccactcctttcaggcgggatgtactgaaagaattggcggatgaatgtcataagcaggggattcgcctgcatctgtattattcacatatagactggtatcgagaggatgctccgcaggggcgtacggggcgtggaaccgggcgtccggatccttcgggagactggaacagctattacgcttttatgaataaccagttgacggagttgctgaccggttacgggaaaataggcgcaatatggttcgacggctggtgggatcaggaccggaatcccggttttgattggcagttacccggacaatatgcgttgatacaccgcctgcaacctgcctgtctgattggtaataatcatcaccggacacctttcgagggagaagatatacagatttttgagcgtgatttgcccggtgagaataaggcgggactttccggacaaggtgtcagtaacttgccattggaaacgtgcgagacaatgaatggcatgtggggatataagattacagaccaaaactataagccggcaaaaactttgattcactatctggtgaaagcagccggtaaggatgccaatctcctgatgaatataggtccgcagcccgatggcgaactgccggctgttgccatggagcgactggtagagatgggagagtggatgaaagtgtacggtgaaactatttacggaacacgtggcggctgtgtggctcctcacccttggggagtgacaacgcagaagggaaataagctgtatgtgcatattctggatttgcaggataaagcgcttttcctgcctttggatggaaagcgcgtgaagaaggctgtaggttataccgaccgccagccgctgaaaatacagaaatgccgggatggtgtcatgctttatctttccgaagtcccgacagatattgacaaagtcatcgaactgcacctggaagagtagcctgctgccggtgaattgctaaaactgtaaccgttatgtcggtaaatctttaattcttcctaaaagatagggagaaccgggagatagctcgcagtttccctttatttttggcagacaatttgttatacaaacagaaacgacacattattcatttatttattattaaaagaagaaaattatgggaacaggaatgataggcatgcaatggattatctttatcggggtggctgtggtcagttggctggtacagatgaacctgcagagtaaattcaagaaatattctaaaatccccaccggcaacggaatgacgggagccgatgtggctttgaagatgctgcacgataacggcatctacgatgtaaccgtaacacatactccgggacacttgacagaccattacaaccctgccaataagaccgtaaaccttagcgaaagcgtttataacagcaacagcattatggcagcagccgttgccgcccatgagtgcggacatgccgtgcagcatgcacgcgcctatgcaccgcttacgatgcgcagcaagctggtgcctgtggtttcgttcgcttccaacattatgacgtgggtactgttgggtggtatcctgatgctgaacacttttccgcagttgctgctggcaggtatcatcctgtttgccatgactacactgttcagcttcatcacccttccggtggaaatcaatgcgagcaagcgtgcattggtatggttgagcagttccggcattacgaatgcccgcaatcatacacaggcggaagacgcgcttcgttcggcggcttatacgtatgtggtagctgcgctcggttcattggcaacgcttgtttactacataatgatattcatgggacgcagagaataagaacgttctgttccgtagaaatagaaaaatgctttcttcatgctaaatggagaaagcattttttttcttaatcaataaaataccgtaactttgtcatctgattttataaatgattgatacgattatggcagcaaaaccaagtattcccaaaggaacccgcgatttttcgcccgtagaaatggcgaagcgtaactatatattcaatacgattcgtgatgtttatcatctttatggtttccagcagatagagactccttccatggaaatgctttccaccttaatggggaagtatggtgaagaaggcgataaactgttgttcaagatacagaattcgggtgattacttttccggtctgacagacgaggaactgttgagccgtaatgccgcgaagctcgcaagcaagttttgtgagaaaggtctgcgctatgaccttaccgtaccttttgcccgttatgtcgtgatgcacagggatgaaatcacgttccctttcaagcgttaccagattcagccagtgtggcgtgccgaccgtccgcagaaggggcgttatcgtgagttctatcaatgcgatgccgatgtggtgggcagcgactccttgctgaatgaagtggaactgatgcagatagtcgataccgtatttacgcgcttcggcatccgtgtatgcattaaaatcaacaaccgcaagatattgagcggcattgccgagattatcggtgagtccgataagatagtggacattaccgtagcgattgacaaactggacaagatagggctggacaatgtcaacgctgaactgaaagagaagggtatcagtgatgaggctgttgccaagttgcagcctatcattttgttgagcggtagtaacgaagagaaactcgctacactgaagcaggtgctttctgccagcgaagagggcttgaagggtgtggaagagagtgagtttatcttgaatacgctttccgcgcttggtttgaagaacgaaatcgagcttgacctgacgctggctcgcggcttgaactattatacgggtgctatttttgaagtaaaggcactggatgtgcagattggcagcattaccggtggtggtcgttatgacaacttgaccggtgtattcggcatggcaggtgtttcgggagtaggcatttcgtttggtgcagaccgcatattcgatgtgctgaaccagcttgaactttatccgaaagaagcggtgaacggtacgcagcttctgtttatcaatttcggtgagaaagaagccgccttctctatgaatgtgcttacccaggtacgtgcggcaggtatccgtgctgaaatctttcccgattccagcaagatgaagaagcagatgggttatgccaactccaagatgattccgtttgttgctttggtgggagaaaacgagatgaatgagggcaaggtaaccttgaagaatatggagacgggagagcagaaattgattacccccgaagagctggttagcgaactgagttaataaaaactgaaatactattaaaaaggagcctgtttgtgctccttttttcgtatatttgttacgcaggtgttgcaggaatgtaatattcggctcttacctttgcagtgacaataaaagaggaggtttgtatggtttccgttcaatttaaacaagaaaagcataatgcgctggtcagtttcctgatgattgtcatagcggtgttgtttttgctttatatgggcagctcgctggtgaactctacccggactttttgggaaaactattccatagagaatttattggaatgacattctgtaggcagggaacagaaagtcgggttctatccgttttttgcaatatttattcatatcgggaataaataaagacagtcggtttattgcaattggctgtctttttgtatatttgtgagtccgtgttccaaacttttaatacggacatgttttgttaaccatatcatcaactaaaaacaaccagaatcatggaacaagatttctcaatgcatgccaatccgttggtggccaagcttcaaaaaccggcttccgaatttacaaaagccgacatcgtttcttatataaaggagaatggaatcactatggtgaacttcatgtatcctgctgccgacgggcggttgaaaactttgaactttgtcattaacgatgccgcatatctcgatgcgatacttacgtgcggggagcgtgtggacggttccagcctgtttcctttcattgaagcgggcagcagcgatttatatgtaataccccgcttctgtacggcttttatagatccgtttgccgagcagcctacgctttccatgctctgctctttcttcaataaagacggcgaaccgctggaaagttctcccgaacacactctgcgcaaggcgtgccgggcatttacggaagtaaccggtatggagtttcaggccatgggcgaattggagtattacgtcatttcggaagacagcggcatgttcccggctaccgaccagcgtggttatcacgagtctgctccgtatgccaagttcaatgaattccgtaccgagtgtatggcgtacatcgcacaagccggcggacaaattaagtacgggcattccgaagtgggtaacttcacccttgacggcaagatatacgagcagaacgaaatcgaatttctgccggtacgtgccgagcaggcagccgaccagttgatgattgccaaatggattatccgtaaccttgcttaccagtatggatacgacatcactttcgctccgaaaataacggcaggaaaggccggttccggattgcatattcacatgcgcatcatgaaggacggaaagaatcagatgctgaaagacggcgtactttccgaaacggcccgcaaggcgattgcgggaatgatggagctggctccttccattaccgcattcggcaatacgaatcctacttcttatttccgccttgttcctcatcaggaagcgcctaccaatatctgctggggcgaccgcaaccgttccgtattggtacgtgtgccgttgggatggtcggcaaagaccgatatgtgcatgattgccaatcctctggaagcgccgagcaattacgacaccactcaaaagcagacggtagagatgcgttcaccggacggttcagccgatttgtaccaactgattgcaggactggcagtagcttgccgctgcggttttgagatgccggatgctttggaaattgcggataagacttatgtgaatgtaaatatccacaagaaagaaaacgaagacaaactgaaacaactggctcagttgcccgacagttgtgtcgcttctgccgattgtctggaaaaacagcgtgccgctttcgagaaatacaatgtcttcagtcctgccatgattgacggaattatcagtaagttgcgtgcttatgaggataggactttgcgtagcgaagtgcaggatagtccggaagagatgctgaaactggttgagaagtatttccattgcgggtaacggacagaacagatattatagtaaagaactccttgccggacggttgccggtgaggagttcttgttttatagccggtcacctttgccattttgtcagcatttatctgccaaacgaacagctttgccttttggcacggttttcgtaagttctttatcgcttgtataaagcaacattaccattataataaattgtataacatataaaacaaaagaaactatgaacattaaaccattagcagacagagtgctgatactccctgcacctgcagaagaaaagacaatcggcggtatcattattcctgatacggcaaaagaaaaacctttgaaaggtgaagttatcgcagtaggcaacggaactaaggacgaagaaatggtgttgaaggttggtgatacggtactgtatggtaaatatgccggtacggaactggaagtggaaggaaccaagtacctcatcatgcgtcaaagcgacgtactcgctgttttgggataatcaatttataaatagtaaacctgataaatagtaaaaacattatggcaaaagaaatattattcaatatcgatgcccgcgaccaactgaagaaaggtatcgatacactggcaaatgcagtaaaagtaacgctcggcccgaaaggacgtaacgtaatcatcgaaaagaagttcggcgctccccacatcacaaaggacggtgtaacagtagccaaagaagtggaactggccgatgcttaccagaataccggtgcacaactggttaaggaagttgcttccaagacaggtgacgatgctggtgatggtacaactaccgctaccgtattggctcaggctatcgtagccgaaggcttgaagaacgtaactgccggtgcaagcccgatggatatcaaacgcggtatcgacaaggctgttgccaaagtggttgagtctatcaagagccaggccgagatggtaggtgacaactatgataagattgaacaggtaggtacggtatctgccaacaacgacccggttatcggtaagctgattgcagacgctatgcgtaaggtttccaaagacggtgttatcactatcgaagaggctaagggtaccgataccactatcggtgtagtagaaggtatgcagttcgaccgcggttatctttctgcttatttcgttaccaacactgaaaagatggaatgcgaaatggagaaaccgtacatcctgatttacgataagaagatttccaacctgaaagatttcctgcctatcctcgaaccggctgtacagactggccgtcctctgttggtaattgcagaagatgtggatagcgaggctctgactacattggttgtgaaccgtctgcgttctcagttgaagatatgtgctgtgaaggctccgggcttcggcgaccgccgcaaggaaatgctggaagacattgccgtattgacaggcggtgttgtaatcagcgaagaaaaaggcttgaaactggaacaggctactatcgaaatgttgggtactgccgacaaggtaactgtttctaaagacaatacgactatcgtgaacggtgccggtgcaaaagaaaacatcaaggagcgttgcgaacaaatcaaggctcagattgcttctaccaagtccgactatgacaaggagaaattgcaggaacgtcttgccaagttgtcaggcggtgtggctgttctttacgtaggtgctgcttccgaagtggaaatgaaagagaagaaagaccgtgtagacgatgctctccgcgctactcgtgccgctatcgaagaaggtatcgtagcaggtggcggtgtggcttacatccgtgcgctcgaagcattggaaggtttgaagggtgacaatgccgacgaaactaccggtatcgacatcatcaaacgtgccatcgaagagcctttgcgccagattgtagccaacgccggtaaggaaggtgctgttgtggtacagaaagttcgtgaaggcaaagccgacttcggttacaatgcacgtaccgatgtttacgaaaacctgcacgctgccggtgtggtagaccctgcaaaggttactcgtgtggctctggaaaatgccgcttctatcgcaggtatgttccttactaccgaatgtgtgattgtcgagaagaaagaagataagcccgaaatgccgatgggtgctcccggaatgggcggtatgggcggaatgatgtaatatcgttttcccttgatttcttaatcatataaattgaccgcgatgtcttgcataaaggcgtcgcggtttttttatgttggataatattgtttcctttgcatattcatttcgataataaaacagaaaagaccatgagaagttttgcttcagataataattcgggggtgcatcctttggtaatggaagcgctgagtagggccaaccgggaccatgcagtgggatatggtgatgatgtatggacggaagaggctgtccgcaaaatcagggaagcttttactccggattgcgaaccgttgtttgtattcaatggaaccggcagcaatgctgttgccttacagttatgcacgcgtccttataattcggtaatatgtgcggaaactgcgcatatttatgtagatgaatgcggcgctcctgcccgcatgacaggctgtcagattcgtccggttgccactcccgacggaaagctgactcctgagttggtacgtccttatctttgtcatttcggcgagcagcatcattcccagccgggagctttttatatctcgcaatgtacggagctgggcactgtctaccggcccgatgaaatccgtgcgttgacggaactggcacaccggcacggcatgtacgtccatatggacggcgcccgtgtggcaaatgcctgtgcggcccttaaccttagcttcaggcagttgacggtagattgcggcattgatattcttagttttggcggaacgaaaaacgggttgatgcttggcgaaagtgtaattatctttaatccggctttaaagaaagaggcttgttttgtacgcaagcagtcggcgcagctcgcatcgaaactccgttacctgtcctgtcagtttactgcttatctcacggacgacctttggttgaagaacgcttcacacgccaatcgtatggcgcagcttttatatgctggattgaaagagctgcccggagtacgttttatgcagaaagtggaaagtaaccaactgttcctgacaatgccccgtccggtaattgacaacttgttgaaagactacttcttctacttctggaatgaagaagagaatgagatacgtttcgttacctcttttgacactacggaacaggatatagaagaactgctacacgccattagacgttattgtcattaagcggtattcatgttttgccatataaaaaaagcccccgaaccttcacaggcaaggggcttgatttagacctttccctctttttagggggtgagggaaaggcttactgaaaacaaacagatttactttaccttaaaatacctttgattgataaccttttaactaaccttctttataatgctgaatttgtcttaatacctattgcttcgagtatgggggtaaaggtataacctttacgtttcaatgtttttatcaatttatccaaatagctgttgtaaaatttatccgtacggcggttgtctgttccgaagtgtatcagcatcaaatgtccgttcaggccctctttcttctctacttccatgattttgttgtagatgaacttgctgctccggtatttctgtcccatatcgggggtggtataatctgcattgctcatggttccgggagtatagttgacaacttgtattcccatattttttgcccaggcggctatctccttgttataatattcatagggcggaatgtatatcggggcgtctttatattcaataccggccttgcgcatggtttcgtagcttttcagcatgtccttttcaaattcctcgcgggtaaccaataaggaatcgcggttctcccacggcatatagagcagatgtccgtagctatggctgcctaccagatgtccttcatcgagcagtcgttttactatttcggggtaaagctcgtaaaattcgccggtaaagaagaagcttcctttgataccgtgccttttcagggtgctgataatggcatccgcgccgtcagccttatcggctgctgtgaatacgaggctgatttgttttttagacgggtcggtacgcacgataccgccattgacgtatacatttttgtctgccgatgcacctgcctgtttcatgccttctttctgcatggcagagagataataggtgaggcaggcggttccgtccatggtcggttcattggtggaatagtcgtggagtgcatcgtggtataccatcagctccggttgaaagcgttcgtaatcctgtccgggcgtaccgggaatgccggtcatgtttacccctcgcagtccctcgaatatgctgcggtatacggggccgtctaccagtccgcctgtcgtattgcctacgcctgcattgagcagggaggagtggggttgcgaaggataatcgccgtaaagcggcagttccacaatcatgcttgttccccacggattgcagccgaacagccagtcgcggagggctgcttccatttcggcataagtctcatcgccggttgtctcgcggtagagacggcattgcgtcaacatggcagtagtcaggttgttggaacaccagatgtagggaataccgtgcaggaaaggactttcgactgctttctcgtatgtgcgctcaataccggtgcgcatgttgcggataaactctttactgatgcgcgggttgtttacagtggccaggtggtagtgtcccatgttcatgaacggataccattggtaatggcgggcgctgtcggcacccatccacggagtgatgggttcgcggcgtccgtattcgagggcttgcgacaggtattccggcttgccggtagcgtggtatagctccatggctccgagctccatatcgtccgtccagttgtcttcttcatagatgtagggtgattttacggaggcggtctggcatgttcccggcttctttacaccttcctgataggcggcatcggctttttcaccgatttcagcggcaaattcggggtaaaactctttcagtatcctggctcccagtgcaaaacaagcggcaaacttgccggctgtacttgctacgccggtggtggcattggtgaattttccgcgcacttgcggctctccgctgcaaaagtaaacggggcgtcctttgcccggtccgtagccataatccacctcatctttattgggcaggcgcatgccggcgtggtcgcggtcgtcggcaatctggttgtacagttcgcccggagcgggattcatgcggttcagccagtccagcccccattttatttcgtctactatatcggggatgccgtttgcttccggcagtccggctgcattgtaggcatcaccgaatgcctcggggttttcctggtaggcaaacatcatttggtatatggcattggcggaagtcgtggtatattgcaggtagtcggtagcatcgtgccagccgccgcgcacatcgatgtgttgcccggtttttgtggggtggtacactatgtagccgtcgtgtacgtggcaactgtctttcaagaaagggttgtaaccgcaacgttgctggcgcatgtagttcagcaggaagtcggctgtgccgttatatacctgcgcattgatagggaagcgtggagaaactgcttttcccgctttcaggtaatatgtgcccggttcttgaaaattactgaaatccaaccggtaagtactgctcatgctgcctgattggccggtggctttgggcgaagtaaaagtgcgtaccgtttttccggtaaaagcatcgaccagtgcgtattcttgtacgtcggtttttgtttcgctcatgaataccgctactttaatggattgcggcagatagcccagttggttgattctaatccattcgtctgccttacacgggagtgcggcaaatgcaaaaatcagtgttaagagccgataataacgtttcataaaatgcttttcatttaaggttgtgggggtactatgtaacaaaaggttttacctaagtgcaaataaagcggtttctatcaattttaggaagatttggtgtaaattattagatgatattatttttcatttacaatattttagaatgagacaaaaagtatggcattagtcgttttgtcaataaactcttgcttgccatatgtttatgtgatattgaatatctttttagctttcgtttacgcattttaatttcttaaaaacaatgttggtatgttatttgttctatccattttagaatacaaaacttataaactatggcttacattgattattatcaagtccttggagtagacaaaacggcatctcaggatgacatcaagaaggcgttccgtaagttggcgcgcaaatatcatcccgacctgaatccgaatgacgctactgccaaagacaagtttcaggctatcaacgaggccaatgaggtgcttagtgatcctgagaaaagaaagaagtatgatgaatatggcgaacactggaagcatgccgatgaatttgaggctcagaagcgggcacggcaacaggccggtgcaggaggtttcggcggcttcggcggtgcaggcttcggtggtcagggcggtgccggtttcggtacggacgggagcggtacatactggtactcttccgacgggcaggagttttccggagacagtgcaggcggcttctccgatttctttgaacagatgttcggacaccgtacacgcggcggtggcggggcgaatgcaggttttcgcggacaggatttccatgccgatttgaacctgtcgcttcgggatgccgcccggactcataagcagatattgacggtgaacggcaagaatgtccgcatcaccattcccgccggtgtggcgaacggccaggtcattaaactgaaaggctatggcggcgagggtatcaacggcgggcctgcgggcgacctgtacattactttcgtgatagcggaagatcccgtcttcaaacgcttgggcgatgatttgtatgtagatgtggacatcgacctctatacagcattgctgggtggcgagaagttggtggatacattggaaggtcaggtgaaactgaaagtaaaacccgaaacgcagaacggtacgaaagtccgtctgaaagggaagggttttccggtatacaagaaagaaggccagtccggtgacttgattgtgacttattccgtaaagttgccggtgaatctgacggaacagcagaaagaaatgttccgtaaaattcaaagtatgaactaaaaaggagaacgagttatgcagaacgaattaattatagtcagtgagtattgcgacaagtgtcacatagagccctcgttcattgagatgttacaggaaatcggtctgatagatatctggacggaaggcggggagcgctgtttgcagtttgcccagttgccggatgtggaacgttacagccgtatgtattacgacctgtccatcaacattgaaggtattgatgccattcatcatttgctgaagcgtatggaaagtatgcagcaggagatttattctttacatagcaggttgaggctgtttgaggatgtgtcaagatgattttgtactttctttcaggcatagattatacggatttcattatttctgtttataaaaaacatgaaatccgtatagtttgtgcctgaagatttattatcatgtaaacactcgcgtacatttatcaagttgtatgttatgttggatgattactgctaaacagcaagtgtatattccagcatatatttgcatttggacggcattttcggttgttctcagaatcctttgtatgatctttacacataaggattttacttgtttttgtcggaaaaatatcaaattataatagtagtatgtttagtttgttcaaaaaataatatatattagcctgataaaatatcttttacgtggtattataggcaagaacattctcaaagcaataatttaaagtaatggatttgtggttctgcttgcaaagtttagtcttttttgtctatatatccaaaacggactaaacttgtttctattgacggcaatttatatatgtgctggcgaaaagaaaaacagtattcttcttttcgccagcattacttttatgataggttagtaatttgaggaagcaatgaacgcttttgaaagaaaggtaaaaataataaaagaattgattcgcttcaataaaaatccagtttttttcatatcggacattatacctttgttgtttcgggtgtattaaaaggcgtgccataagaaactttacaaaagtattaggacacaaaatcaatcttttctatgcagatatatgctgaactgattaacccaaaggtcggagaagatacggacaaaattttcgataagattagtttcatatatcgcttagctaattagaaatgtattctacatagagatacacttggcacaaaaaacatcgtaagatatataacttgatgcaatcctttccgcacagccatgcaagcgtcggaacaaacaggcgggatatttgacgtaacttgtgcaccgcttatcaacctgtggggatttggctttacaaagtttgacagcatcactccgcaactcgtagacagtatccgccactttgtaggcttccgaaaagtgcatttacagggcaaccgtgtgatgaaagacgatccccgcattctgctcaatttctcggtgctcggcggcggtactatctgtaacataatcgcgtgtttgttcgaccgcaaaggcatatcgaactatatgatagacatcggcggcgaaatgatagcgaaaggaaagaacccgcaagggtggaattggtgcattggcattgtcagaccgaaggatgacagtactggaacaaactccgagcttgaacaaattgtgcaactgtcggaacggctgggactcgcaacttccggcaactaccgtaatttctatctgaaagatggaaggaaatacgctcatgccatcaatccgataacaggatatccggttcaaaaggatatattgagtgctacaattattgcccatcagtgcatgcttgctgatgcctatgcaacggcctttatgacgttggggagccgcaaagcccgtcagttgtagaaagagcatcaggaaattgacaatttcattatctatacggacagttgcggaaactaccggacagagtactcgccgcgaatgaaaaggtatctggcagattaatgttttctatattcctgcggagtagagctggtgaaccgtttaaagaattgggtgaagaacgccgtattttcaaatcccagcgaatgggccatctcctttacgaacatatacgcaattacttcggcgtgaaagtgacaaagggagtcgctttccagtttatggtgaacaacctgttgagcaaggagtgcggctatcgttcgataacattcatggtgaaattggatattactttctaacagtagaaggataataaccaggagccgtaatggagagattactttcgttacgactcctttcgcatgccgtctgcatgattttaacgtctcaactctcttattcacagtcgttagaccatgtgtagccatgtgtatcgcattccacatcattgtagaaaaaatgcccatcagacatttgcattatgcaatatgaataattcataagagtctgttttacagcaatatgataaatatccatttatttggcacggtgattgtctattctttagcgtaagacgataagatgtttaacaatttaataattagcattatgaaaaaggtattgtttgcagtagcactggtaatgggattaggtagttcagtagcattcgctaacaacatggcatcagatgttgaaatcgttgcaatggtgaacgagtttaaaccgattgatataaaggaactcccgcaggcagttcaggacgccatcaagaaagactatgctgaatccaccattaaggaagcagccgtagaagtggcagaagatggcgtaaagacttataaagtaactttggttgatgccgtcggaaccgaaagcgttgtgtttttcaacgaaaaaggtgaaatgctgaaataattctgaatggttatttaggataacagttacatttgcacataaaataaacaaggctgtctcaaataaactttgggatggccttttttgtgtctgcaaaaaatcgggtaagccctaaattcgctcagccagaacttgcccatctccctaattttttgtatcttagggcatcaagtaagatatcccaaagataatgtttaaaagttacacatccaacgataatctgcttttacctccatgtttaggcgattttattccccggaacgatccggtccgggttgttcactgcatcattgaacagataaaccttgaagcactttaccgtaagtattcccctaaaggctgttctgcgtaccacccacgcatgatgcttcagattcttgtctatgcatttgcgtaatatctattccagccgtcgcatagaagagttctgtcgtaatgacatacgcttcatgtggcttaccggcaatgtaactcctgaccataataccatcaaccgtttccgcagcagccggctaaaggatgtgctgaagacgatatttgcaaccattgtaaagtttctcgtggcggaaggttttgtaagtctggatgtggcctgtaccgacgggacgaagatggaggtgaacgccaaccgttatacgttcgtctggggggcaaatctatacatacccgcatatccagaatcgcggaacagcttgaggagatatggcaatacgccgactccctcaccaagcaggaactgcgtgactccgctccggttgcctatcaggatatcaccccggagaaagtggaaaaggcactcgggcagatagatgatgccctgaatggagtggatgctgacaagaagatgaaagcgaaggtaagacgtgtaaggaagtcatggcttgaacagctcaagaaatatgaatcgcagggaaagatacttgacggacgtaacagctactcaaagacagacaatgatgctactttcatgcgcatgaaagatgaccatatgaagaacagacaactcaaacccggatacaatccccagttcagtaccaataaacagttcattctgaactataccatccatcagtgttgggcgatacctccacctatcctctgcatatggatgatttccattccctctacggcagataccctgacgtgtctgtctgtgatgccggatacggaagtgaagagaactatctgtatgctttcagacatggcattgaaacctttataaagtacaattattttcataacgaagaaaccgacggcatgtattgtcctatgggacagagaatggaaagactctccgatgcaaggcgggtaacaaacaacggttttgtgcagaccatatcaagatacaaggcacgtaactataagggctgcccgttaagatgccggtgctacagaagccgctcggaaaggattgtacaggtaaatcaccgtctgaggaaaatcaaggaaagagaacgtgaaaagctactctctgatgaaggtctgaaatatcgcagtcagcgaccacaggatgtggaagccgtatttggaaacctcaagaacaacaagcacttcaagaggttccatcttcgtggatttaagaaggttgaaattgagttcgccctgctagccatagcatataatcttgcaaaagtagcctcttaggaggcttatggcaacgaaaaagcagtttgaaaggatgaaatcttcaaaagtaagtttgtaaacacctcttttgagacgcctctccttttttagtaaatttgtatctgtctaatttttaagcccctatatccatactcaatctaaccaaacatcgcatgaagtggtactgcttcatccaaatgcaactgataggcacgttcgtacattattttgtgcttgattgtatcgttatatccattgcagccattatctgtagtccatttgtatccatgacccattacagacaggcgttgttcagtatgacttatttttcctccctggtgttttttatggagtatgcattgtgcattttgcggcaccggccaaatatccggatagaggtataaaccgtgcacgatggaaatatattttttcattctacggtttgtggactccgtgaccattttcccttatatgttaacctatatgtattgggatacgaatattgtccatgccattatcctcctttacatttttattattgtcaaatagataagatactcacggaagagtgggttatggcctatactgcctgcggcatcatggtctgtttttctgcttgtactatatagagcttaatgtacagcttgaggatttcaaaaaaattgtgacgggctttggcaggcagtaattctaagacttttaatgaagaaaaattaagccaccccttaaaaaaggagatatttcctttgaaagaattcatttcttttattacatttgtattagtcttttaaaaatagaagatttatagtaaagcgttaaggcattatccaagttcaggaaatccccaatttcgaaacaacaattggataatacattggacgctccacgtactatttatatagatttttgttatatataggcgtggggctttgtgtattatatgttgttgagtatggggatacttctgaacggtaataccaaagttcccacgcttaactttatataaacacaactccagggaacagggttagcttattataaacattatgaaagcaacttgttttaaaagcgagacaactgtctccaacgacttcccccccttcgtttgttactgtcttttgtggaatattctatcctttcatttccatcctgtctctttcgggacataccgttcattatcatacaaattacatgccaagacacttttctgccttctatggtactagataatagtaactccccctgtcacacagaggaagaactttggttgcaggtactttctctatcaagagagttgcaggactgtaaagctagtctgtaccataatactttggactgtatttccgataagattgaaggaatagaaagagaactggatatcttattggatattctgcaaggaagacaagacaaaaagacaccatagcactatttttttgtgacaatttgtctatgcggataagtatcctattatttaagcctcgtttaagaattccgttttatgggttacccacaatcgaatggaatttttatatacagggaataacacataatattagtaatggattttcaatattcagagtgataatggataaacgaatagaaaacgccatgaatgagttgatcaatacagaaatatggtcaaccggtttatacctgtcattgcaggtctattttgaagatgaacggcttccaatacttagctcctggctaaactcccaagcacaggacaatatgaacaaggtttatcagatgatgaatcggatatgccatgatggaggatgtgttgcaatcaatgaaatgaaacgggatacacatgaatggacaacgccattgaatgccctgaatgaattgcttgaacacgagcagtacatatcatgtcaggtaaacacatttctcatattatgccggaatgtgaacatgtccttccattctttcatcagcgggctgtatgcagaccgtatatatgtaagtacggtatttatggaattattacgtatcctcgccaaggaaaacgaacggagactaccttatttttaacggtatggatttaagattgatattctgcaaaatttaatattgcagaatgctatctggtatgttttttgcgatataataatcgacaataaaatatatgtcatcatggatatatttgtatatataacattgtgtttcacttcgctattcaccttgatggacccgcttggagtgatgccggtattcctgcaaatgactgatggaatggatacgaaagaacgcagatgtatcgccttgaaagcatgtaccattgcatttatcatattagtcctttttacattatcgggcaggttcctgtttcattttttcggcatctcaacagacggattccggattgtgggaggtatcatcatctttaaaatcggatatgatatgttgcaggcacatttcacccatgtgaaactgaatgaaactgaacgaaaagaatattccaaagatataaccatcacacctcttgccattccgatgttatgcggtccgggagcgatttccagtggaataacattgatggaagatgcttcggaatatactttcaaaatagtattgcttggcgtaatcgctttggtctgcattctttcattctttattctgtgcgcgtccacccagcttttaaaaatcttgggagagacgggaaacaatgtaatgatgagactgatgggacttattctgatggtgatcgccgtggaatgttttatcagcgggatacgtccggtattaattgaaattttgaaacaagcccatgcttgttcttaaagaagagagataatttggatttattattaacattaaaagtttgattcgtcatgactgaaaaattgcaaaatgccctgaatgagcaaatcacagcagaattatggtctgccaacctgtatttatcgatgtctttttatctggaaagagagggcttttccggaatggctcgctggatgcagaaacaatctgcagaagagatcgggcatgcatatgccattgctgagtacatgattaagcgtgaggcaaccccgaaagtggacaaggtcgatgtggttccacaaggttggggtaaccctgttgaagtattcgaacatgttttggagcatgaaaaacatgtttccaaactgattgatgaattggtacaggtagcatccgaagagaaagaca

SEQ ID NO: 4086 - DNA, 59683 bp, Unknown
  gut microbiota DNA sequence
ccaagttcccggtggacttggaattttagagagaaaagagatacaacataccatttatgaacccttaaattgagaaatgcctatggaaaagtgaaaacacaagagtttgggtgattctatcctactcttattaatttctatcttaccatttttggaaaaaactatttttaattaacaaaatcatcaatcacttatgaatgaagattgcagaaaaagaggattgtctaataaaaagatcctcacggtagtagcaatcagcaccttgctattaagcagtggaaatgtgatagctactcagactaccattgacggttctttgagagtgacagaacagttgcaaactcaaatagtcaatggtttggttgtagatgtaaacggagaaccggttatcggagctagtgtggtagagaaaggtacgacaaatggtggaataactgatattaacggaaagtttacattgaatgtaaagccgggttcaaccttacaaatctctttcgttggctatcaaactcaagaggtaaaagcaaccaagacggtaaaggttgttttaaaagaggatagcgagttactttcggaagttgttgtggtgggctatggaactcaaaagaaagctaatttaacaggtgcagttgcaacagtcgacgtaaataaaacattggacagtcgtcctattgcggatatcggtcgtggacttcaaggctcagtgccgggtgttaatattacgattccaacgggagaaatcggttcggaccctttgattaaaattcgcggtcaaattggatccatttcgggaaataatactccgcttattttgttggataacgtggaaattccaagtattcagatggttaatcccaacgatgtccagtctatttccgtattgaaagatgcagcttcatcttctatttatggttcaaaagctgcgtttggcgttattttgataacaactaaatcgggagcgcaaacagataaatttgaagttagctattccaataacttttcttggcaagatcctgccaaaagcattgaaattggtggaattgaagccttgcagtacacattggatgctcaaataaacagaggagaaccgatgccggcgggtggcttttggcgtattagccccgaaagcctggagaaagccatagaatggcagaaacagtatggaggaaaggtaaaatggaatgatccggtagtatatggccgtgactggtattatgacggaaaagataaatatggatatagactctatgatgcggctaaagctatggtcaggaactgggctccgaccatgagccataatttatcggtaaatggtaaaagcggcaagaccagttataatataggattggggtatttggatcagagtggtatgtctaagactgccaagaaggacgacttcaaacgatataatgcatcggtcagtgtaacatcggaattgaataaatatcttacagtgagagccagttctatctattccgaccgtaataaacgttatccgggtattggtaatacttctgctgacccttggttgtatatgtatcgttggagcccattgtttccgatgggagtgacagaacatggcaatcctttgaaagagccgtcgtatgaaatggctgcatcaaatacagataatctgcaaaataaatattataacgttaacctgggttttacattgaatattacgaagaattgggatgttaaatttgattatacttacgacagacaaacttcggaaacaaattcgtctgtaacccaatacgaggccggtgctacatggtatgcgcctacggcgtggatagagaacggcagtcaggtctttgtcaatgaacaaggcgaaagagtagacacgggaggtatgccggcataccgtttccctgtagaaaaatattataacagttcgggtccgggagctagtcaggtcggctatcagaataaatcggtagataataatacgttcaatatttataccacctataacctgcaattgggagctgaaaaagagcatgcctttaagtttatggtgggtatgaacagggttaccagtaaatggagttcgcataaagggtggaaaacaaatcttattgatttgacaaacccgcaatttccattggcatccggtgaccagttcattgaaggagaccgcaattgggaagctcaattaggtttcttcggacgtctgaattattctttcgaagacagatatttcttagaagctaatatacgtagggatggttcatctaaatttccgaagaatttgcagtggcgttggttcccttctttttctgccggttgggtgtttaccaatgagagtttcatgaaaccggttgaaaatattttgagctttggtaagtttagggcttcatggggtagtattggcgatcagacggtatccaataccttgtacaaagccatattggctgacggccaatcgtcatggctggacggaagcggtaataagatgcctttgtacggtactccttcgttagtggacagtgatatcagttggcaagagattgagactttggattttggagtagacctgcgtttctttaagaataaattcggagtaactttcgattggtatcgtcgggatacgaaaaacatgattattgaaggagaaagcttgccggtgacacttggtgctacagctcctaaaggtaattacggtagtttgagaaccaaaggttgggagttgtcggctgattttacccatcgtttttccaatggattgggaattaatgttatggcttctatttccgatgcaactacctatataaccaaaggagcggattatctgactccatgggaagaccgtaaattagggacaacctattctaccggaagacgatatggcgatatttatggttttgtgacagatagattgtttcaaaaagaggactttgtttacggagcagacggacaaatagaaaaaattactgtcatttataacggaacagcgcatactaccaataaacaatcttccccatatccggtgtatcaggtacattatgaagacaataacaaattgatttttgcaccgggtgacgttaaattcgtggatttggacggagacggttatatcacgccgggaacaggtacgaatggtaatcccggtgaccagactgtgattggcaattctactcctcgctatgagtatagcttccgtttgggagcggattataaggggattgatttttcaatcttcttccaaggcatcggcaagcgtcagatttggggtagcggtcagttggctattcccggatataatgccaaagagggtgctcttcccaaaaccttcacaaccgattattggacagaagagcgtacggatgcattttatccgagagcatggaatttgggtggaagcaatactggtttcagtatgcagaaacagtcacgctatttgctggatatgtcttacctgagaatcaagaatataacgttgggatatactttcccggagaatcttctttcaaaagtgtatatatccaaggccagactctatatgtcattagagaacttctttacatttgacaagctgaacggattgcctatcgacccggaggctatctcaggttattcgatgttcaggtctgactcaaactataacttgggacgtacgggtatgggcacacctgttttcaagactttatcatgtggcgttcaattaaccttctaaaaaagagtaattatgagatttaaaatatatatgattttaaccggaatcatcttcctgtttacgaattgtaatgatgtgctggaccgtccttcattgactacatcggaagatgatgcttactggaccagtgaggatagggtacgtttgtatgccaatgccttttataccaacttctttgtaggatatggattgaagtatgaaacgacgtatgctcctaatgcaaattatacttttaatgatgatgcagtgagattgtccacccaaacgcagtttggacggactgtccctacatcaaaaggctcaacgagtctggatatgatgtggcagagcgaatttaccggtccgacatggaattttgcttggataaggaaggcgaatgtcatgcttgatcgtgtgtctgccagaatgaaggatattctgaccgaagaacaatacaatcattggatgggaataggccgtttcttcagaggaatggagtatgctcgtctggtcaatgtttttggtgatgtcccttattacgatacagaggtgttgaatacggataaggatgccttgtataaggatcgtactccgagaaatgaagtgatggatgccgtttatgatgattttgattttgccatgaagaatgtccgtttggatgacggggatgcacaatatgtgaaccgttatgtggtggctgcttttgtttcgagatgggcattgtttgaagcaagttggcaaaaatattattataagaatgatgaacgtgcgaagaaattttttgagcaggctattactgcggctgacttggtaatgagcagtggaaaatatgatattgtgactgatttccgctctttattcgggtcgacgaaaagtacgaaagactgtatcctgtatcgtacctatgatgcggataagggtgtgactcattccatagcatcgacttgtaacatgaatgaccctaccgatgtcggcccgaatttggatttgattaaggcgtttatctgtacggatggtaaggactggcaaacttctgcagttgccaacgcagccgattttactttaagtaacctgataaagacaagagatgccagatttgaggcaagtttttacaataagccgactcccagagctaaaagctgttatttgtatgtaactaagtttatccctcggagtgcattggagtatattgaaaaaggtggttctccggctccggaattccagggtgaaaagaatgtgactggctatccggtaatccgctatgctgaagttttattgaattggattgaggctaaagcggaacttgctacattgggagggccggcggttatccagactgatatagatgagtctattaacaagatccgtaacagaccgattgccgaggaagcaaaagcgttgggtgttgtcaagacagcagacatgaaattagatgctctgcctgatgatccgggtagagatgtcacggtatctccgttactttgggaaatcagacgggaaagaagaatggaatttgcttttgaattctcacgtatcgtcgatttgagacgttggaaaaaattggagtacatggataccgatagaaatcaggatttgctggtaggtacttgggtaaatttcaaggatgaggttcccgaagaactgaaatcagagaatagcaggaaaatcagggttatgggcaaggatggaagtctgaccgtttatgatggcactaatgctgctgctatgaaaggatttttctatccggaacagaataaaggacgactgcccttcttgaatgtgcctaatgtaaacccatatctctcacctatcggaattaatcaaattgaagattataagagtagagggtatacacttactcaaacggagggatggccggcaagtttgaattgacggatacatccgtgagttaacaatggtttttaattaaaacatgagattatgtataaattaataaaaagtttaggatttatggctgtattgcttggtattagtcttgtctcttgtgaggaggattatcctaaaagccatatagcaccttatgatacggagcttttagcaataaagatagttaatgccggggcagacgggaaaacagtggtggaaggaacaattgatgaagccaataagacaattaattttccccgtttggatgttgagactaatttttcagctttgagctttgaggcggaactttctgagggcgcggagcttcaaactccggtcatggatttctcaatggatgaggaaacttccgacaagactttgatactgcggattgtaaataataagaggtataaggaatattttgttaaagtccggaaaagagttcctgtgtatggggctgattttgaaaagcctactgtatataatttttcaggagataacatttatagtgattatgccgatgctgcatctacccgttgtgcttcttatgatggcgaacatgtattggttgtcagcagagctacacaacctcatcttcttaaagtatcggatttgaagaagggggaaatcaacccgattctgctggatttgactggagttagcggtggtactttctcttataacatgggtgcgttgagtaatggtcatgtatatctttcaagtttgtcgggtgccaaagcttctcctcttaagatttatcattgggaaacaccggattcccaaccggaaacgatagccaatattaatgttggaagtatctccggagcaggaaacagacatggtgataatgcctcttataatatagatgagaatggtaacggatttatattctttggtgataatgcagctactgattttctaagaatacccgtaagcggctataaaacagttgatgccactgccattaaagtattaccgtcaaaatctgatgctacgatggtgaccaatgtatatagagtgggaaatacagaccagtatttatggtcgggtgtcagaattcctgtaacattggtcaatgagtctgtaggcgaaatatatgcgtcgagcataaaaggagaggctgtggctccaaggataatcaactttaatgaggagcgttatctgttggtttgtaccgctggtcagggtagtgcatctactgcaaccattgctttggaaatttatgatttgagcaaaggagctaccatagaagaggctttgcggaaatttgacgaaggagacaatcacaatcctttgtaccaatttaaattaggtggaagtggaaatggaaacgccctggcgcagacagattattatatagagaaagatgagaacgggaaagatgccaagctttgtgtgtttgcatcacgcacaggatcaggatttgtaatatgcgagttccctattaagcaggaagaggaataatatgctgattttctacatttaaattgaatttttatattgtcaacttgaaagccgtctattttaaaattatcaggcggctttcttattagaaatttaaggatgaaacatttgaactatatatatataatcattttacttgtgcttgtcgcagcatgtagtaaagacgatgaaggcattttggatgacggcacccattctcagggagaaggtcagacctcttcgtctgttctgcccggaaaggaactgagaggagtatggatagctacggtatgggggcttgattggcctatggaaaagtataatgccgatgttcagaaaaagttgtatacagattatctggatttattggtcgggtataacatgaatgcggtatttttccaaatcagaggtatggcagatgcgttttatgaatcggaatatgagccttggagtaagtatattacaggaagtgcaggagtaagacccgattatgatgttttaggatttcttgttgaggaagctcataagcgaggtatccagtttcatgcttggttaaatccataccgtatagctacgcgtgcaaataagaatgctgctttcccaaaactggatgccaaaatacccatggaactggttaaggattatgagaaaatcagagtttataatcctgctttgccggaagttcaggaacggattgtaaatattgtcaaggaaattattaccaagtatgacgttgacggtattcacatggatgattatttctatccgtcattggaagcttctgagacaatgaatgatggtgcggaatttcaaaaatatgggaaggataaatttaagaatgtcgaggatttcaggcgtaataatgtaaataccgtagttaggaatatccagaaaactattattgagactcgtccggaagtgattttctctattagtccggcagctgatatggagcgtaattacaacacattgtttgcagatgtcaatacgtgggcaaaggaaggctgggtggatgtggttattccgcagctgtactttgccacaggtaatgatgctaccagttttaatctgaggttggatttatggtcgcaatatacatatgaaaaccacttattgataggatatggcatttataaatttggtgattcgcaatatggaagtaagtttcaatcgtcagatgacttaatgaagcagtttgaactggcaagtgcaaagccgaaggtaaagggaagtgtattgtacagtgccaagaacttggtagaaaataaggttggtattgcagatgcggtcaaggctatatatggaaagaaagtattgcctccttatttaggacgaactgctgcagtgcttcctccgacaccggacaatatcaggttgaatggggctgatttgtcttggggagcggtttcaaatgttgcttattacgctatatataaagataatgggaaagagcggaaagccgatttggtaggtattacccaaggaacgtcatttaaattatcggaaaagggagtttattttgtgacttcgttattcaaaaataatgcagaaagtgagatttcagaaactgtgtcttattgatatacttaaaacgacttgaaatcggaagtctcaagcaacatagtcaagggtgtgttaaaaatgaatgctgtaatagtaatgacattctatttttgacacacccttatcggtttatggattaggagaaattttaaagcgctttctctctaatcagatactctgcaatctgtaccgcattcaatgcagcgccttttttgatctggtcgcccacaatccagaaagtcaatccgttctcgttggtgaggtccttgcggatacgtcctacatatacagggtcttttcctgcgaggaacagcggcatcggatattctttctctgccggattgtccattaataccagtccgtcacctttggcaaatgcttcacgtgcctcctcgatagagatgggccgttctgtctctacccagatactttccgaatgcgagcggagggcaggtacacggacacatgttgcgctgactttgatgtcggagtgcataatcttacgtgtttcgttgtacatcttcatctcttccttggtatacccgttttcagtgaatacatcaatctggggaatcagattgaatgccagttgataggcaaatttctccacggtcacgggttcacccgccaatacttggcgatattgttcgtacaactcatccatagcagcggcgcctgcaccgcttgcagcctgatacgtggatacgtgtacggtttttatatgagaaagctgttcgatggctttcagtgccactaccatttggatagtagtacagttaggattggcgataacgccgcgcggacggtctttggcatcggcggcattgacttcgggtacaaccaaaggaacatcggcatccatacggaaagcgcttgaattgtcaatcatcacagcgccgtgcttggtgattgtttcaagatactctttagaggtgcctgcgcctgcggaagtgaaagcaatgtcaacccctttaaagtcatcgttgtgttgcaagagtttaacctcgatctgtttaccgcggaaggtatatttagtgccggcactgcgtttagaaccgaacaatactaactcgtccaacgggaaattcctttcatcgagcactcgcaggaactcttgtcctacggctccgcttgctccaacaatagctactttcatttttcttttgttttaatttagtttataaaatagttctaatctatctataaatgatagagttggctgcaaatttataacaaattgctgtatgacaccgcataaagtgaaaactttttcgttattttgcagttaaaacctaaaactcactgcgtatggactggctcaatttcagtttgacacttcctgtaacagaccctacatggatattcctccttgtactccttattatattgtttgcgcccatattgctgaataaattgcgtataccgcacatcatcggtatgattctggcgggattggtgattggcgagcatggcttcaatatcttggtgcgcgacagcagtttcgagttgttcggcaaggtcggactttattatatcatgttcctggcagggttggaaatgaatatgggcgatttcaagaagaatcgcggaaaggctgtgatgctgggattgctggctttcgtcattccgataggcataggcttggttaccaatatgatgttgctgaagtatagtctcgtgacgtccatattgctggcaagtatgtatgcctcgcacacgctggtggcttacccgattgtaattcgttacggtgtgtcccgtcatcgcagtgtaagtattgctgtgggcggtacggctgtgacggatacgcttacgttgctggtgctggcagtggtgggcggtctgtttaaaggggagtccggtggactgttctggctgtggctggtggttaaggtcatattcctcggagcgctgattatgtattcgttcccacgcatcggacgctggttcttccgccgctatgatgataacgtgatgcaatttattttcgtgcttgccatggtttttctgggagcgggtttaatggagttcgtgggaatggaaggcatcttgggagcattcttggcagggctggtcttgaaccgcctcataccgcatgtatcaccgttgatgaatcatctggagtttgtcggtaacgctctgttcataccttatttcctgataggggtgggcatgctgattgatattcatgtcatcttcgggcagggagacgctttgaaggtggctgccgttatgattgttgtggcgctggtgggcaagtggatcgcttcctggctgacgcagaaaatttataaaatggctcccatagagcgtgagctgatgtttggcttgagcaatgcacaagcagcagctacgctggcggcggtattggtgggttataatatcatcttgccgaacggtgagcgtttgttgaatgaggatgtgctgaacggtacggtattgctgattcttgtgacatgtgtggtgagctcctttattacggaaagggccgcacgcaagattgccatgtgcgaggcgcatctggaagaggagcgtacggttgaggcggaaaggattcttattccggtggcgaatccggatacgattgaatatctgatgaacctgtccttgttgatacgtgataccaaacagaaagataatctgttggctttgaacgtaatcaatgacaacaatacttccgagggtttggagcttcgcggtaaaaggtatttggagaaggcagccatgattacggcttctgccgatgtgccgttgcgccagattacacggtatgacttgaatattgcttcgggtattatccatacggcgaaagaatatgaggtgaccgatgtgattatcggtttgcaccgtaaggtcaatattgtagactctttcttcggtatgcttgccgagaacctgctgaaaggactgcatcgcgaagttatgattgccaaattcctgattccgattaatacgatacggcgaatcatcatagccgttcctcccaaggcggaatacgaagcaggctttcagaagtgggtggagcatttttgccggatgggcggtacgttgggctgccgggtacatttctttgcaaacgaggaaacaactgtacagttgcaggcattggtgaagaaaaagtatggacagaccttgacggacttctctcgtctggatgattggggggatttgctgatattgaccgggcaagtgaattacgaccatttgcttgtagtgataagcgcacgtaggggatccatttcttacgacagctccttcgagaagctcccggcgcagttgagcaaatatttttccaataatagtttgattgtactttatcccgaccagttgggcgaaccccaggatgccgtctctttctctaatccgcgaaatgaggcgcagcattacgagaaggtaggaaagtgggtttataaatggtttaaggaagattagtaagtgattagtgattaatgattagtggttggcgatgatggaggattggaaacagagaacccggcttttgctgggagaggagaaaatggaaaggctgcaacaggcgcatgtgctggttgtaggtcttggcggagtaggcgcttatgcagccgaaatgatatgccgtgcaggtgtggggcggatgacgattgtggatgcggatacggtgcagcctactaatataaatcgtcaactgcctgctttgcattccactatggggagggagaaagcggaggttttggcggcacgtttcaaagatatcaatccggacatacagctgacggtgctgccggtatttctgaaagacgataatatacccgaactgcttgatgccgcccgatatgattttatagtggatgccattgatacgcttgctcccaaatgctatttgatagcggaagcactgaaacggcatattaagattgtatcgagtatgggggcgggtgcaaagagtgatattacgcagatacgttttgccgatatatgggatacctatcattgcggattgagtaaggcggtgaggaaacgtttgcagaagttagggattaaacgtaaacttccggttgtattcagtaccgagcaagccgaccctaaggcagtgctgttgacggaagatgaacagaataaaaagtctacttgcggaactgtaagctatatgccggctgtattcggctgttaccttgcggaatacgtcattaaaaggttgtaatagggctatcaaacagttagaacgtacctatgtgttaaagataaaatgtgtcatgaccgtaaggaataaacagtaactaaaacaatgatacgattagaaggaataacgaagagtttcggcagtttacaggtgttgcggggcatcgacctggagataaaaaaaggggaggtggtcagcattgtcggtcccagcggtgcgggcaagaccactttgttgcagattatgggaactttggacatgcccgatagtggttcggtaacgattgacggtacattggtgaattgcctgaaggagaaagaactctctgccttccgtaataagcatataggctttgtttttcagttccatcagttgttaccggaatttacggctttggagaatgtaatgataccggctttcattgccggaatgggacagcaggaagccagagcggcggctgccgaaatattggacttcatgggattggcggaacgcgcttcgcacaagcccaatgagttgtccggtggcgagaagcaaagggttgccgttgcccgtgcgctcatcaatcatcctgcggtggtgttggcggatgagccgtccggaagtttggatacgcataataaggaagagctgcaccaactgttctttgatttgcgtaaccgtttgggccagacatttgtaattgtgacgcatgatgagggattggcacaaatcaccgaccgtaccattcatctgaaagacggtgaagtttgtaaggaatagctgtctgtctcttcattattcaaaacaaacatagcggctaagccgctccaaatcgctttcggtaaattcttcgtggagggcaaagggtttgaggttgtggagcattcctttctttttacggtattccacaagggcttttgcctggtaaaagtttatataaggatggttgcgaaggcgctctatgccgacccggttcagattgatgcgccggatttcagaaggcgtaacggtgaaccatgcttgcagttggcgataatccaaatgaatttcctgcaattgctctattcggtagaagccgcctaaacgttgccgatagttcactatcgaccgggctatgccgctgcctacgccgggaactttcttcaattcagtggtatctgcatgatttaagttaagcacggtgcctgccggatatttataaatactgtctttgggtgcctgctgaagagtgagtagagaggtcgcctttcttatagtgtcttctgccgtaaaatagatgtagggagagagcgtttggtactgttcttctgtcaatccatatacttttttgaaatcttcggccttacggaactttccccctttgcttcgataacgtaagatgttctttgccatccatgcaggaagacctaagcggcagaaggtgacggagtccgtacggttagggtcgaaaggagctaatacaactgttctctttttatatctctccgattttttgaaacggctgttctcgtttttttcttgttcccgcacagaaccgataaagttgtcgtattctttcaaggcggcagcctgtatcctggattcttcttcagaaagttgcctgctgttttgccggaaagaatagatatacccggagagaaagatgaggactatcccaatgatgagaacaaggatacctcgcctttctccccgggagaagtataagaagtctttaaacggattcttcattatggtttatttgaagaagcccaactcgttgatgaaaataagtccgattcctattggggcgatatatttcagaatgaagattagtaatctgtatatatgtatatttaaagttccgttattgctgacttcttcccatacaatctttttatccaggtaccatccggtgaagatagagataaagaacccgcctaagggcaacatgattttagcggtgacgaagtcgaataaatcgaacaggttaaggccgaaaatcgtataactctttcctacgcccaatgacaacgaacacaacactcccagcacgatacagccggcggtaaccagtttggctgcttttcctcgtgtaaacttgaactcctcatgcagatatgctgttaccacttcgtgtaaggaaatggttgaagtcaatgccgccagcgccagcaaaacgtagaacatgatggataaggcgattgccagccagggtatgttgccgaatgcctgttgaaatacgttgggtaaggtgatgaacaataaactcggtcctgcatccggctggatgccaacggaaaacgccgcagggaagataatgaatccggcaagaatggcgactaacgtgtcgatacctgccacattgagtgctgttttaggcaggttggtgtcatttctgaaataagaagcgtatgtgcaaagacatcccataccgaggctgagtgaaaagaatgcctgtcccattgcacctaagaaaacattaccgtccactttgctgaagtcgggtttcagcaggaattcgatacccgcacttgcaccgggtagtgatacggaacaaatggcaagcactaccagcaggataaacagcatgggcatcattatcttggctgatttttcaatacccttttccactccttttatgatgatgaagtgtgtggctaacaagaataccaccaaccagataacaggacgccacggattgctgacaaagccgttgaaggaagcgatgaactctgcggcggacttgccggcaaaactgttggttgcggcttctcctataaattccaaggtccaacccgctactaccgagtagtagcccaaaataaggaatccggctaatacacccattcgtcccacccaacgccaatgggttcccggagccagcttttgatacgctccggcagtgttggtgcgtgaacggcgtccgataagaaattcggctatcatgataggaatacctaatataagtacacataccagataaatcagtatgaaggctgcaccgccatgattgcctgtttcaaaagggaatctccagatattacccaggccaactgcagaaccggctgaagcaagtatcactcccaatttgcttccaaagttggctctttcatttcttgtcataaaacgtggatttttcttacaattcgttattaattgctcttaaaacgcacaaatatagaaaatgttccatacttttgcacacagattgttcataatttgagatatgctatattatattaagaaatatccggtatcgctggtgataatacttgctgtaatttatctgtcgttttttaaaccgcccactaccgatctgggcactatccctaaccttgacaaggtggtgcatatctgtatgtatttcggcatgtccggtatgttgtggctggagttcttgcgggcgcatcggagagaccgtacgcctatgtggcacgcatgggtaggagcatttgtctgtccggtattgttcagtggagcggtagaattgttacaggcattttgtactacctaccgtggcggcgattggctggattttgcagccaataccacgggagctgtcctggcgtcattggtggcttgtttcgtactgaaaccaagagtgatgcgtaaatctacagattagagataatcgactaccgtattcagttttattccgttcgagccttttatcaggattgtctttccgcagggtttgttcttttggagcgcggctattagagccggagcatcgggataagtggtatacgtgtggcgggttgctgcaaataattcgcctaccaatattacatcctcaaagccatattcttccagatagtccactattctctggtgctcttcggcactgtcttttcccagttcgcgcatatctcccaatatcagcatttttttctcggcttgcatgttgcggaaatttccgatggctgccagcatgcttgtgggattggcgttgtaggcatcgataatcagggtgttgtcggccgtttttttcagttgcgaacggttgttccggggttcatattcattcagggctttgtctatcttctctgcttctactccgaagaaatgtccgatagtgacggctgccagagcattgggaaagttatattcgccaatcagtcgggtatgcacttggtgaaattctccttcttttccggctctccactcaaaagcgaggtagggggaattgccggtaacgtggccgttgatataaagactgttttcttctccgtaggttatcggattcagtccccgggctatttccctgaggtaaggattgtcctgatgaaggaagatggtggagtttccctgtcggcgcagatagtcgtacagttcgcctttggtccggataacgccttcgaaagaaccgaagccttccaaatgagcctttcctacattggtgataatcccataatcgggttcggctatttccaccagttccttgatgtcgccggggtggctggctcccatttccactacgccgagctcatgctctgttgtcaggcgcaacaaggtgagcggtacaccgatcggattattcagatttcccagtgtgtacagtacattgtacttttgggacaatacggcggatataagctccttggtcgttgttttcccattggttcctgtaatgccgatgatgcgcgtacccagttggcggcggtgataattggcaagctgttgcaaggtgtgcaggcagttatccactaatatataacgtgtatctccggcaggagcataggcggcttcgtctacaacggcgtaggtgctgcctgcttccaatgctttggcggcaaaggcgttgccgttgaacgtatcgcctttcaaggcgataaacagtgagccttcggggcagttgcggctgtcggtggttatgccggtgcagccgagaaatatctgataaagagcggttatatccatatctttctccttcggggagttttgcagttcgtaataaaattgatattttgcgaacaaagataccttatttttcagacttggtgtaccaacaatggcttttttgtttacatttgcagatatataaatcaaaaaacgctgccatgaaagttctgcaatccaaatatataaacgtcaacggttcgctgttggacctttcttctccctgcgtcatgggaattctcaatgtcacccccgattctttttatgccggcagccgcatgcagacggaagccgacataacaagccgcatagggcagattgtggcggaaggagctgctatcatcgatgtgggcgcttactcttcgcgttccaatgcggagaatgtgtcgcctgcggaagagatggaacgcttgcgcatggggttgggtattctgagaaaagtacagcccgatgcgattgtttcggtagatacctttagggcggatgtggcgagaatgtgtgtcgaggaatacggtgtggcaattatcaatgatatagctgccggagaaatggatgatgatatgttccgtacggttgccgatctgaatgttccttatatcatgatgcacatgcagggtacaccgcaaaatatgcaacagcatccccattatgataatttgctgaaagaggtgtttatgtactttgcccgtaaggtgcagcaattacgcgatttaggtgtaaaggatatcatattggaccccgggttcggctttggcaagaccattgagcataattatgaattgttggctcatctggaggaatttcgcgtttttgaacttcccttgctggttggcgtttcccgtaaatctatgatttatcgcttgttgggaacgactccgcaggaagcgttgaacggtacaaccgtattggataccatctgtctgttgaaaggggctgatatacttcgtgtgcacgatgtgcgcgaggcagtggaaacggtgaaaatcgtggaagccatgaatgcgccccgttctgcgttaatcgctaataattaaccattaatcacttgcgaccgtgttttttgaatttggcataaaagattttatagatatcctgctggtagctttcctgctttactatacatataagctgatgaaagcttccggatctatcaatgtgtttacgggtatactggtgtttatcctgatttggctggtggtttctcaggtgctggagatgaaactgttagggtctatttttgataaactggtcagtgtgggtgtgttggcacttatcgtcttgtttcaggatgaaatacggcggtttctgcttacgctcggttcgcatcagcatgccagtgcgttggtgcgcttctttacgggaaacaagaaagaaggtatggaacacgatgaaattatgcccgttgtaatggcttgtatcagtatgggcaagcagaaagtcggtgcattgattgtggtggaacataatatgccgttggacgatgtggtgcgtacaggggagattatcaacgccgatataaaccagcgcctgatagaaaatatctttttcaagaacagcccgttgcacgacggagctatggttatcagcaagaagcgcattaaggcggcaggatgtatcctgcccgtgtcgcacaatctggatattccgaaagaattgggtttgcggcatcgtgcggcgatgggaatatctcaggtgtcggatgcccatgcgatcattgtatcggaagaaacaggctctatttcggtagcctacaaagggcagttttatctgcgcctgagtgccgaggaattggagagtcttttgacaaaagaaatttagatgcggcattagtaggctgaggcgcattggttgttcggtaatcaaaggtagctattctttctgtattcccccgttatattgaggataagcgacctgtaatttataacttataacaaatttatatggatagacgaaacttcttgcgaaccggcggaatggccgttctcggttcactggctatgccttcgctggctatgcccgggtctgtgcgcggagcattgggcggtgcggactctaagtctgccgttgctgctgccaatcattttggtgtgacggaagcggatttaaagaaagtaatggctgttgctttggaaaagggcggcgattatgcggatctttacttcgaacacactttcaataatagtgtgagtttaatggacggtaaggtgaataactgcggctccaatatcgatttcggtatgggagtgcgtgtgctttccggagaccaaagtggctatgcctatgtagaaggcgttaccttggaagaaatgttgcgtgccgcccgtactgctgcccgtattgcatcttcgggcagggcaggcaaacctgtggggctgacggagaaaaccatagcccggagccgctatgccgtggctactccctgggaagatgtgggcgtaaaagagaagattccctatttggagaaactgaatgagaaaatattctctttggacaaccgtgtgcgaaaggtacaggcctatttgcaggacagcacttcgcatgtactgttctgcaattcggaaggtgtgagttattacgactaccgtccaatggtatcctttatggcagtctgcatcatggaggagaacggtaagatggaaaacggctatgcaggcaggtcttaccgcaagggattcgaatttatgaccgacgatgtggtggacgtgattgcccgtgaagtggtagatcgtactgctattctatttaaggccattaagcctaaaggtggtgaaatgcccgttgtaatgggttcgggcggttcgggaatcctgctgcacgaggctatagggcatgcgttcgaggcagacttcaaccgtaaggatatatctatatttgccggtcagttgaacaagaaggtgtgcaacgaacatattaacgtggtggatgacggtacgatacctttcaatcggggttccgtgaatttcgacgatgaaggcgtagaggggcagaaaacgtatattgtcaaggaaggtgtgctcaccagctacctgcacgaccgtatcagtgcaaagcattacggtgtgaatcccaccggaaacggtcgccgcgatacattccgtaacctgcctattccccgtatgcgtgctacgtatatggaagccggcaatatgaaggaagcggatattatttctaaggtgaagaacggtattttcgtagacacgtttacgaatggtcaggtacagattggagccggtgactttacgttcttcgtgaagtccggttatttgattgaggacggaaagctgacgcagcccattaaggacatcaatatcataggtaacggtccgaaagcattggcagacatcacaatggtggccgacaatgataagattgacaatggtacatggacctgtggtaaggatggacagtcttgtccggtgacgtgcggtatgccgtcggcattagtcagcaaactcaccgtaggaggggaaaattaagtactaacggagcattgataactgataatttctaattgtcaattatcaacagctaacaatcaactgaaaatatgattacagacaataataaaaagctggcgcagtgggcaatggactatgccttgaaaaacgggtgtcaggcagcaaagttggtgctgtactccaactccaacgcttcatttgaattacgcgatgccaagatggacagattgcaacaagcctcggaaagcgggttgagcatcagtttgtatgtggacggcaggtacggttcttattcaaccaaccgtttggataagaaagaactggagacgtttataaagaacggtatcgaatctacgcgctatctggcagtggatgaggcacgtgtgttgcccgatgcttcccgttattataaaggtggaaagccggacctgcaattgtctgacaggcgtttcgaaactattaatccggacgacaaagttgccattgcgcgtgctgctgccgaagaagtcttgggcaaagacagccgcattatatccgtaggaacttcgtatggtgacggagaaagttcttcctaccgtttgacgagcaacggttttgaaggcgagtccaagtctacttggttttcgctttctgccgatgtggcattgcgtggcgagggagaggcgcgtccatcttcttattggtatgaatcggctctgttttacgacaaactggtaaaatcgggtgtcggaacgaaagccttggagcgcgtactgcggaaactcggacagaaaaaggttgcttccggcaagtatacaatggtggtagacccgatgaatgcaagtaatttactcagtccggtactgagtgcgctgtacggttcggcattacagcaaaaaaactcttttctgttggataagctgaatgtgaaagtagggaccgggttgttgaatctgatggatgagccccatttaatcggtgcaagcggtgcgcgctatttcgatagcgagggagtggcaaccgaacggcgttctatctttgaagaaggtgtgttgaagacatacttcattgatacctacaactctaaaaaaatgggagtggagccgactgtcaactctccttccttattggtgctcaaaccgggaaacaaagatttgaacggtctggtggccgacgtgcagaaaggcatcctggttaccggattcaatggcggtaattgtaacagcagctccggagacttttcgtacggtatagagggcttcctgattgaaaatggcaaattgacccaacccgtcagcgaaatgaatgtcacgggtaatatgattacgctttgggcttctttatcggctgtgggtaatgatccccgtatgtcttcttcatggcgcatcccgtcgctggtattcgaaggcgtagacttcagcggattgtaagaactgttaattcagcattaaactcatgtaagggtttgatggcgataatatcttttcggtaagttcgccgacagtgagtgccaagtggctgcccggcagccgcttggcactacttatacacttgccgttattcagatagtagtaaccgttattggcgctgatctgcgggtctgtaagtgcgatgctcattttcagttccggatgctcggcggcatatcgttgcagtatcgttttggcattgatgatgcgcgccatacccaatacttgcggggtcggctctgtttcagacggactaataacccggatggacgggaggttcagttgttcgcaaatacgttgtagcaataacaggtacataccggaagtttccgctacgatttctcctgcctgccaagtactgcctgccggatatacgatggctaaagccgtaatcttatcgccttgcttcaatgtataggcgcagcctttccccaactgtaaatcggcaaggattacccggaagtccgtttccgtatgctggatacaataggggcgttcccgcagtttccggtttaaatagcgatatgattcttcctgataatcatttattttgttcagaacagccgttttgtcagcgatggtaacctctgaagccgtgaaggttgttgaggagtatttaaaaaccggtacgtagcccataccggcataatacccgaacaaccagggttctgccggaatcagcgtggaaatggacatgtcattgtgtagcatacgggtaaaggcttgcgataacagttcgcgcatagccccgcgattgcgataatcgggatgcgtacaggcccctgatacatatcctgtcttgatttcgctctttccgaatgtcatgggatagggtagtatttgcagggcggcaatcacctcttcaccgctttgaatggcgatgttgacttcattgctgtaacgcaagcggaaatacatatctgtaaattcatcgctgtcgttaaagcatagtttccataaactctttatcttttcccgcattgcttcatcccttatcataattgtgcaccctgttttatagccctgtcactttaccttttttaccacttgatagcctctaccggctgttcttttaaacaggcgacgtatttctccaggataatggcaggctgataggaaagttttgctttccgcaacccttcaatacccaagtcctcttcccggttgatgtagatatattgttcaggaatatggttggcaaattcgtaattaatcatggcataagcgccgtctatgcgggtatcggccttttctacatgtactccgaacgtgtcttggttgataggcatgccgaaagtaaaagctgcaatcttgccctctacatggagaataccgcccgtaagccctaacgcatcgaaattgtgcagggcatatatcaatgcacggcgttcgttgccggtaccttcatgctggtcgcagttgttggctttgcaccattccgcttccaaatcgaggcactcccggatacggtcggctgtaatcggagtatattcgtaattataagtctttttgaatttgttgatatgattccgctttgcctgaaactttttaccggataaggtggcgaggtcggagcgcagatatacgtagtcggcgtaatccctgtctgctgtaaactgaaacctgccgggcataaaggtttccagttcggagcacattccggcgcagatacccaacaagcaaaaaggctctccttcccggttggcatcttctatcagcgcatccagtaccttgtttaaatcgccgttgccgataggcatcatatatacaagctctccgtctgcccagaatttcaataataggaaaccgtccataatggcaaacttggtgttgtataagaaacgccaactgcataggttggagaatgaaaggtcgcagttgcgtcgcggactgtttaaagtaaaggaagtaatcagctctttatcttgtagttcgatatctttaaatggaatcataaataatttctattggttataagaatataataacaaagataagaagattttgttagagtaaccctaacaatcgtaaaatagtaggggttaacaaggctgtaaatattccgttaagcgtcaggccgaggctggcaaacgcaccgtatttgctgctgatgtccattgctgtggatgtgccgacagcatgggctgctgcccctaaagaaagcccttgggccatggggcttccgatatgggtgagtttcattgtcttgaaaccgaggattcctcccaacaggcctacgcagaccactacggcggcagtcagcgcgggaatgccgcctattgatttcgtaacttccatggctatcggggtagtaacggattttggagccagcgagtagataatctcatcggaggctcccatcagttttgctatcaggactacggaaataacccctacaatacatcctgccaattgtgaaagcaggataggcagcaattgtttcttgatagtctccaattgcagatacaaaggaacccccaacgcaacgacggcaggttttaaccagaattcaatcagatgcccgcctttgttataagtgtcataactgatatttgtcatcttcaggaaaatgataagcagggcgatagtcagtaagatgggattcagcagcatgattcctgtcttcttttgaagaagtttggctaagaagaatatcccgaaagtaatagccagcaggaagaattcgttttctaaaaagttcatttgattttacgtgttaattggtgaacccatccggtaaccacgagtaccagcagggtgctgactaatgaagcgatggcgataggccagaattcggcggcgataatgtcgaaatagagcataagggctacgccgggcgggataaagaagaatcccagattagcaaccaagaagtcggacattccctgcacccagtgcagttttatccaacccaattttaagaaaagggtgagcagcagcataccgatgatgctggacggaagtttgatacccgttaagaatacaatcaattcacccaaagccagacatccgaaaaggatggcgcattgacggatcataatacctgattattaaataatacctaacctattgaaaatattgaaaacgttgcaaagttagctatttgaagtgaggaactgtctcgtaaatccactgttagtgttaaatattacaataattctcatttggtgtggaaaaagccccgaaattgcaatgtgtatattgcaaaattgtgtacttttgctgcgtgaataacacgaactactgattcttatacacaattaaaatatcatgcaaagattaattaatgaaattttagagcgtgcgaaagccgatcgtcaacgcattgttcttcctgaaggtacggaagaacgcactttgaaagctgccaatcaaattctgacagatggtattgcagacctgattcttttgggcaatcctgctgaaatcaacgcttgtgcaacggagtggggacttggtaacatttccaaggcaaccattatcgatccggaaaacaatcccaagcaggaagagtatgcacaactgctgttcgagttgcgtaagaaaaaaggcatgactattgaagaagcccgtaagctggtaaccaacccgctttatctgggctgtctgattatcaagaacggcgatgccgacggtcagttggcaggtgcacgcaatactaccggcgatgtgcttcgtccggctttgcagattatcaagactgctccgggcattacctgcgtttccggtgctatgttgttgctgacgcatgctcccgaatatggtaagaatggtattctggtaatgggtgatgttgccgttactcccgttcccgatgcttctcaactggcgcaaattgctgtttgtactgcacgtacggctcaggctgtcgcaggtattgatccgaaagtggcgctgttgagtttctctacaaaaggttctgcaaaacacgaagtggtagacaaagtggtagaagccttgaagattgctaaagaaatggctcctgatattgctatcgacggtgaactgcaggctgatgcagcattggttcctgaagtcggtgccagcaaagctccgggttctgccattgcaggtaatgcaaatgtgctggttgttccgagccttgaagtaggcaatatctcctataaactggtacagcgtttgggacatgccgatgcggtaggtccgattctgcaaggtatcgcacgtccggtgaacgatttgtcacgcggttgctccatcgaagatgtatatcgtatgattgccattacggcaaatcaggctattgcagctaaacacaataaataattatggattttgaattatgaattatggttggggatttcttcctgttcatggttcatggttcgcggttcataattcggaattcataatttataatttaacattagtatcatgaaagttttagtattgaactgcggtagctcgtccatcaaatacaagttgtttgatatggaccataaagaggttatcgctcaaggtggcattgaaaaaatcggtttgaaaggctctttcctgaaattgaccttgcctgatggcgggaagaaaattctggaaaaagacataccggagcatactgtgggtgtggagttcatcctcaatacattgatcagccccgaatacggcgcaatcaagtctttggacgaaatcaatgcggtaggtcaccgtatggtacacggcggcgagaagttcagcgaatccgttttgctgactcaggaggtgctggacgcctttactgcctgcaatgatttggctccgcttcacaatcctgccaacttgaaaggtgtaaacgctatttccgccattctgcccgatgttccgcagattggcgtgtttgataccgctttccatcagacgatgcccgattatgcctatctgtatgccgttccttacgaactgtataagaaatacggggttcgccgttatggcttccacggaacttctcaccgttatgtatcaaagcgtgtgtgcgaatttctgggcgtacagccggagggaaagagaatcattacctgccacatcggtaatggtggttccatctctgccattaaagacggcaagtgtatggacaccagcatgggtctgactccgctggagggtctgatgatgggtacccgtagcggtgacatcgatgcgggagccgtaactttcattatggagaaagaggggctggatgcaaacggggtatccaatcttctgaacaagaagagcggtgtaatgggtatcttcggtgagtcgagcgatatgcgcgatttggagaatgccgtggctgccggtaacccgagagctattctggcagaaaagatgtacttctaccgcatcaagaagtatgtaggcgcttatgctgccgctttgggcggtgtggatatcatcgtgtttacgggcggtgtcggcgagaaccagtgcaactgccgtagcgaagtatgcgaaggtctcgaattcatgggtgtcaaggtcgacctggaaaagaacaaggtccgtggtgaagaagctgtaatctctacagacgattccaaggtgaaggtagtggttatcccgaccgatgaagagctgatgattgcttcggatacaatggctatcttgaataaataacaggtttgtaataacagtcctgataaaagtgccggaaacagttaatactgtatccggcactttctttttaataatatcgttatatatgaatgatttaaaatatctatctttgtttcccgataaagggaaatatcagtatgacagataatttaaatagaacaagtttatgaaacgattgatttatgtgttgttctttgtactgctggcaggcacatcgtatgcacagcgggcaaagtatgtattctatttcatcggcgatggaatgggagtgaatcaggtgaacggtacggagatgtaccttgccgagcaggagggacgtatcggcgtgaagccgcttttgtttaccacatttccggcaggtactgtggctacaactttctccgccactaattccgtgaccgattcttcagcagccggtacggcgcttgccaccggtgcaaagacatacaatggggctattggtatggacgatgataaaaacgccttgcagacagttgccgagaaagccaagaaagcaggcaggaaagtcggtgtcactaccagtgtcagtgtagaccacgctaccccggcggcattctatgcccaccagcccaaccgtagcatgtattacgaaattgcgcttgacctgccgaaggccggtttcgacttttacgcaggcggcggtttcctgaaacccgctacgacagccgataagaaagatgcgccgagtatcttccccattatagaggaagcgggatataccattgccaggggattggacgaatacaaagcaaaggctgcggatgcagggaaaatggtgcttatccaggaagagggtgccgtaccttcctgcctgccttatgccatcgaccgcaaggaaggtgaccttaccttgccggagattaccgaaagtgctatttcgttcctgacaaaaggaaacaataaaggattcttccttatggtggaaggcggtaagatagactgggcttgccacggcaatgaccctgccaccgtttttgaggaagttatcgatttggataatgcggtaaaagtggcttatgagttctacaagaagcacccgaaagagactttgattgttgtgactgccgaccacgaaaccggcggcatgagtctgggtaccggaagatatgagttgcgcctgaaagcattgacgaatcaggaacagtcgcaagaccttctttccaaggcaattaccgatttgcggaaagattccgacaaggcttcctgggaggaagtgaaggcgctgcttgccgataagatgggattttgggaagagttgcctttgacttgggagcaggaaaagatgctccgtgatgaatacgagacgtcttttgtgaagaataaggttgtctttgaagagagcctgtacgccaagaccgaacctttggctgctgctgcccggaaagtgatgagccagatagcaatggtaggatggaccggttcgggccatacggccggatatgtacctgtctttgcaataggtgcgggctccgatttgtttgtcggtaagatggataatacggaaattccgaaacgcattgcgaaagcggcggggtataaataatctcctttaaagtcggtcacctcaggcggtacggattgacgccctttcaagtttgggttgaaaaggctctgtatcgcctgaggtgatttttttatttcaaatcttctttgattacttcatccatttccctgataagttttttccgctctttggcggatttcactttcttgtctttgcagccggggtctgtacgttctgaaacctcttcgctccattcttcaaatttattctctgccgggcggccgttggggtcgatgttctcttcggcaatggaattgtttctgtaaatcatatcatccataacgcttttgtttttaatggttatgacgatactacaagcaaccgggcaaaaagttccggtttttcgttctttttcgtaatcgtttataagaataaacgattcttgaaaggcggggcaagtggtttacagtttggtttccccttcgataaactcttccagaaacaggttctcgccgtcgaatacggcataggagaaatagtttatccagtcgccgaggataaggacgcgggcggtggcactcagcatcaaatccagttcgatgtgccgatggccgtagatgaagaagtttatattcggatggttcttcagatactctttggtatacagtacaagatgctcgttgttttcgcccatgtagtcgggctctttcccgtctattcttttcaggcggctgtgctttgcccacctcagtccgaactctacgctccagcgggggtggagggtggagaacagcgtttggagggtacggctgtgaaacatggtacgcagcagtttgaattttttgtccgggtcgcccaatccgtcgccgtgggcaaggtagaactcttttccgtagatttccgtggtgaggggttcgcggtgaatgactaccccgcactcccgggtaaggtaatccccgcaccagatatcatggttgccggtgaagaagtgtacttccacgcccatatccgtcagttcggacagcttgccgagaaagcgggtgtagcctttgggcacgaccgtgcggaactcgtaccagaagtcgaacatgtcgcccagcagatatacggcggctgctttgtgtttgatactgtcgagaaagttcaccaaccgtcgttcctgtgtacgtccgtgctcgatggcccgcgaacccaagtgtgcgtctgaaaggaaatatacgttcttcatatatgctttgttacgttgtcagttagagaaagcccagttccagcttggcctcttcgctcatcatgtccttgtcccattcgggctcaaacaccaggttgatggtggcggaggtcacgccgtctatcgattctatcttctggcggacatcttccatgatgaagtcggcggcggggcagttgggagctgtcagggtcatgtcgatagtcgcctcgccgctgtcggcaacatctatcttgtagatgagtcccagatcgtacacgtttaccggaatctccgggtcgaatacggttttcagcatggctacgattttttcttctatttcaaatttggtcatattcgtacggtttgttggtttagcgaagcaaatctaaagattttaattgaaactacaaagaatgtgcaggctacattacagcactccttcgtcggtaaaactgtaatatctgccgtctgtgactataacgtggtcgatgaggcggatgttcatggtctgtgcgcctttcagtatgagctgtgtcagttggcggtcgttcgtgctaggctgcggatttccggagggatggttgtgtatcagggcaatctgtgtggcgcgttgcagcagggcttcgcgcaggatgctcctcacgtcggcgctggtctggtcgatgccaccccggctgatgcgtactttgtctatgacgcgggatgcctggttgagcagaagtacccagaactcctctacggtgaggtcgcataggagcggatgaaagattccgtagatgtcatcggacgagtgtatcgcgacccgttccgaacgctcttgccggtttctgcgtttgcccagttcgagggctgccatgatggtgacgctcttggctggcccgatgcctttgaagcgggagaaatcgtggacttcccatttgcccagccggttcaggtcgttgttgcagcaggcaagtgtccgttgcatcagtgccacggcgctttcttcagtgtttcccgagccgataaggattgccagcagttcggcgtcgctgagggcttccgctcctttcagcatcattttttcccgtggccggtcttctgccgcccaccggttgattgtcagttttttcatctttttttcattaccggctgccagcacttgtagcctgttatttatagaaattcttcttgaatgcctcgaactcatctttgccgcatatgcaacggttccaccaggcacgccagaaaccggttccgtatccgatgagctggatgaaggcggcggcaatggaatagacgccgatgcgcaggctcttgttccgtagcgtggagtccgtgcatacaagcagtgcgtacaatgcaatcggcagcaggctgtacaggcagaaaggcgctcccgccaacagcacggctacgcccagtgtaaatgctgccggcagcagatgcaccgtttttagggattcgggatattttttgtagaggttgatgcgggcgatgccggagttgtgcacttgcttgaagaatttcttcaagtccgtccgccgcttatgatacacccatgctccgggaaagagcctgcatgcgtacccgcccttgaagatgcggatactgaagtcgatgtcctctccgaaacgcatccgggagaagccgccgagcgtttcataaacctcgcgacgcactcccatattgaaactccgcggatagaatttgtccattttcttttttccgccgcgaatgccgccggtggtgaagaacgaagtcatggagtagttgatggctttctgtatatcggtaaaggagacgtgcgcacggtccggtccgccgaatgcatcggcaggggctttttgcagttcctcttccactgctgcaaaatagccttcgggaaggatgcagtcggaatccagtataatcaggtattctccccggctgcgttcggcaccgtaattgcgcgtttgtccgggaccggagttgggcttggcgtagtaacggatgtccagaatgttctgataacgctctgcaacgtccttgcagggaatcgaagaaccgtcctctacgataatgacttcgaaatccttgaagctctgtcgcgtgaggctttgcaaaagctcgtccgcttcgtcggggcggttgtatacgggaatgataacggaatatcgcatgtctctgtctctttttatcgggttacgggagttgatgttgcaaagatacgtttttatttggtgacagacggttattttgccgtgcattcggactgttattttcggttcgttccctttctacaaagtttgaaagtgaaaatcatctgttacgttatcacgctacaggggtatgcctttaattacaagtgtgttgtgccgtgatagataggcacggaagatgaaattgtttacaaatatctatcacggcccgtatgtctttaagagtggactaagccgtatgtgtatttatatttgatagaatgggcaatgtgttggttctcagtgtaaaacatttggacttatggggaactaattgttttagcaggagaaactattggtttgcccctttaaaacttgtagttccatgtagtcaattatttccctgcttccgtatggcttccagcgtcatgctctcctgtaatttcccccgtttgttgtatctttcttcctttacgatgcctacgcctttggcataccagctcatgctgtattctttttcggagaaaagcatgaatttggctttggattctgtatagattttaatgcagtcgaagtctcctgccggagtatgcactctctcctttcccttgtatttcccttcgagggaagctttcattctcataggtcctattttttgcgtatacttgcaaggaggaagttcttcgtccatgccagcattttctttgatagggatgcttatacgtccttcggcatgcatgtatttgctgtactcgtcatactccttttcggctctggaacggtctttttgagggtacttggaaaggtagtccagttttgcctctgtattctctacctctgcatccagtgcgatgaattctgtgatgccggtctttttgcggtatatgaatgtttcccggttcgtatcgtctataatctgagtcgggctgtagctgtcgccataccaccgtaagtctactacaatgcgttcgttctcgtgaatgacgtctcttactaaggctgaatctttcagggttttctcttgtttcttgtcgatagtggtgtaatgaagtacttttcctatctctgtacagcaatattgggcactgataggaataaaattaaataaaaataaaaaaaacaggccttctttcatggtgttttttaaaataattttttatgtcttaggcaaatataattaaaaataatcaattatgaaaaacttgttagtgaaaatcctgtttgttgttgtaggacttgtaatcggttcttgttcgcaaagtgaaatagaggagcaagtcttaaagccaagtgttgaacaagttcaaatggaagaactaattcaatatgtggaagatctaaaaccttatgtgcctgctccgcttgatgtgcacactcgtggcttttggagttcttttagaagctggtttaaaaatctaggaaaagctgatgccggtggctatagatggggacgtgataatggaatgaatttttggagaggacttcgtgtttctttaacaacatctttggtaacagcaataaatggggggatgctcgaactgcctggaagataaatgatgaatggaaagtgtattctaactcttcaaggcaacataaagagttgggtaatagtcataatagggctatctatgaactttgtcgggagaatccaacccttagatatggcagtaatatcagtgattctgctttgtcatcgatgattgaaacgaaacttaagcagatggggtatagtgatgttggtatatcttctttagaatggggaaatataataattcttataagaaatttgaaaaatgcacttaacacgtcttcagatttgaataatgtttttattgcaggaatttcaagctcaccaactttggactatcagtttttggatgaatatttagattctgttcttttgttggaagatagagaagaaatgattacttttacggaaaaaatatatacaaaaatagactctttaccaggggtgaaaaaagagttgttaaagggaatggtttcgattgcattgtgcagtataaacctttgggttcctgtttaataaacatttcttttgagaaaaaagccgtctgaatgagtgctcagtcaggcggcttttaatattcttaagagaaatgattcctcttatgcttttacgcggcttacgtaagaaccgtcgcgagtgtcgatttcgatagtctcgccttcgttgatgaacaacggtacacgtacggttgcgccggattctacggttgcaggtttcagcgtgttggtagccgtatcgcctttcagacccggttcggtgtaagtaatcttcatctgaaccttcacgggtacgtcagcatacagaacggtttcggtagaagcatcggacacaacgtctacaaccattccttcgagcaggaagtccacaccgttaatcaggtcgtgggcgatgggaatctggtcgaaagtttcctggttcataaactggtagttgtcaccatcgtgatagagatattggtgcggacggcgttctacgcgtacgtcttccagcttttcaccgatgttgaagcggcgctccagcacatagccgttgactacatctttcagcttggtacgcatgaaagtattaccttttcccggcttcacatgcaggaagtcgatgcagaaataaagcttgccgtccatgcggatgcaagttccgattttaatgtcttgggcattaatcatactttatagtctttattattgttatttattaagatgtttcgctcaatttgcgagtgcaaaagtaatggaaatcggtaaaaaacacaaaaagttttgagataaaaagagttatctcttggttattttagaaaaagtctctatttttgcaacccgattacgtagaataataacataaaacaagatacagtaatgaaaagaacatttcaaccttctaacagaaagagaaaaaacaaacacggattccgtgagagaatggctacagctaatggtcgtagagtattagccgcacgtcgtgccaaaggcagaaagaaactgactgtttctgacgaatacaacggagtgaaggcataatcattccttttaatagagataagagggccgcaaaggactggtaacagtgttttgcggcttttcttttgtgaaactttcaagaaaacatcattgcaatgcgcctaaattgcattatctttgcatcaaaagcgaagataaactgcaccccggcataaaaaatgaacgggttcattttattctgctctcggtttgcattatctttgcatcaaattgtagtgattatgactataaaggaatttttttctttccggcagaacaaatacttctggataaacatcctggcaatgattgccgtggtagtgttgttgatgttcggaacattaaaaggaatcgatatatatacccatcacggcgaggctgtggtagtgcccgatgtgaaaggcatgacggtggcggaggccggagcggtgtttgacagccggggactggcttgtatcgtttccgactccacgtatgtcaaggataaacctgccggctgcatcctggactataatccggctgccgggcagaaggtgaaggagggacgtattatttatctgacaatcaatgccatcaatatacctttgcaagtcgttcccgatgtggcggacaacagttccctgcgtcaggcggaagcgcgtatcctggcttcgggcttcaagttgaatgacatccaatatgtgcccggcgaaaaggattgggtgtacggcgtgaagtaccgtgagcgtatgctcgctatcggtgataaagtgcctatgggtgcaacgctgactttaatggtaggcgatggcaacagggaagtgctggaaggcgattctttgtctgcggacgaaagcatggggaacccggacgaagccgtttccgaaggttctgctgccgacgaatcctggttttgatgttaaaggtgtgcgagagtgaaagtgtctttaatccgtaaaaaggacaaacgatgatcgaagagttaccggacgacatagagaatgatgtactggacgatatagaacctgtaggtgacgagtcgcagctttacgagcacttccgcgtagtagtggataaggggcaggagatggtgcgtgtggacaagtatctgttcgaccgcctgaccaatgcctcgcgcaaccgtatacagaaagctgccgatgccggatttgtgatggcgaacggcaaaccggtgaagagcagttacaaggtgaagcctctggatgtgataacggtgatgatggaccgtccccgctatgagaacgaggttattcccgaagatattcccctggatatagtgtatgaggacaagtacctgatggtagtcaataaaccggcagggctggtggtgcaccccggacacgggaactaccgcggcacgcttgtcaatgccattgcctggcacatgaaagatattcccgattatgatgccaacgaccctcatgtggggcttgtgcaccgtatcgacaaagatacatccggcctgctggtaattgccaagacaccggatgccaagaccaatctcggtcttcagttcttcaacaagaccaccaaacgccgttaccgcgcccttgtctggggaaatgtggaacaggacgaaggcacaatcgtcggtaacgtaggccgtaatcccaaagaccgtatgcagatgaccgtccttccggacgaccagggcaagcatgccgttacccactaccgtgtgctggagcgcctggggtatgtgacactcgtggagtgtgtgctcgaaacgggccgtacccatcagatccgtgtacatatgaaacacatcgggcatattctctttaacgatgaacgctacggcggtcatgagattctgaaaggaactcattttgccaaatacaaacagtttgtaaacaattgcttcgatatttgtccgcggcaggcgttgcacgccatgacgctggggtttgtgcatcccgttaccggagaagaaatgtactttacctcggagctgccggacgacatgaaccggctgctcgataagtggagaggctatattagtaatagagaattagaatgaaacgcacaatcgctattgtatgcggaggagacacttccgaatttgaggtctccttacgcagtgcacaaggaatctactccttcatcgacaaggagagatacacattatatattgtggagatgcgcgggaccgactggcacgtgcagctccccgacggaacgaaaactccggtagaccgcaacgacttcagcttccggctggacggtgcgaaggtagtgttcgacttcgcctatatcactatccacggcactccgggagaagacggacgcctgcaggggtatttcgatatgcttcacatcccttattcctgttgtggggtacttgccgctgcactgacgtatgacaagtttgcctgcaaccagtatctgaaggcgttcggcgtgcgcattgccgattccttgctgcttcgtcagggacagtcggtttccgatgaagatgtaatcgggaagataggcttgccttgttttatcaaacccagcttgggcggttccagtttcggtgtgacgaaggtgaatgtgaaggaacagatacaacccgccattgcaaaggcttttgctgaagccaaagaagttttggtagaggcttttatgtacggtatggagattacctgcggctgctacaaaaccaaagagaagtcggtggtatttcctattacggaggtggtgtcgcataacgagtattttgactataaagccaaatataacggtgagtcggacgagataactccggcgcgcatccccgatgaactgcgcgaccgcgtacagaaactcacttccgccatttacgacattctcggcgcttctggaattatccgcgtcgactatatcattaccgaaagagaaaagataaatctgctggaagtgaacaccactccgggtatgactgccaccagttttatcccgcaacaggtgcgcgcggcgaacctggatattaaagatgtgatgacagatataatagaaaaccaattttagatattaactattaggtatcaaccggctatcagatgcccgcttgttagtcttgaaaccaaatacttattgtttaaaatttaaaattgcatatcatggaatttgaagaaatccgcccttatcatgacgaagaattacctcaggtttttgaggaattgattgctgacccggcgttccaacaagtggcttgcgccgttatgccgggtgtcccttttgaagctatcgcgcaaaagatgcgtgcaagcaagaccaagcaggagtttcaggaaaatctttgctacggcatcttgcataaattggccaaagatactacagacggactgatattggagagcatggctgtgctgaacaaacagtcggcctatacctatgtctccaatcatcgggacattattctcgactccggttttttgtctgttctcctggtggagcagggattggacaccgtggaaatcgctatcggtgacaatctgctgatttatccctggatcaagaaactggtgcgtatcaacaaatgtttcaccgtacagcgcgcgctgaccatgcgccagatgctggaatcgtccatacggatgtcccgctatatgcactacaccattgcggagaaaaaacagtctatctggattgcccagcgcgaagggcgtgcaaaagattccaatgacgttacgcaggacagcgttctgaagatgctggcaatggggggcgacggagacattatcaccaatcttcaggaattgaatatcgttccgctctccatttcgtacgaatacgacccttgcgactatctgaaagcgcaggagttccaactgaaacgcgacatacccgactataagaaaaccacggatgatgacctgctgaacatgcagaccggacttttgggatataagggccgcgtctgtttccgtatggcatcctgtatcaatgaggatttgggtgaactggagcggacattgccgaaaccggagctgttcgtagccatatctgctttgattgacaagcgtatccatgccaactaccgtatttttgccaccaattacgtggctcacgatttgctgtataaggaagaacgcttcgtagagcattataccgcagaggataagaagcgttttataagttatatcgacggacagttggaacgtatcacccttcccaataaggatgtggacttcctgcgtgagaagctgctgctgatgtatgccaatccgctgacgaattatctggctgcaaccaaatgatgtttttgccgtgcgccggagtggaattgtaacagtttgcgtggtaagtaagtatgaaaaaacattgctgtagtctgcttgtcgtcctgctgtcgtgtctgctggcatcgtgcggagacgatgattaccgctatccttccgtgaagcaggatttcctgactgcattttccggaacggacgggcggctggaatcggtgctgaccgatgaaggtgagcggcttcagattgttgaaggcgcatcggggctgcgtgtaagtgcggacacggccgttcgcatcgttgccaattacgagacattggcaatcggggacggcgatgttgcgggcgcaaagctgtatgctttgctgcaaacggtttctcccgtgccactggctgccgcggagtttgaggagggcgtgaaaacagaaccttcggagatacagagtatctggcgggggtatgattatctgaatattatagtaaaggtaaaacagcagggcaagcatcttttccattttgtggaggatgaggctgttgtggatgaaaacagcggacgtgtcaaggtgcggttgaccttgtatcacgaggtaagcagcagtgtgcaggattatggcaagcgtgcttatctgtccgtccctttaaagcaatatatgaccgagggcgtgcggggggtggatgtccggtttaggatttatacttattccggctgttttaagacttatgttttggacgaagcagggcttcgtgtagaggaaggctgattttatacattatatatatagataagaaagtgtatcaaagtggggcgggatttatatgccggttctttgatacactttcttgtctatattcagatgctgttgtgatgaacgctgtcggcaattgtcacttcaatgcccatttcttccaggcgtaaagcggtggaaggcgggatgcgtgagtcggtaatgatgtggtctacatcttccatatcggcaatcttgctgaaacctctccgtccgaacttggaggaatccgcaagcactatcgttttctgggcagtctgcatcattacgcggttgaggctcgcttccatcatattggtagtggtgatgccgaagtcgaggtcgatgccgtctacgccgataaacagcttgctgcacgaaaagtctgccaatatgttttctgcatatttccctaccacggacagactgctgtgccgcaatatgccgccgagttgaataatatagatgttcttttcgcttgccaggatattcgatacttccatggaagcggtaataacggtcagttcatctgccggaacgatgctgcgggcaagtgcgtgcatggttgttcccgatgctatcaatatggaatctttgggagtgatgaggctggcggctttcattccaatcagtctcttttcttcgacatacagcttttctttctcactgacgttccggttgtcgatgtaagggtctatcaaaatagcctttccgtggtttcggtatagtttcttttctctttcgaggtctgttaaatccttacgtatcgtaactgacgaaacattgaggtgtgtggctaaatctgttaccaaaatagaattatgctgtatcaacaactccagtatgatagattgtctctcttcttttgtcataataggccttaaatagtattcaatgcgctaatatagctgaaaaaaacagtataaagaaactcagaatgctaagaaatgataaaatgtttgtccgataatattcccttttgaaacgtaagtataatctatgcttacaggtatgaaacttcttgcctgaagattttttttctgttattcagtgaaaaaacagcgaaaaagtttcgtagttataaaaatagcttttatatttgttgcgaaatgaaaccttgtttgttttgataagaaagcagcggtgctgttatactaatcttgaaaatcaaactgcgttaactaatattataagagacatgatacttaatagcgagattaacgaatttgacgtcatcattgttggcggaggcgcaaccggagcaggtacggcaagagattgcgctttgcgcggaatgcgcgttttgcttgttgaacgctttgattttgctgccggcgccaccggacgaaaccacggtttgcttcacagcggtgcccgttatgcagtgaccgatagagaatcggcagccgaatgtattaaagagaatatgattctccggaagatagcacgccattgcgtagaggaaaacggaggtttgtttatctctcttccggaagacgacctttcatatcaaaacttatttgtagaatcgtgccgggcagcgggtatcgatgcacaggtaatcgaccctgcagaggcgaggttgatagaaccttcggtgaatcctgcgataataggtgcagtgaaagtgcccgacggttcgatagaccctttcaggctgacgctggcaaatgtcatcgacgccaaggctcacggtgcgaaagtgctggtgtatcacgaagtgaccgcattgattcaagagcagggaagagttgtaggagtcacggtacttaatcataaaacaaaaaccgaacataattattacgcacctctgactataaacgcgggtggcatttggggacatggcattgctgcaaaagcaggcataagggtggacatgttcccggcaaaaggctcgttattgatttttgggcatcgaatcaataatgtagtgcttaaccgttgtcgtaaaccggccaatgcagatattcttgttcctggagatacaatctgcttgattggaacgacttccagccgcgtgggatttgatgaggtggatgatgtgcgggttacaccggaagaggtggatttgctgttgtcggagggcgagaagttggctcctgctctggctacaacccgtattttgcgtgcatacgccggcgttcgcccgctggtggctgccgataatgacccttccggccgtaacatcagccgcggcatcgtgttgttggatcacgaagtgcgcgacggtgttccgggattcgtaactatcacgggcggaaaactgatgacataccggctgatggcggagtgggccacagacctggcttgcaagaagcttggcatcgacaagccttgcattacaatgaacgaaccccttcccggttcgcgcatggaagaggaccgttcgggaggtaagcaggtggtggcggaacagcctaaacgttcttcggtaggccgtcacggtgaaatggctgccaggattgcatcggaaagcaagtacgataacagcctggtttgcgaatgtgaggatgtgaccgtaggtgaagtgaactatgccgtgaacgaacttgatgtgcacaacctgatagacctgcgccgccgcacacgtgtcggcatgggtacgtgtcagggggaactctgtgcctgtcgtgcggcaggattgctgggcgaggcgcataattgctcccaaaaggcgaaagaggatttggcttcgttcctgaacgaacgctggaaaggattgtatcctgtggcatggggcgaggcgctgcgcgaaagcgaatatacccagtggatatatggtggagtttgtggaatggaataaaatgaataaagatgaaatttgatactttaatagtaggtggggggcttgccggtctgacgtgtggcatccgtttgcagaagaatggcgtgaagtgtgctatcatttccaccggacaaagtgcgttgcatttttcttccggttcattcgatttgctcaacgaactggccgacgggacaaaggtggataatccgcttgcggctgccggcagggttggcgcaaatcacccctacgccaagctggacggtaagtttgcatattatgtccgtgaggcgaaacagttgttccttgattgcggtattgaagtgaacggtgatgcggaacgtaatcatttgcgtataactccgatgggtacgttgaagccgacgtggctgacgttctccgacttcacgcaactttcatcgccccatgatatagcaggcaagaaagtgctggtggtcaatatagccggatttcttgacttcaatacgaagtttgtagccgacagttttgagaagtgcggtgctgaatgccgtatatcttctatcaatcttcccgaactggaaaggttgcggattagcccgacggaaatgcgttccaccaatattgccagggttctggagaatgacaaaacgcttgagactttaatcagggagttggccggaaaggtatccggctttgacagcgttgctttgccggctgtattcggactgtcgtctgccgcaccggtaagaaagctgaaagaagcgttggacattccggtatggctgattccgacaatgccgccctctgtgccgggcatccgtgcacagcaacagctacgccgttcttttgaagcgctgggcggagtctatatgctgggcgatacggtagtgaaagccgacttcaaaggcaatagagtgcaggcggtatattccatcaatcatggagatatctcgtttgtggcggaaaacttcgtgcttgcttccggcagctatttcagcaatggactggtggcgcggccggacagtgttatcgaaccggtttttggcagtgatgtggattttacggcgggccgcgacagttggtatgacaaatcgttcttcaacaagcagaattatatgacgttcggtgtggccaccgacgacaagttgcggataaagattaagggtgaagtgcagcagaacctgtttgcagcaggttcggtactgagcggctctaatacgatacatgaaggttgcggtgccggtgtttccatgcttacggcattgtttgtagcggataacttaataaaaggatgacgtcatgaatatgcagcagaataatataagcgaaaacaattttgagcaatgtatcaagtgtacggtctgtacggtatattgtccggttattccggtgaatcccgagtatcccggtccgaagcaggccggtccggatgaggagcgtcttcgcttgaagagaggcgaatactttgatgaggcgttgaaatattgtctgaactgtaaacgctgtgaagtggcttgcccgtcgaatgtgaagattggcgacattatccagttggcgcgtatcaaatacagcaagaagaaaccggcattgcgcgatattatgctggcaaatacggattttgtaggaaccatggcatctgcctttgctcccattgtgaataccacattgtctttgaagccggtgaaaatggtaatggacggagtcctgaagatagaccatcatcgtgtgttcccgaagtattcttcccagacattcgagagctggttcaaaaagaatgcgatggcttcgcaggataattacaagaagcatgtaagttttttccacggctgttatatcaactataatttccctcagttgggcaaagatatggtaagcgtgcttaatgcaataggctatggagtgcatttgcttgaaaaggagaagtgctgcggagtggctttgatttccaacggcttgatcaatcaggcacgtaagcaagctgaggcaaatctccgttcagtccgtaagtcggtctttgaggataagcgtccggtcatcggagcttcatcgacttgtattttcacgatgcgcgacgaatacccgcatctgcttggcattgacaatgcggacgtacgcgacagcatagaactggctacccggttcatattccgtctgctcgaagagggaaacgtaaaactgaaattccgtgatgacgtgaagatgaagattgcctatcatactccttgccacatggaaaagctcggttgggcgtactattccatcgctttgttgcgcagtattcccaatataaaccttaccgtgctcaattcccaatgttgcggaattgcgggtacatacggctttaaaaaggagaattacgaaacatcgcagggaatcggcgcttcgctgttccgacagatagaagaagtggctgccgactttgtcgctaccgattgcgaaacttgcaaatggcagattgaaatgtccactccggcaaaggtgaaacatcccatttcgatactggcagaagcgctcgacctggaagcaacccgtaaattaaacagtgataaataatattattcttaaaatcgtagtactatgtggaattttttagcaccacctgctcataagcaggaattaccggcagagaagattgattcggcgtataagagttaccgttggcaagtcttcctgggtatatttatcggttacgcaggtttttatatcgtgcgtaagaacttctcgatggccattccggaacttgcccagtttggttttgaaaagggagagctgagtatcgttctctctatgaatgccgtagcttatgctttgtccaagttcctgatgggaagcgtgtccgaccgcagtaacgcacgtgtatttcttccgttaggattggttttggctgccgtgtccatgatgtttatgattgtgccggtacagttcttcggtccggaacagaaatcactggccattatcgtaatggctgttttaaacttcctggtaggttggttcaacggtatgggatggcctccttgcggacgtgtcatgacccactggttttcggtgaccgaacgcggaacgatgatgtccatctggaactgtgcccataacgtgggcggtgcattggttggcccgatggcagtttacggtgcgttgtggttcggttcctggttctatggtgccgacgcatcccgttacttcctcatcggtacgtatgtgttcccggcagcagtggctattcttgtagcgttggtggcatattgcctgattcgcgatacccctcagtcttgcgggcttcccactattgagaaataccgtaacgactatcctaaaaactatagcgagaagcaggaagaagtgcttaccgcaaaggagattttcttcaagcacgtattcaacaacaagatgctttggtacattgctattgccaatgcttttgtctacatggtacgttacggatgtctcgactgggctcctactttcctgaaagaagctcagggatatgatatcaagcaagccggctgggcatactttgcctatgaatttgctgcaatccccggaacattggtttgcggctggttgagtgacaaagtatttaaaggcggacgcgcaatgactactatcatctttatggctatcgttgctttgttcatcttcctttattggcagttctccgataactatatagtcgtaaccttgtctctgattgctatcggtttctttatctacggaccggtaatgctgatcggtgttcaggcgctcgaccttgctcccaagaatgccgcaggtacggctgccggacttaccgggttcttcgggtacttcttcggaactgccattcttgccaacgtcgttctcggttacgtagccgaaatggcaggctgggattggacgttcatactgctgcttatagcttgcgccctgtcaattattctgatgtcctttacctataaggacgaaaaggcattgcttgcagaaagaaataaaaaataatctttttaagataatatagaatgacattaaaccagtatttaccttaaaaattgaactatgtcgaagaatccaatcaaattaagtgcaaccttgttaggtatggccttagtagctttcacttcctgtgaagatcaagattttacagatgtgaataacgatgcaacacgtgttgaagtaaacacaatctctgccgaaatggcaaaagtgcgcgactacgtacccccttatgctgtaatggctcaccgcggttctactttctgggctccggaagaaacggaatcggcttggcgctgggcacgcgaaatgggtgcggactacctcgaatccgaccttcagtgtacgaaggacggtgttatccttgccaatcacgatgacaacctgaagcgtaccactaatattgaaaatgtatatagcgaactggttccggcaacccgtaaggcgttctatatgcgtcatggaatgagtgaggcggaagccgaaaaacttgtagaagccgataaagcaagtttccgtccttactatgcaatgtcttacatgtatgaggagttgcttgcactcgatgccggcagttggtttaacgaaacaagcattgagcaggctcgtgagtcgttttccgaacaacaccagtatatctcggctcttgaagaccaaatccgttacgctgaaggaaaaatgctgaagcgtgatgttaacggtgaacgcatatacactgttaccggtacttggaatccggataaaccccgcgactgtctgacctataaatttgaatatgtggatgatccgcaggatacaggcaaccgtccgggtgtctatattgaattcaaagagtcttggctgaatccttcggactttgaaaagcgcgtttacaataaacttgacgaacttggttggaacatcattaccaaaccttgcgacggcgaaccgttctataagaataataaagtaaatgtcggtaataccaacggtaaggtcattctccagacattctctctcgaaagccttcgccgtacggcagaagaattcaaaggcaaaattcctatgtgcttcctgttgtgggagggtaacggtgctaccgacctgaaacacgatactcctcagggttatgcttctttcattaatctcggtttggaatacaaggctcatatcatcggtccttgcatcgcaggcgctcccaacgactatccggaaatgaatgctccgtggcaggcctatcttatcaagaaatccggtatgctcaaccatccgtactcattcgattcttatgcgcaaatgggaaaatatttcggtcagtacaactggggaaatacagtacaatatgatgagctcctgcatggcatctatggcgacggtctgtttaccaaccgttctgaaatgagcttgaaatacttaattgacaacggtctgcgtaaggctccggctcctcagacagtgccggatgctgttgaaacacttaagagacttggttactaattaatttattaacactaatacagattatattatatgaaaaagtatattttaatgccggtattggctgcattgtcactgtcaggatcggttgcccaagcccaggactttgataataagccggttgttaatgtaagcaactccaaggagaatctgaactttacgattggcgcacgttttatgatggacggtgcatactatcattcggatttcactccggtgaaatcgggagctgctattaccgatgcgcgcatccgtacctctatgagctatgaagactggtacttctatgccgatttcgacttttccaaaggcaagttctcacagaagaatatcttcctgcaatactcgctggaaggtgcaaaaggtactcatcgctttaaagccggttactacaataatccggcatccatggcaaacaataccagccgcggaagcctgcacttcatttcccgctcggcggcagccaatgctttctcaccatcacgtgagctgggtttgagttatattttctacaacaaccacttcttcgccaatcagggtgtatttgccgagaacaagtacaacgaccagccgtcgggatatcagggcatgtcattcggcggccgttgggtatggcgtcccattaataacgaagacagaacattccacgtaggagcagctttccgttatgccaatatcgctacgggtgtggtggagaacaacgtgctaaaaacagaactggatctcggttcttcattggaaacctacgtagatgctactcaggacttcctgtctgccaaactgccgtgggcgaagaatgtatttgatgtaggtgctgaattcttatacaagacagataacttctttacccgtggtgaatatatgtacaaacatgttaccaaagaacgtgacgaccaggcattgtttgaagctaatctgggttctatcgactcttggggttcactcgaagcatggcagaaaggtaatccgcttggtgagaactctttccacggagcttatatcgaagccggttacaaaatcttcggcgatccgtatcaatacagcaattccgatgctttgttgaaaggcttgaacggaagagcgcttgaagtggttgcccgttatagttataccggtctgaatgacctcgttgaaggcgagaaatatattcccggacgcgaccaatactatcccaacggtatattggcagactatccggctacatcattaagtgtcggtggcggtaacatgcactccgctactttgggtgtaaactactctttcaacaagtttgcccaagtaatgttgagctacacttacaatcgtcttgaccgtgacaagttccaatatgacaagaacttccacgtgctccaggcccgtctgatgttccaattctgattgtgtgcatttgtttataataatggttagtgagcctctgtaatgaggtaaaaacaagaaaggggatgcagtgaaaagcatcctcttttttgttgtacagaggtgtaggtgcagatatttcccggtgtgggcggcataataaacgaaaaagttataactttgattgcatttttaattcagactaaaataagtagacttatgaaagtattctttgcgggcatttgcctgttcttctccactctcttctcatgtcagcagaaaggagaggatttcgaatccgtctcggcggacgagtttgccacattgatagcagattccgacattcagcgattggatgtacgtacggttgccgaatattcagaagagcatattccgggcagtatcaatatcaatgtgctggacgaacagtttgctgccattgcggattctacacttcaaaaagataaaccgatagctctttattgccgcagcggaaagcgtagtaagaaagccgccgctattttgagccggaaagggtataaggtttatgagctcgacaagggctttatcgggtggaaagaggccggaaaggaaacggagaaatagtttcttttaattctgattctgtcccccttgccgacacatagcactgaccgagctgtcgttttgcagaaaggagcttgcgtgagtgctggcaaatataaagaacagtgctggcaaatccttggccggtatgctgtgttttattcttcgggcacatgtaaaatgtcgttatgcttatagtaaaacttcgttttgcagttgcgggctgcccggttgccaattgcgggcccgacagcccgcagctggaaactattcgtcccgcaattgcgggacgaaaaaaaacataaggcatactaaggttttgtatcgtatataagcgtattatctatgagagatacggagattacgataaaatggtatttataacccttctatcaggcgtttcaacacgactgtcgcagaaatctctcggttggcagcttctggtattacgatggattgcgggctttcaatcacgtcgtccgttacaatcatgttgcgtcgtaccggcagacagtgcatgaaataggcattgttggttactgccatttggcggtcgcttacggtccagtcgcggtctttgctcagtatttgtccgtagttgtcgccggtataggcagcccagttcttggcatatacgaagtccgcaccttcaaaggctttcatctggtcgtattccacacgggcattgcccacgaatttcgggtcgagctcataaccttcagggtgggtaatgacaaagtcataatccgtggcgttcatccattccgcgaaggagttgggaacagcctgcggcaacggacggggatgcggagcccatgtcatgacgactttgggacgtgccgttttcttatattcctcaatagtaatgaggtctgcaaaactttgcagcggatggcgcgtggcggcttccatggagaataccggccggccggagtatttgataaactggttcagtattacttcgttgtaatcgtattcgcggtcttcgaagcgggcgaaggaacgcacaccgattacgtcgcagtagcaacccattacggggatagcttccagcagatgttcaggcttgtcgccatccatgatgacgccgcgttcggtttccagcttccatgctccctggttgatgtccaatacaatgacattcatgcccaggttcagagcggctttttgagtgctgaggcgggtacgcagacttgagttgaagaatatcatcatcagtgtcttattacgtcccagctctacatatttgaaacggtcttttttgatttcgaatgcttcgtccagtgcagttttcagattgccgatatcctgcacacaagtaaagttcttcatattttttttagcgattagtgattagcgattaagcgttaatttactttcttatctgtccttctccttcaataatccacttgtacgtggtgatttcctctaaagccataggaccgcgggcatgcagcttctgtgtgctgatgccgatttccgcacccagtccgaactgtgcgccgtctgtaaaggaagtcggggcgttgacgtagacgcaggcggcatctacttcgcggcagaaccagtcggcatgtcctttgtcttcggttacgatacattcgctgtgtttggaaccatactgctgtatgtgtgctatggcactgtccatgccttcaacgacttttacagccagtttgtagtccagaaattccgtaccgaaatcctcttccgtggcttctttcagcagttccgccggatagtggccttgcaaagaggcgtatgcaagtgtatctgcgtagataatcacattgctttcctgcagcggtgcacagagggcgggcaggtctttcatgcggtcgccgtctacgagcaggcagtccaaagcattgcatacgctgacgcggcgcgtcttggcgttgttgacgatggcggctcctttctttacatctccgtaacggtcgaagaaggtgtggcatatgcctgcaccggtttctatcaccgggatggtggcattctgacggacaaagttaatgagattgctgctgccgcgcgggataatcaaatcgacataaccgttggcatgcagtaatgctgcggtggcttcacggtcggaaggaagcagctccacaacgtgcaggtctacttcaaactgtttcagtacgtcgtgtatcacgctgataatggcgcggttggaagcgtctgcgtcacttccgccttttagtatgcaggcattgccgctctttaggcagagcgagaatacatcgaaactgacgttggggcgtgcttcgtagatgatgccgattactccgaaaggaacgcttacacgttttatcttcagtccgttgggcattactgcctgcttttgtacgcgccctaccggtgagggtagcttggctaccttgcggatatcgtctgcaattcccttcaggcggtctgccgtcagcttcaagcggtcgtacttcggattagagatgtccatgcggtccaggtctttccggttctcggcaaggataaagtctgtccttttctcggctgcatctgcaacggccagtaatatctggttaatcttttcgtcgttcagcgccaaaagcttgcgactggcatactgtacggcggaaaaggtcttgtttaaatccattttcagtgatttattaattgatacttctgcaaatgtagtgattataatcggtattaaccggacttattctatataaagatagtcatagtgcactacaggtttcttgccgtgctttcccatagcctcgcgagcctgctccgaactgcaattggctttgcctacgcctatcggatttccttcaaagtctatgatgcgcacaatgtcgtccttctcgaactcaccccgcacatcggtgatgcctatgggaaggatgctgactgccttgtcggatgcaagtacttttgtggcgcaatcgtcgatgtgcagttcacctttggcaaacccttcactgtgggctatccacttctttacgctggatacaggctggggagcgggaatgaagcgggtgtaagttagttgagaatcgagagcagaggactgaacatcggggaacagggcggggagctcctgatgcagcaggtctaccaggatattgtcgcgcttgccgttggcgatgataacggtaattccctcatcagccactttacgggcaatattggttttggtgagcatgcctccgcgtccgaaactggatttggaagtctgtatgtaagaggacaggtctttgccgtgctctatctcacggatgacttccgatgcagggtcggcaggcgagccgttgtagatgccgtcgatgttgctgaggataatcaggacttgcgcatccatcatggaagctatcagtccggagagctcgtcattatcggtgaacatcagttcgctgacggaaatggtatcgttctcgttgacaatgggaatcactccgttttccagcattacggtcatgcagtttttctggttgagatagtggcgacgggtagcgaagttctctttcatggtgagcacctgccccacagggataccgtgttcacggaatagttcgtaataacggttgatgagtttggcttgccccacggcagagaacagttggcgctggtctacgctatccagcttcttggcggggtgtatctcgcttcgtcccgaagcaacggctccggaagaaacgagaataatttccacgcctgctttatgcagctccgccacttggtctacaagggcggacatgcgggttacgtccaatgtgccgtcacgacgtgtcaatacattactgcctattttgacagcaattctcgttagttgttgttccatatttgtgtgtttcccgatgcgggaaggtttaatctccgtcttctttcttttcgtatgagcgaaccacttccatggctgcttcataattcgcttcattgacgagtactgctacatcgactgctgtctcgggcaggacaatgtttactaccatcccgtctttcaaggttgattcgatgccattgttttccagcaaactttttacaagttcggcttcccaaagcgatccgttgaatacttcgacgagcttgcttttatcttcttctttcatagcggtatgaatttagagttcttgtcctacaaatataacaagttttttcgatttaatgtttaatgccggacaatttatgcctatagctcgatgcgctgcaccgttaccgcttcattcaggaagatagaggcggactcggtgaatttgtcttccgcttcggtggtatagtaactgcatttgccgttccgggtacattgggcgtctatttcgggatggcggtggagatagtctttcaaactgtcggccactaatttgccttgtgatactatcgtgatactctccggcatatatttccggattttgggtagcagtatcggatagtgtgtacaacccaagatggcggtgtctatctcccggtctttggcaaggagttcatttatgtatttgcggacgaagtaatccgttccgtcgccttgtgcttcattgttctctacaagggacacccatagcggacaggcttctccgctgactttgatgtcggggaacagtttatgtatctccaacggataggattcggacttgatggttccgcctgtagcaaggactccgacgtggcggctgcgggttatattgccgatacattccacggtagggcggataacgcctaatacacggcgtgccaggtcaaggtgcggcaggtcgtttatctgtatgctgcgcagagctttggcggatgctgtattgcaggcaaggattacaaggtggcaacccatctcgaacagtttggtaactgcctgcaatgtaaactcgtagacgacttcaaaagaacgcgttccgtaaggggcacgggcattatcgcccaaatagatatagtcgtattccggtaaggcttcccgtattttacttaaaatagtaagcccgccgtatcctgaatcgaatacaccgatagggccgggagtggaaggtagtttttgtttcatacaatctttctgacgctaagagtatagtgtgcagcaaagataatgtaaattgtgaggatagggcacggattgtacgggattttacgaacagaagaattgattttgtaagtcattcagtataattcgtgcccttaggatatttatttaatcttttcgtagatgtagagttcgtgaatttctcccttatagccttcttcggtgaatggaccttgagacatacccaaaataatttgagtgccgcggttgttcaatacaacgaggtcatcgttcacagggtcaatggagagaccttctatctcaccggcacgacggaagtcgctcatttcccggaacagttcaacctttccggctttagcaccggctgcaatactacccttgcgtgtcactacttttccgcttttgtccagttttacgctgaaaggagtgtctcgtacaggttctactccttctttcagtccagtatagggtacttcggtgatgtcagcgatataaatattatcgggtatctgataaagtgattcaccgtcatctgatgtgaaaagcattttaccgtcggcaatgaagataccctgacaccaataaggagtgggacgacattgcattttggtgtagtacttgccggtttcaaggctgtagcaatatacatagcggctgtctacccagtcggacatccataccatgttcttgtcacggtctactgccagaccggaaacttctacctgacctgattcaggacaccagggtaggtctcttttccatttcaatgtttcagcatcgtataccgatactgcaatattgtaaccgcggccatattcgaatttttctacaccgcagtagatttcaccattatagacgtcaatatcaccgaagtgattggctatttccgggtgctgaaacggctggtcattcttcatcaacatattgccttctttatcgtacttgtaaaggactttagtatccgatacgtaatagtagtccttgtctacggcaattccttggcgtccggctacaggaatcactttcttcaaacggtattcactgcctaaatgctgtgcatttacagacattgcacccataacgagtgccaataaaacaaataactttttcatgatagtatgatttttatatgtttaaaaatagaaaacgcccattagttgaatttgatcggagcctcgcttaccgttgttgcttatttcttttgctttgtcggtatagaaagagtgacaatagttagcttgtatcttcacatgattgcaaggattgtaagtgagccccaaaagaatacggtcataattgttcaggctgctgtcgtttaccttatcacgatagaaatcataacgtactaccggcaggaacttacctgcatgccaacctgccaaagcgtagaaaccatcttctttgattatgtcgcgtccgtctttgctacttcctatgtgcccgtattccgcacgcaggtcgagccctttggggtcgttgtaccaagcacctacgatgacgcgattcataggttggtaattaaatgattcatcattgactgttcctttgtattctccccaattgtaggaagcttttatattgaagaattttgtaggacggaaagtcagagcagctacgatgtctttagacttattgttatcgtctttcataggcagatgtccgttggataatgacaggttataacttaaacggctgaatcctcttgcttcgtctgtaaacaagtcgccgaatgccattataccaaggtcacgtccataatctacaaagtcataacctatagcattgcggcaaaccatgcgatagcagatgtttgagaagtcgacagtttccaatgttgaaggggagagatcgtaattctcataaccgagtggcagatagtactggccgacacgtacttggaatgcttttgaaattttagcagtgacaaaagcatccattacttgtaagttcttctgtccatttccattggtagaacccgcaatgccgttaaaagcctcaatttgtaaacggaaagacacgtttttaactacatttccatccataatcaaacggagacgttttgcttggaatgatgatgatccgtcacctactgagttgtagttccagccggtttgaagatagccggagagcttaggcagtttttccaaaactttttcccattttgtaggttcagactcttcggtagctgcggctactgattcagtcactgttgttgtcgttgcagtttccggaactgactctgcaaatgcgaaatttgataccagcatggtaccgctcaaaaagagcgcactgatgattttctgtttcatgtcataatagatttaatgtgaataatgtccctcttattgaggatttgatttgtttgttctgattttccaactttctgtatgaaattttatttcaggatttggaacgtcgttacatttcacgatgaccgctccctctttttcccaatattgcttgactgtgtatccgttcatcgggccatcttctttccctcgtatggtcgtgtcatccggatttacaacaattttcaatccgcacgattggttcagcatgtccatgtctccacggctattcccgccgactataagcggccgtgccttaataaatgtgggaattacattcgctttgccgtcatcttgtggaataggcataattatctcatctgtcaatcttccgttagctacaacagatttgactccgagaatttgtgtatcgggcaaccctaactcttcagcaaggaatttctgatagaggaattccggagatgcagtaagtatccatacttcaaaaccgtattctttcagattagcaatcagttgtttcatttcgggatagaattttccttggtatgaatcaaggtagcattcatagcccatatccatgatttcagcaggagtcatacctgccaaaaaatgaacacggtcttctacataggctttgcctacgttattaccgtcttttaccatacggttcagtatagcaattttgctttttgcttgcggatcgtttctatccttgtagtttttatcggcataacgatacaaggcttcatctgcaagataatagggaacctgtccgataactgttccgtcaccatcgaatactgctactttacggttattcattgtaagtgttgtattcaaaaaactttcaattctattgttgacctcatccgaccaacctgctattttacgataagtttgtgaaaaaacagatgtagggtaactggtcgctaacagaattacaaatagaaattgatgaataagaaatgttttcttatctcttttgcttggggtggaattcaattctttcatttttgttttcttattttgtagtactgtattgttactttcttgcagctttttcttctttgtatgtgaatgatgtgaaaacaatggatagggcgcaggctattatcagcagtatgaacgtccaatcccagcctgccatttcggctacgtaaccgagaacgacgttggcaagaatggcggttccgaagaagtacccgaagaacccggtaagtccggcagccgtacctgcggcattcttgggagcaaggtcgagcgcctgaacaccgatcag

SEQ ID NO: 4087 - DNA, 26932 bp, Unknown
  gut microbiota DNA sequence
ctaactattatagaaaatcattttatcgttctcataatctggaggtccctggttcaagcccaggctggtccacaaactgaaaggctcattcttaacagaatggagccttttttgtttgcagaccctccagatatgatagtatgcccaattctataaagctactacaattctaagaaatacttctatatataaccccattcgcaagaatgttgcagcagtttataataaacaaaaccttatataatcttctatttcatgagcagctacagcataaatcggtgcaagttgctcaaaatgggaatctcttgtaaaacgagagccgttgatggtcatagctaattggctcatattcctttctccgcaaatcttaatgtaacataataataccttcttgccaatagcagtttattggctgcatcgcagttagttacaactccacatgtatgaatttgtactttttatggacaattacagatttcacatttcttatacaatccatacatttgcacatcctaattttttaattttatttttatgagaccaaaagttatcttaaatcttttattcttccttttctgctgtacagcagtacaggcacagacaggaagacagattacaggtaaagtgattgatgccatgggagagttgcccggggtaagtgttgtaattaaaggaacaaccaatgggacaaccacagatttaaacggagagtttaaattggacaatgtaaaaaatggtgatgttttacaattctcatttatcggctacaaaacggaaaatgtcaaagtaggcaatcaaagtaaatttgatattacaatgacagaaaatacccaaaccttggaagaagtgaccgttgttgctgtaggatatggtgatgtcagaagacgtgacctgaccggttctatcggttccgccaatatgggcgatttgaccaagactcctgtcagcaatattaccgaaagcctcggaggacgtattgccggcgtacaggtttcatccggtgacggtggaccgggagataactttaatatagtaatccgcggtgccggttcattgaccggaagtacagctccgctttacgttatcgacggattcccttccgaaagttccggcttaggatcaataaatcctaatgatattgaatccatagacattttgaaagatgcttccgccacagctatctatggagcacgcggtgccaacggtgtagttatcgtaaccaccaaaaaaggcggagccggaaagcctaccattacatacaacggtagcgtaaaagtaggtcttgtaaaaaacacaccggaagtgatgaatgcctatgactttgtcatgctgcaacaagaaatcatgggcagcggagaagaattccagaaaaactatataaccgaactttatcctacactggatgcctatcacaatgctaaatcttacgattggcaagactatatctaccgtaccgctctcagccataaccatcatatatctatgaccggttcgcaaggcgatttgaaatacaccacatctttgtcttacgatgacacacagggagttatcatcaactccggcgtaaaacgctatcaaggacgtgtgaacctgagccagaaagtaaacaacaaactgaagattgactttacagggaactatgccagcactgttcaggacggtcctaccgtatcgagcgccacaagttccatgtctaccgcctacatgtacagtgtatggtctttccgtccggtatcccctactggaagcgatcttctcaatcagatgtacgatgagggtgtcaatatgagtgaggactaccgctttaaccccgtgaagtctgctcaaaacgaataccgtcataagacaaccaataatctccagtttaatgtaggtgccgaatatgagataattaagaaactcaaactgaaagttacagccggatatacatcaaccgactacaaaaacgaagaattcaacggttctcagacacgcaccggtaacagccacccttccaacactcaaagtaagggaataaacgcttatctataccaaagtgaagcaagaagttacctgaacgaaaatacactcagctaccaactgaacaagaactctcataatttcaatgcgatgctcggtatgtctgttcagaaaaataccagctatatacattctatacggacggaaaaaatcagcaatgaatctttcggcatggcaggactcgataagggaagcacaccagccgtaaattcttccaaaggcgaaaacaaactgatgtcttatttcggacgtatcaattataactacgactcccgttactatataacagctaccatgcgtgccgacggttcttccaaatttgcccgcggcaaccgttggggttacttcccttccggctctttggcatgggcttttgcgcgtgaatctttcattgccgaaaatgccagctggctgtcaaacggtaaactgcgtttcagctatggccagaccggtaacaaccgcataggcaattatgactatatggcacacctcattactgatgacgatctttacaaatatccgtggaacggtcagtttgtaccgggttatgtattgagcagcatgcagaatgaaaagctgaaatgggaaacaaccgaacaattggacctcggtctggacctcggcttcctcgatggacgaattaacctgaatatggactattacatcaaaaccaccaaggacttgttgcttgatgccgatatatctgccagctcaggcttctcttctgctaccttaaatgttggaaaattgcgtaacagcggtttggaaatcaccttggaaacaaccaatatcaaaactaaagatttcagttggaattccagcttcaacatcgctttcaacaagaatgaaatcatagccttgaactcaggacaaccttatatgaccagctatatcagttgggataacaaatataaaaccactccggcatatatcagcaaagtaggtgaatctgccggtaaaatgtacggcttcatctatgacggaacttacaaatatgaggacttcaacaagacaatagatgaaaacggcaaagaggtatataccttaaaagaaggcatcccgtattacgtagccggtactcaaccgggagaccccaaataccgtgacctgacaggtgaaggcgaaatcaacgacaaggacaagaccactatcggtaacggtcagcccaaacacataggtggttttaccaataatctggtttggaaaaacttcgacttgaacatcttcttccaatggagctatggcaatgatatcctcaatgccaaccgcatggtgttcgaaaacccttccgccaaacaaaataccaatatgtttgccgcctatactaaccgctggactccggaaaaccccaccagcaacataccgagagcccgggcgcaaggttccaatgaatacagttcactctatgtggaagacggctctttcctgaaactcaagaacatctcattgggatataattttgaggcaaaaacactgaagcccttgcatataagcagcgcacgtgtttacctttctgccgaaaacattgccactatcagcggttattccggaagcgacccggaagtttctacccgtaattctccattgacaccgggctttgactggtctccataccctcgcgccttcagtatgtcattgggattaaacgtaacattctaaccaaatattaaaaatgagactgatatgaaaacagtatataaattattccatgcaacagttttaacattatgctctgccataatgctgagctcctgcgacagttttttggatacaaagccttatgatttcaccgctccggaaactttttattccaatgaaagtgaatgcacggctgctttggccggagtctattatactttggtctacgagaaggtatacggaaacaattactcatgcatgatatccaacgtagacgacctgagttactaccagcgccaaagcggacaattggcaagtcaagtctatggtaacgaccataatccgggaaaccaacatgtatggggtacatgggagactctttacaaaggaatcaacaatgccaacgtttttcttgagaatgttgataaagccgacatggatgaaagtgtgaaaacacgaatgaaaggtgaagctaaatttctccgtgcatattttcacttcctgttagtacaaggttggtacgaagtacccatccgcaagacctcattcaaagatgtgaataattcatccatagaagcaactccccatgccgatgctttggattggattatcggagaaatggaagaatgcgtaaacttggttgatgaccagacctatgataagtctccctcttatatcaaaaagaatacagtaatgggtatccttgcccgcgtatacttgtggcgtgccggatatcccgccaacggcggacagccttactatgccaaagctgcatattgggccaatgaggtaaaaaaatcgaataagcataagatgaatccggatatctatgctatctggaagaacatggcagccgacaaatatgataccgaatacaatgaaagcatctgggaagccgaatttatcggtaaccgtactgccgacggcataggaaactatacagacgggcgtataggaaatgttataggcaatcttcaaaaatgcaccaaagctaccggtaagggatacgcctatggcttttatgcagccactctgatactttgggatttattcgaagaaaacgataagcgccgcgacttgtccatcgctccttattggtatgatgtaaacgacaacaagaaaacatggacaaacaaacagattgtccaacgttcatgtggaaagttccgccgcgaatgggaaacctcttctatgaaagagaagagttatactcctgaaaactatcctattttacgttatggtgatgtccttttaatgctggctgaagcagaaaatgaagcccatcaaggacctacggatttagcatacgaatgcattaatgagatacgccaacgtgcaggcatatccaaattggagggtttgtcctatacagacttccaacaagccgtccgtgacgaacgtgcccgtgagctctgttttgagtctctgcggaaatatgatctggtacgctggggtatttatgtagaagccgtacacgataaattaggagctgcgactcaagataaacgctgggctacaggaaaccagtttatcggtgcacgcgattatgcagcacgtacacaagaaaaacaccagttcctccccattccgacaaaagaactggatgtaaacggcaaattggaacagaataaatattggcaataacctaaataaaagaactacaattcttctaaccttcaactttttttattaacttaaccgaaagaggttgtttcatggcatgaagcagtctgccgttccgtccggaaagagatggcggcagaatgcctctacatcgaagacaacctctttttttgcatacctgctaaaatttcgcaatatgtaccgattctatttgttatattgtctgtttttatgccttggcaacatactctttgcacagacaaccggatttgaaaaaggagtgccacaatccttctgcacagtacaatcaaacgaactctcttcctcagaagagttctacaaagaagggaaaagaagccttgcatggcaattctctccccgttccgtgctcaccgtcaaactagatactcccctacatctggactccatatcaaaagaaaagcgcgggattacactatggatttacaacgaacaagccagaaaagattcgctgcgctttgaattcttctctccaacgggtcatgtatcttataggttcggtttccggctaaacgctcagggttggcgtgcctgttggataggctttgcccacatgaaaggagataagcaagagaatacaatcgccggttaccgtatcgttgctccggacaacaacggacgcgtattcttcgaccgtctcgttttccccgtaaaagaaatgaatcaacgcactactcccgacatgcagatgccctacaataattcacttacatttagagacttatggcattggtgtcgtgtatggcaatgggaacagctggaatatgacctgcctcttcctgctacgctgactccgacagagaaacaggaattacaaaccatagaagaacggctgacaaaagtcctgacagcggataaagtttcacaaggcaaaatcgacaaagcctatgctacattccaaaaagcacagatacaacgctccggaaacggctttacaggagctcctcttgtagttcccgatgacaagttgaaccgcaaaaagggagaaatatccctcaacgatctggaaacaatgctctccggatttgcctatgatgcctattacaatcaatccaaagatgcagaacacaaatattttttagtctgggactatgccatgaaccaaggatttgctttcggaagcggcatgggaaccaaccaccattacggctatcagataagaaaaatatacaccacagcctggctgatgcgcgacaaaatacggcaagctcccacatgcgataatatcctttcaacactatcgttctgggcagccttacaggaaacccgtaaggcatgcggcaaaaaccgcgacgagttactggatacatggcatacattgctgatgcctaaaattgtttcagccatgatgacaaaggatgagagagaaagggttcgcgcactgaaaggactttcacgttgggtatccacgtcgttgagatatactcccggtacgattggaggtattaaggtagacggtaccacttttcaccatggcggcttttatccggcctataccacgggagcacttgctatgctgggacaattcaccaatctgactaacaagacttcttatcaattgaccttatctgccagaaaggtactgaaatccgctcttatcgccatgcgcaactattgcaacaaatacgaatggggcgtaggtatcagtggcagacatcctttcggcggttccatgaaagatgacgacatagacgcttttgcctaccttgccctatccggagacttctcggataaaggagaaccgtttgatcatcaactggccgcagactatttgcgcctttgcaaacgtaatacccctgaagccgcttacttcaaacaacaagggatacttccggcaacagcgccgcaaggcttttttgtatacaattacggttctgccggcattttccgccgcaataactggatggttacgctcaaaggatataacacagatgtatggggagcggaaatttacacaaaagacaaccggtacggtcggtatcaaagttacggttcggtacaaataatgggggctccttcccgcaaagccagcggttacaatgaaaatggctgggattggaaccgactgcccggcaccaccaccatacacctgcccttcgaactgttgaacagtcctctgcctggtactaccatggcacgctccaaggaaaaattcgccggtgcaagttctctgaaaaaccaaaacggaatgtttgccatgaaattaatggaacgagaccttaaaaactttaccggcgatttcgtagcacgaaagtcggtattttgtttcgataaccgcttaatctgccttggcacagacatcaaaaacagcaacagcgactatcctacggaaacaacacttttccaacacgtcttccgaccgggaaaagatttcatcaggattaccggagaaaaagaacagcaaatagggctgcaacaggaactacctgcctcggatacacaaccggtctgccttgaagacggctgcggtaacctgtattttgtgaaagacggaaaggtaaaggtacaaatcacagaacaggaatcgcgccacgaaaagttacgcacccccactaccggaacatttgcgtcggcatggatagctcacggaacagctcccaaagatggaagctacgaatacatggtatggatacagccttctggaaaagaactgaagacccatgtgccggcagccacctacaaagtgatacaacgcgaccgcaagatgcatgccgtaaacgatattctgacaggcaccatggcatacgctgtctttgaagataccaaaccggctgccgataatgttttctctttcttgcccgcagaaacaatggtgatgtatcaaaaagagaataatgccttggtaatgagtgtgtgtactcccaacctcaacattgcggaaaagacattcacaaccaaagaacccagccgtatcataataaaagagttggaactgaaaggtaaatggcatgtgtctgcttacgacaaaagagtgaaaacgacataccggaccggcacaacccaactgagtgtggaatgccagcatgggcaacctgtagagtttaccctgattcaataaagcctcagcagacaaccggtctacctcctgccgattgtctgctggcaaaactcctcaatcatatcacaattatccgtatctttgcaccgttactcaaacaatgcccatgacactgactgaagaaacactccaatttatccgggagcatcgcaaagacaacgtacgcaaccttgctttacaagcacacaagtatccgacagtagacgtacctgccgctatcatccaaattgtgggacgtcaaattgcagaagaaaaaatacccgcttgggcagcacgggaaggtattctttacccgacacatctttccatggaacaatgctcctcggaagtaacggcaaactataaggtcaaaatagtttcagacacgggatacggcagccgcaaaacctttaccgacctcaccggcggttttggcatcgactgtgccttcctatctgcctgcttccaacagtccgcctatgtggagcggcaggaaacactctgtacaatagcagctcataacttttcgcttttaaacttaaaacaggtcatggtctgccatgaagacagcatccgttatctgcaaatgatggaacccgtagattggatattcatagaccccgcccggcgtgatggacacggaggcaaaacaatagctatcagcgaatgtgagcctgatgtttccgctttggaaaatttactgcttgagaaagcgtcacacgttctggttaagttatctcccatgctggaccttacccttgcactgcatgacttgaaacatgtacaagccgcccacgtcgtttccgtcaacaacgaatgcaaggaacttctccttgtattagagcgcgggaaggaattagtacctgaagaaatccctatccactgcatcaacctcactgcatcgcagaaggttcaaaagctcctgttcacccgccaacaggagaaagaacatacatgcccgtatactcccacattgaaaacatacttgtacgaacccaatgcatccatcctaaaagccggagccttccgcagcgtttcatctatatataatgtagagaaactgcaccccaacagtcatctttatacttccgacgagtatatacaggactttcccggacgcaagttccgcattaccgatagcagcagtctcaacaagaaagaacttaaaaagctgataggaacggaaaagaaggccaacctcacagtacgtaattttcctgccagcgtagccgagttgcgaaaacgcctgaagctggcggaaggtggagacatatacctgtttgcaacgactcttgccgatgagaaaaagctgttgattgcctgtaaacagccttaatatacagttaaagcaaataaaagtaaagtatattccaatcttataatctgtcattcagtacatacaagataattatatcgtcccctgatgcatcatttgcaattggtttgtaatattatcgttaccgtttcttcaaaattccgtaagacagacgtaatcccatacctatacttttgccgcagattattaacagataataacaggtatgaaacaaattgtaagagcattcttattccttctactattcgcagcggccagcaacacgacaatggccgacgaaaaagcaaatatcgttaagcaaggtacggtacgcggccgtatcatcgacgtaaccaagcaaactctcccgggtgcttcaatctacatcgagaaactacacacaggcgtgacaagcgacgtcaacggcttctacactttccccaacctcgacccgggaacctatacagtgaaggtgagctatgtaggctactcacccgtagaactgaaaattacaattcccgccggacgcactttagagaaagatgtggtactgaacgaaggagtcgaacttcaggaagtagttgtaggcggcgcatttcagggacagcgccgcgccatcaacgcccaaaagagcaacttgggaattaccaatgtggtatctgccgaccaggtaggcaaattccccgactccaacatcggcgatgccttaaagcgtatctccggtatcaacgtgcagtacgaccagggagaagcccgcttcggacaagtacgcggaacaagcgccgacctgagctccgtaactgtcaacggcaaccgtgtaccctctgccgaaggtgatacccgtaacgtacagctcgacctgattccggccgacatgattcagactatcgaagtaaacaaggtagtaaccccggatatggacgccgatgccattggcggctctatcaatctggtaacgaagaactcaccctataagcgcagcattgctgccaccgcaggaacaggctacaactggattagcgaaaaagcccagctgaacctgggatttacctacggtgaccgtttcttcaataataaattagggctgatggtatctgcctcctatcaaaatgccccctccggttcttacgacaccgagtttacctgggagcaggataaagacggcaaagcatacgtcaacgactatcaaatgcgccagtattacgtaacccgcgaacgtcaaagctactccgccgctttggactgggacatcagcaccaaccacaaactcactttcaaaggtatcttcaataaccgcaacgactgggaaaaccgttaccgcactaacctgaaagaccttgaaccggacggcagcgccaccgtacgcatacaaaccaaagccggaacgcccgacaaccgtaatgcccgtctggaacgccagcgcacgatggatttttcacttggcggtgaacatctcttcggacttctttccatggactggcatgcaagttatgccaaagccagcgaagagcgtcccaacgagcgctacatcgacttccaactcaagaaacagaaattcgatatagatctgagcaacgaacgccagcctttcgcatctcccaaagacggttctacaatgaccttgaatgacgaattcagcctgaaagaactgaccgagcaacaggaagacatcaaagagcaggacttgaaattctccgccaacttcaaactcccgttcaagaatggcaacaaactgaaattcggcgcaaaggtagttcgtaaaaccaaagataaagctgtggacttctacgaatattctccgctggacgaagatgcttttatggaaaacagccttaaaaatactgttgaccaatccaacaagcactttatgcccaataacaaataccagacaggaatctatgccagcaaggaatacaccggagcattagaccttaataaccctgcattgttcgagaaagaacaagtacaggaagaactggcaggtaactttgaggcacgcgaaacggtcagctccggctatgtccgctttgactcaaaaatcacagaccgcatagagctgatgtccggcttgcgtatcgagaacaccaatctggcttataccggacgtacatacgatgcagacgaagacatcaccggcaagaccgaacgtcagcgcaacagctacattaatttcctgccttcgctgctggtaaagtggaatgtaaacgatgacttcaaggtacgcggttcatttacccaaacactgtcacgtcccaagtactcggctcttgtaccgagcgtaaacatcaagcgctccgataatgaaatcaccatcggtaatccggaattgaaaccgaccacatcctacaacttcgacttgagcgccgactattatttccgcagcatcggtctggtcagtgctggtatcttctacaagaaaatcgatgatttcatcgtagaccaagtcagcaccaactacgaatatcagggtaatgtatatactcgattcacacagcccaagaatgcgggcaacgccaacctgctcggagtagaactctcttaccaacgcgacttcggattcatcgcccctgccttgaagtgcatcggcttttacggaacttacacctatacgcactcccgcgtagaagacttcaacttcgaagggcgcgaaaacgaagaaggcctcagtatgccgggttcaccggcacacaccgccaatgcttcgctctatttcgagaaagccggactgaacatccgcgtaagctataatttcgcttccgactttatcgatgaaatgggtgaaagcactttctacgaccgttactacgacaaagtgaactacatggacgccaatgcaagctatacgttcggaaagaaaataaagactacattctatgccgaagccaataacctgctgaaccagcctctccgctactatcagggaacgaaagaccgtaccatgcaagccgaatactacggtgtaaaggtgaatgccggagtgaagattaatttttaaacacatcaccacagagagacagagcattttcttttgtaacacactaaatgaaaaaacaatgcaactgtataccctctgcagtgaataaataacatccaaacaatgaagaaaatattctttttactattcgtcgccctgctgggcaactgggcaagtgcccaaattaccgattattccgtattcgacaaaaagttcaacttctatgtagccaatgacctgggacgcaacggctattatgaccagaagcccattgccgaactgatgggagtaatggcggaaaacggcacagatccggagtttgtactcgctacgggtgatgtgcaccactttgaaggcgtacgttccgtcaacgacccgttgtggatgactaattacgaactgatttacagccatcccgaactgatgatagactggtttcctttgctgggtaatcatgaataccgcggcaacacgcaagccgtactggattattcgaatatcagccgccgctggacaatgcccgcacgttactataccaaagtttttgaagacaaaggcatgactatccgggtagtttgggtagataccgctccgatgatagacaaataccgtaatgagaaagagacttatcccgatgcttgccaacaagattacaaacaacaactcgcatggattgattctgtcctgaccgccgctaaagaagactgggtaatcgtggccggacaccaccccatttatgccgaaacaccgaaagacggaagcgaacgccgggatatgcagtcgcggctcgaccctatactccgcaggcacaacgtagacatgtatatctgcggacatatccataacttccagcatgtgcgcgtaccgggcagtaatatagattatatcaccaacacctcaggttcgctcagccgcaaagtcaaccctattgaaggtaccgttttttgcagtcccgaaccgggcttttccatagtatctgccgataaaaaaacactggaactgcgcatgattgacaaacaaggcaatgtactgcacactgttacacgcagcaaataacccgttttttaagtcaataggaaaatcctgattatacgaagttgtatcggaaagaaccaaaccatcattccgatacgacttctttcaattatttctttttccgtagcaccatccttcggagccgtacttacatttacgtcacgcgtaaccatataatgtggagatataatttccgccccggtttcggaacaattctccgcatttacaagcgcaaacggacttcctcttggctcgtttaatcagaattttgcattatctttgcgcgcaaaataatatacttcatgaacattctattacttataggaggacttctcctcatcctgttaggtgcaaacggactgacagacggagcagcatccgttgccaaacgcttccgcatacccaatatcgttatcggactgacaatcgttgctttcggaacatcagctccggagttgacggtcagcgtatcttccgccctgaaaggaagcgccgatattgccatcggcaacgtggtgggcagcaatatcttcaacacactgatgattgtgggctgcaccgcactgttcgccccaattgccgtaacccggaacacattacaaaaggaaatacctctgtgcatcctgtcttccattgctttactggtttgtgccaacgacatattcctgaacggagacaaggctaatactctcagtatcacagacggcttgcttttgctctgcttcttcgctatcttcctgagttatacttttgccatcgcctcacacagtcccgaagaaacagccggcagtgaggaaactatcaggcaactgccactttggaagtctgtcctctacattctgggcgggcttggagcacttattgccggcggcagtttctttgttgacggtgcaagcggcattgcacgcagcctgggagtaagcgaatctgttatcggactgacgctggtggcaggcggaacatccctgcccgaacttgccacatccattgtagccgccttgaagaaaaatccggaaatagccattggcaacgtagtaggcagcaatctgttcaacgtgttctttgtactgggatgcagtgcatccatcactccgttacacctgaccggaatcactaatctggacttgtgggtactggcaggttccggaatcctgctttggttcttcgggctgttctttgccaagcgtaccatcacccgcattgagggaagcatcatggtgctttgctacgttgcatatacgacattcctcatttataacctgtaagacacccgtttttaaagattttcatgtatctttgccggctcataacaacatacaactatggcaattacaattaaaaaggtctctacgaaaaaggaattgaagcagtttatccgcttcaactacaaactatacaaaaacaatccgtattcggtacccgatctctacgatgatatgctcaataccttcaacaagaagaaaaatgccgctttcgaattttgcgaagccgattattttcttgcttacaaggatgataaaatcgtaggacgcgtagccgccatcatcaaccataaagccaaccaaacctggaacaagaaagaggtgcgcttcggctggattgactttatcgacgaccccgaagtatcggaggcccttatacataccgttgaagaatggggcaaggaacggggcatgacccatatacaaggcccgttaggcttcaccgatttcgatgcggaaggtatgcttatcgaaggctacgaccagcttagcacaatggcaaccacctataactacccttactacccgcaacacatggaacgcatgggctttgagaaagatgccgactgggtagaatacaagatttatatcccggatgccatacccgacaagcataagcgtatttcgaacctaatccaacgtaaatacaatctcaaaatcaagaaatattcatctgccaagaagattgcccgcgactacggacaagccattttcgagctgatgaacgaagcatacagcccgttgtacggttactctgccctgtcacagcgccagattaaccaatacgtaaagatgtatctgcccattctggacctgcgcatggtgacgctggttacagatgccgaagacaaactggtagccgtaggcatctccatgccttccttgtcagaggctttgcaaaaatctcatggccgtttgctgcctttcggttggtatcacctgctgaaagccttgtttatgaaacgccgtgccaagatgctggatctgttactggtagccgtgaaacccgaatatcagaacaagggcgtaaacgccttgctattctccgacctaatccccgtttatcagaaactggggtttgtctttgcggaaagcaaccccgaattggaacaaaacggcaaggtacaggcacaatgggaatatttcaagaccgaacagcataagcgtagaagagcatttaccaaggcaatctaaaaacacgtagttcatcagcatacaaaagacccgcattttgccggcacacatcaccttacctccctttccgtctaagagtttgcaattgtgccggcaaatataatggtcttacacaccatttccccattgataaacatccgttttccccattataaatataccaatctatcaaggataacttgcttttgcctataccttttcttcgttttccaactgcgggatgtccggtttgcatatgcgggatgaagagcccgcaattggcaaccgtggagcccgcagttggaaaacgaggtttttcctatagcctaacaaccttttcaaccatactttttcctattaaatacccagtaaactgaaaaaagtttcagggcatatatttgtttacatagggtgttttatattgattttcttattaactttgcgaaatatcagtgcttacaatacaagatgttttctatggaagataataatatgatgttgccgttggaaggttctgccggttatgaggaaaagacaaccggtacaaataccggcagcagtgaggttgaatacaatgaagataacattcgccatttggacgacatggagcatatccgtgtccgttcgggcatgtacataggccgtcttggcgacggttcgcaaaatgatgacggtatctatgtattgctgaaagaggtaatggacaacagtatcgatgaattcaagatgggtgccggcaaacgaatcgaagtcaacatagaagaaaatctccgcgtaagcgtacgcgactacggacgaggcattccgcaaggaaagctggtagaggcagtcagcaaactgaataccggcggtaaatacgacagcaaggcattcaaaaagagcgttggtctgaacggtgtcggcatcaaggcagtcaacgcactcagcagccgtttcgaggtacgcagttaccgcgacggcaaagtacgcacggctattttcgagaaaggcgtactgcaaagcgacctgacagaggacagtacggaagaaaacggtacgtatatcttctttgaacccgataacaccctctttaccaattactccttccagaaccagtttgtagagacactgctacgcaactatacttatctcaatacggggctgactttcatctacaacgggcaacggattatctcccgccacggtctggaagaccttctgaaagacaacatgaccagcgaggggctttatgacatcgtccacctgaaaggggaagacatcgaaatagcctttacgcataccaaccagtatggagaggaatattattctttcgtaaacggacagcacaccacacagggcggtacgcaccagactgccttaaaggaacatattgcccgcaccatcaaggagttctataacaagaaccaggattatgccgacatccgcaacggactggtagccgccattgccattgatgtggaagaaccgatgttcgaaagtcagaccaagaccaagttaggctctaacaatatgtggcccgaaggccctaccgtgaacaaatatgtaggcgacttcatcaagacggaagtggacaactacctgcacaagaatccgttagtgtccgaagtcatgctgcaaaagatacaggactccgagaaagagcgcaaggctattgccggggttaccaagctggcccgcgaacgggctaaaaaggctaatttgcataaccgcaagttacgcgattgccgcttccacctgagcgacggtaaaggcaaggaccaggaagcggaatcgtgtatcttcattaccgagggtgattccgccagcggctccatcaccaagagccgcgatgtaaacacgcaagcagtattcagcctacgcggtaagcccctcaattcctacggcctgacaaagaaagtagtctatgaaaatgaagagtttaatttacttcaggcggcgctgaacatcgaagacggtatcgaagggctccgctataacaaagtgattgttgccaccgatgccgatgtggacggcatgcacatccgtctgcttatcatcacgttcttcctgcagttcttccccgatctgataaagaaagggcatgtatacatcttgcagactcccttgttccgtgtgcgcaacaagaagaaaacaagctattgctacacagaggacgaacgggtgaaggcaattgaggaattaggtccgaatccggaaatcacccggttcaagggtctgggagagatttcaccggatgaattcagacatttcatcggcaaagacatgcgtctggaacaggtatccttacgcaaaacagacttagtaaaagagttattggagttctacatgggtaaaaacaccatggaacggcaaaactttatcatcgataatctggttatagaagaagatttagcatcatgagaagagcaatctttccgggcacattcgacccgttcactatcggccatgcttcggtagtgcgccgtgcgctgactttcattgacgaaatcgtcataggaataggtatcaacgagaataagaatacgcatttccctattgaaaagcgcgaaaagatgatacgggattactaccgggacgagccgcgcatcaaggtacagtcatacgactgtctgaccattgacttcgccaaagaagtggatgccagtctgattatacgcggcatacgcacggtaaaggatttcgagtacgaggaaacgattgccgatataaaccgcaagctgacaggaattgaaaccattctgctctttacggaaccggaactgacctgcgtaagttccactaccgtacgcgaactgctgcaattcggaaaggatataagcatgttccttccggaaggaatggaaatgagtgatgagatgaaatgattggtagttagtgacaagaataatgaagaagatttttgctattatagtatgtatatgtgccgtaacggcacaggctcagaaaatgggcaatgaagccctccgcaagttgcaaatggcagagtttgccatagccaacctctacgtggactccgtggatgagaacagactggtggaagaggccattatcaagatgctggcgcagcttgatccgcactctacctacaacaatgccgaagaagtaaagaaaatgaacgaacccctgcaaggcaacttcgaaggtatcggcgtacagttccaaatgatagaagatacgctgcttgtagtacagcccgtcagcaacggtccctcggagaaagtaggcattcttgccggcgaccgcatcatagccgttaacgactccgccattgccggagttaaaatgagcacggaagacatcatgagccggttacgcggagagaaaggctcggaagtcaaactgacaatcgtgcgccgcggagtgaatgaccccttattcttcactgtaaaacgggataaaatacctattctcagtctggatgccgcatatatgatacagccccggacaggttatatccgcatcaatcgctttggggcaaccactgccgaagagtttcttaaagcattaaaggagttgcagaaaaaaggaatgaaagacctgatactcgacctgcaaggaaatggcggtggctatctgaacgccgctatcgacctcgccaatgaattcctgcaacaaaaggacctcattgtttatacggaaggcagagccgcacgccgcagtaatttccatgccaaaggaaacggaaagtttaaagacggccgtctcgtcgttctggtggatgaatattccgcatccgccagtgaaatcgtaaccggagccattcaggattgggacagaggtgtagtcgtaggccggcgcactttcggcaaaggattggtgcaacgccctatcgacctgccggacggctctatgatacgcctgaccattgcccgctactatactccttccggccgttgcatacaaaagccttatgacaagaccgccaacccggacggcacgcttagcggggaaaataatctggaaaaatataaccaggaattgatagaccgctttaatcatggcgaattaatgcatgccgacagcatacatttccccgattccctgaagtaccagacaaaaaaattagcgcgcaccgtttatggcggtggcggtatcatgcccgacttcttcgtgccgatagataccacccaatacacagattatcaccggaatatcgttgctaaaggtgtcgttatcaagacaactatgaaatttatagaaagccatcggaaagagttgcaaagcaaatataagaaattcgaaacgttcaacgataagttcgaaatcagcgatgagatattagcaaacatgcagactcttgcggaacaagaaaagattaagttcgacgagaagcaataccagaagtccctgccgctcatcaaaacgcaactaaaagcgttgatagcccgcgacctgtgggatatgaatgaatacttccagataatgaatactacggacagcagcgtactacaagccctgaaagttctaaatgaaggagcgtatgaaaaagtggtaaggttataaccttatcactttccaaacaaccagcggttcagccagcggtttacatagatattcacaatcgcacagcctgcaccgatagccgcacctgccagtacatccgagggataatgtacaccctcattcatacgggacactccgacggaacaagcccacaaggcagaaggggctattacgtaccacttaggatattttatgcacagagaagtggcaagtgcgaaagccgatgcggtatgcccggagggaaatgaaggactgctctcatggctatacggatgtaccctatccggatagcgttcatacggacgttcgcggtcgacaagatatttcataccatacgccaccacaaaagcacccgccacacttgttccgacatatacggcatccttcaacaagtccttgtcctttttagcccatgccgtcaaagccatagctaccgggacaccaatggccacataaggctccgaacgggaaataaatttattgtaattacggacaaatttattatcccagccattaacccgatgtaaggtattaatatcccaattctgtgcaaagagatttgatacaacaaaggaaataaaaaatacaaaaaaaatggttcttctcataaaacctatctattagtttggcgcaaagatagccgaaatccttagagtattcgcaaaattatcttatctttgttgccacaatttacatattaatacaattcacatatctattcatggcattaaatagttgttgctctcggcaaattgattgtgcgctatgtcctaaaacatcccaaggagtattgatatatagccaatatcctaaaggacagcatttccctgccgaaaagtgtacacaaaattgtataatatttatattgaaaggcgagttgcttgtcaatagcgaggaatatcccggtactactctgcaggcccgccaatgtatcttgcaagctatcggctccaaagtagaattgctggcgctaaccgatgttgaatattttacctatcgattcaccgaacttcctctcctctgtgaagaacgctacaaagacatacttgaaagggcttatgcccctctgacctatactcccttgcccatcattcctaaactggaaagattattcggagatttaacggaatatttcagggagcagccgaacacgtgcagcaggtatcttgacgttaaatgccaggagataatttatatcctgacttgctactacccaatccagcaagtctccactttcttctatccaatcagtacatatacagaaagtttccactatttcgtcatgcagaactacgataaagtgaaaaacgtagaagagtttgcccaccttggcggatataccacaaccactttccgccgattattcaagaacatgtatggcgtacctgtatacgaatggattctggacaaaaaacgcgagggcattttaaacgacctgcaacacaccaagcaacgtatctccacaatcagcacccgatacggattcgattcattatcacactttgcccatttctgcaaagactctttcggcgacaccccgcgcgctctgcgcaaacgtactgccaacggcgaaaacataactattatctgtaaagaacataacaaggaacaagaggacgaatgacaccgctgattcgcccggcaatcttgctacccgctcattacggaataatttctttaattccttgtttaatcaaggtatttcctctatttttgcaggatattagtctgacgagcttttaagaatatattttctaactattaaataatttaaattcaatcatttatgtggttaagtaattcatctgtaggaaggaaagtggtgatgagtgttaccggtatcgcccttatcctgtttctgacatttcacatggcgatgaaccttgttgcattggtttcggccaatggctataacatggtttgtgagttcttgggagcaaactggtacgcgctggtagctaccgtaggtctggctgccctgttcatcatccacatcatctacgctttctggctgacgatgcaaaaccgcaaagcgcgcggtaacgagcgttatgcagtagtagacaagcctaaaaccgtggaatgggcctctcaaaacatgctcgtactgggtatcgtggtaatcgtaggtctcggtctgcacctggttaacttctgggcaaagatgcagctccccgaactgatgcacaacatgggcgcacatgccgacatgctcacgctggcttacgctgccaacggtgtttatcacattcagaacaccttctccaacccggtattcgtagtgctttacctcatttggctgggtgcattgtggttccacctgactcacggtttctggagctccatgcagtctttgggctggaacaacaaagtatggatcaaccgttggaaatgtatctccaacatctactccactatcgttgttgtatgcttcgctctggtagttgtcgtattcttcatcaaatcactgatgtgcagcggcgcttgctgataaattattgtaaatgattaaattgtaatagcattatgactaagatagattctaaaataccggaaggaccggtggctgagaaatggaccaactataaagctcaccaaaaattagtaaaccctgccaacaaacgccgtttggacatcatcgtagtaggaaccggacttgccggcgcttccgctgccgcttctctcggtgaaatgggtttcagagtgttcaacttctgcattcaggactctccgcgccgcgcacactctatcgctgcgcaaggtggtatcaatgctgcaaagaattaccagaacgacggcgactccgtttaccgtctgttctacgatacggtaaaaggtggtgactatcgtgcccgcgaagcaaacgtttaccgtctggccgaggtttccaataacatcatcgaccagtgtgttgcacaaggtgttccttttgcacgcgaatacggcggcttgctcgacaaccgttcattcggtggtgcacaggtatcacgtacattctacgccaaaggacagacaggacagcaattgctgctgggagcttactccgcactgagccgtcaggtaaacgtgggtacggtgaaactgtacacgcgttatgaaatggaagacgttgtcatcatcgacggacgtgcccgcggtatcatcgccaagaatctcgtaacaggtaagctggaacgttttgccgctcacgctgtggttatcgctaccggcggttacggcaacgcatacttcctctctaccaatgcaatggcttgcaactgttccgctgccatggcctgctaccgtaaaggagcctggtttgccaaccccgcttacgtacagattcacccgacttgtatccccgttcacggcgacaagcagtccaaactgactttgatgtccgaatctttgcgtaacgacggacgtatctgggttccgaagaaactggaagatgccaagaagttgcaggaaggtacactgcaaggaaaagatattcccgaagaagaccgcgactactacctggagcgccgttatccggcattcggtaacctcgttccgcgtgacgttgccagccgtgctgccaaagaacgttgcgataagggttatggcgtgaacaatacaggtcttgccgtattcctcgacttctccgaagctatcaaccgtttgggcaaagatgtggttgcacagcgttacggcaacctcttcgacatgtacgaagaaatcacagatgtcagcccgtacgaaaacccgatgatgatttatccggctatccactatacaatgggtggtatttgggtagactacgaactgatgacttctatcaagggcctgttcgccatcggtgaatgtaacttctcggaccacggcgccaaccgcctcggtgcttccgcattgatgcagggtctggcagacggttacttcgtattgccttatactatccagaactacctggccgaccaaattaccgttccccgcttctctaccgacctgcctgagttcgcagcggcagaaaaagccattcaggacaaaatcgactggatgatgaacatcaagggtaagaagtctgtagactctatccataaggaactgggccacgtaatgtgggaatatgtaggtatgggacgtactgcagagggcttgaaagaaggcttgaagagactgaaggaaatccgcaaggaattcgagaaggagctgttcatccccggcgagaaagaaggcatgaacgtcgaactcgacaaggctatccgtctgtacgacttcatcacaatgggcgaactcgtagcatacgatgccttgaaccgtaacgaaagctgcggcggtcacttccgcgaagagtaccagacagaagaaggcgaagccaagcgcgatgacgaaaactacttctacgttgcctgctgggaataccagggttcagacgaaaaagaaccggtattgctgaaagaacctctggtatacgaagcaatcaaggtacagactcgtaactacaagagctaatcgggaagttgaacatttaaagaattaaagaaaatggataaaaatatatcatttacgctcaaggtatggcgccagaagggtccgaaagcaaaaggcgcttttgaaacataccaaatgaaagatattccgggcgatacctcattcctcgaaatgctggatattctgaacgaacagctcatcagtgaaggtaaagaaccggttgtattcgaccatgactgccgcgaaggtatctgcggtatgtgttctctttacatcaacggacatccgcacggtcctgcaacaggagccactacctgccaaatctatatgcgccgcttcaacgacggcgacaccattaccgtagaaccctggcgttctgccggcttcccggtaatcaaagacttgatggtagaccgtactgcatacgacaagattatgcaggcaggcggttatgtcagcgtacgtacaggtgctcctcaggatgccaacgctatcctgattccgaagcctatcgccgatgaagccatggatgccgcttcctgtatcggttgcggtgcttgtgtagccgcttgtaagaacggttccgccatgttgttcgtttccgctaaggtaagccagttgaacctgcttcctcaaggcaaaccggaagcattgcgccgtgccaaagccatgttgagcaaaatggacgaactcggtttcggtaactgtacaaacacccgtgcttgtgaggccgaatgtccgaagaatgtctctatcagcaacatcgcacgtctgaaccgcgacttcattaccgcaaaattgaaagactaaccgtactttctgcatttgattaatatcacaagaactcttctatcgggaaaaccggtagaggagttttttttatgataagaaattatggaacctgcttgatatcccaagcaggttaaacagacaaaaacatagaatcctggggtgcagataaagatggcttctcaacctctttcctcaaattacggggagacaacccaaaattcttcttgcagaaattagagaaatgagataaagattcaaagccatatttataacaaatttcagagattgtaaagtttgtatgccgaagttcataaagaatgccttcttttctgcgttcctgcatccactcgtacacaggctgatggaatacagaagtaaagatacggcggaaagtcgtcactgtatatccccctaattcggcaaattcttcaaccgtcttgaccttatcatgattcttaagtacgaaatactgaaaactatccgtgtatttcgataacgtatgcaccaacatggaaagctcataatccgaatagtaacgccacaggataaacgcaagttctttctgcttaaattgcagtagctccctacaaatcttcccctcaaccagataagacttcgaagcttccaagaaaaaattcagttcagaacatattttcaacgggaaaaagataagaggtggaaccacatcttttacgatatgctgaaagcgtccctcacaaaaagattccggctgggaaaaacggtagcatacacactctacatcggtcatggcaagtacttcgtattttgaaccgacagcctgcagaataaactcaccggcatgcaacgtcacgcctgcatattcttcactgttgacaagagcctcaccttttaaaagaaacataatgatattgttatcgcacttgggcataataaagtgaaaccctctactatgagaggcgtataagataagattgtccacagccttggggcatttcaggcaatcggcgttaaccgcttcacaagcgggagagtcgtacatgacaggatagaatgttttgtttgtttgctttggcaaaaataaacattag

SEQ ID NO: 4088 - DNA, 10238 bp, Unknown
  gut microbiota DNA sequence
ttcagaggagtaagagatagagcttttttcttatatagacttgctaaattatatgcttaaatataaaatccctcagattgttacgttgatcctgaatccctcaggtttttacgttgacccctttttacgacctctttgaatgagtataaaagaatggggaaaagaaaataaaataaaaaaatccttgaatgctcggaattcaaggatttgtataattaattttgataacttgtggagcgtatgagactcgaactcatcacctcgacactgccagtgtcgcgctctagccagatgagctaacgccccgttgctaacgtttgcagaactacctgctttatttgatggcgcaaatataatgcattattctgaaataattgctatgtttgcgcaataaaatgcaaaaagaaattatgttgatctataatacgacctatcatgtagaggaaggacaggagaaatacttcctcacctggatgcaggaattttatcttcccgaagtagagaagcacggtgcgctgtatgctccgcgcattgcacgcatactaagccatattgaggagggaagtgtctgttactctgtacagtttgaggtggaaaattcagccatacttcatcgttggcatcaggaacagggagtgaagctgaacgaggaattactgaaaatattcaaggacaaagtaatcggtttcccgacattaatggaggtgatagtgtgatacagccggtaaaggaaaaaattattttgggtatcgatcccggtactaccattatggggtacggggtgctgcgtgtggcgggaaccaagcccgaaatgattgctatgggtatcatagaccttcgcaaatttggcgaccactatctgaaacttcgccacatccacgaacgggtactgggcattatcgagagttatctgccggacgaacttgccattgaagcgcctttcttcggaaagaacgtgcagtccatgctgaaactgggacgtgcgcagggggtggctatggctgctgccctgagccgtgatattcccattaccgagtatgctcctctgaagataaaaatggcgataacgggaaacggacaggcatctaaagagcaggtggcggatatgctgcagcgcatgcttcattttccgaaggaggaaatgcccgtattcatggatgccaccgacgggcttgccgctgcctactgccattttctgcaaatggggcgtcctgttgcagagaaaggatatcacggctggaaagacttcatagccaagaatcccgacaaagtaaaacgctgacctataccttatatgttatacttaatattttatacttaaaaatactaccatgaaattgaacaatcttgtcattatcggagttgcggctacaacagttgccagttgtgccccctcaaagaaagaatacgcgtcgtacgaactctatccggtccgtacgggcagtctggcagaaatggaatatgctccggctgctacgcaatttacgctttggtcgcctactgcggatgaagtgcgtctgatgctgtatgatgcgggagagggcggacatgcgtacgaaacggttgccatgtcgcccgccgaagacggtacgtggacggctaaggtggagcaggatttaaaaggcaagttctatactttcaatgtaaaaatcaacggaaaatggctgggcgatacgccgggtatcaatgcgcaggctgtaggtgtaaacggtaagcgtgcggctgttatcgatatgcgggaaaccgacccggaaggctgggcggaagataaacgtccgccgctggcatcgcctgccgatgtgataatctacgaggtacatcaccgtgacttctccatagacccctcttcgggcattcggaacaaaggtaagttccttgcaatgacggaaacaggtacggtaaatccggacaagttggcaaccggtatcgaccacctgaaagaactgggagtgacgcatgtgcacatccttccttcctatgattatgcctctgtagacgaatccagactggacgagaacaaatacaactgggggtatgacccgcagaattacaatgtgcccgacggctcgtacgctaccgacccttataaaccggatgtgcgtatccgtgagttcaagcaaatggtgcaagccttgcataaggcaggcatccgcgtagtgctggatgtggtgtacaatcacactttcaatacggccgagagcaatttcgagcgtaccgttcccggatatttctatcgtcaggctccggacggcggttttgcagatgcctctgcatgcggcaacgaaacggcgagcgaccgccctatgatgcgcaaatatatggtagagtccgtattgcattggataaatgaataccatatcgacggtttccgtttcgacttaatgggcattcacgacatcgaaaccatgaacgaaatacgcaaggcggcaacagcggtagaccctaccatctttatttatggagagggatgggccgcatcggctccccaattggcgcaggactccttggcgatgaaagccaatacctataagatgccgggcattgcagctttctccgacgaaatgcgtgatgcgttgcgcggtccgttcaacgataaccgtcagggcgctttccttgccggactgccggggggagaggagagtatcaaattcggtattgtcggtgctgtcaggcatccgcaggtcgataatggaaaagtgaattacagtaaggctccctgggcggaacaacccacgcagatgattagctatgtatcttgccacgatgatatgtgcctggtggacagactgaagtccagcatccccggtatcactcccgaagagcttgcccggttggataagctggcgcaaacggcggtgttcacttcgcagggcgtgcctttcatctatgcaggcgaggaagtgatgcgcgataagaagggcgtacacaacagctatcaaagtccggactccgtcaatgccatcgactggaaacgcaagacggagcatgccgatgtgtttgcttattataaaggattgattcaattgcgtaagcatcatccggctttccgcctgggagatgccggactggttcgcaaacacctggagttcctgccggctgagggcggcaacgtagtggcttatcggttgaaagagcatgccggcggtgatgcgtggggagatatctatgtggtgttgaatgcgcgtaaggaaacggctaaggtatcagtacccgaaggcaaatatacggttgtttgcaaggacggatttatcagtgagaagggcttgggaacgatgtacggaccggaaatttcagttccggcacagtctgcgcttattttctataaataagagggctttgggcacaagaatgctggagtttattcctgattacttaggttaaactgatagtttattaggaataaacctgaagtttattcctaatgaacctgaagtttaatggggataaactgatgatgcttttgccgtatcatctttttttctcttatctttgctccgttcaaaccacaaaccattgacaggatgcaacaacataccatacatatagcggggggcgtggcacgcaacccgcttgtccgtttatcgaaccccataacccttgattttctcgacggtgaacatatcgctatcgcaggccctaacggggcaggaaagagtctgttggtcgatttgcttacgggcaagtatcccttgcgcgacggtacgctgacatacgatttccgtccttccgccatacaaaccgcttacgacaacatcaggtacatcgcttttcgtgacacctacggttccgccgatgccaattattactaccagcagcgttggaatgctcacgaccaggaagatgctccgctggtgcgcgacctgctgggcgaggtaaaggacgagtctctcagacagcaactgtttgagcttttccgtatcgaaccgatgctgggcaagaaggtcattctcctttccagcggagaactccgtaagttccagttgaccaagacgctgcttacggctccgcgtgtccttatcatggataaccctttcatcggactggatgctgccacgcgcgagctgttgtacaccgtcttggagaagctggcgcaacttgcttccctgcaaatcgtactggtactttccatgctggatgatataccgtcttttattacccacgtagttcctgttgacaataaaacagtgggagagaaaatgccgcgtgtagcttatttgcaggctttccgtgaacaagatgcccttcgtgctgaggcggatgccgcttctttgggcgaattgcagcagcgcattgccggtcttccttacgaaaacacgaactttacttcggacgaagtggtccggctgaacaaaatcagtatccgctacggtgaccgtacgattctgaaagaactggactggacggtgatgcgtgggcagaagtgggcattgagcggtgagaacggtgcgggcaagtccactttactcagtctggtatgtgcggacaatcctcagtcttatgcctgcgacatccgtctgttcggccgtaagcgaggtacgggagagagcatttgggaaatcaagaagcatataggttacgtcagtccggagatgcaccgtgcctatctgaaaaacctgcctgccattgaaatcgtagcttccggactgcacgacagcatcggtttgtacaaacgtccgcatgccggccagatggctgtgtgtgagtggtggatggatattttcggtgtggcgcatctgaaggataagcctttcctgcaactgtccagcggcgagcagcgccttgccttgctggcgcgtgcctttgtgaaagaccccgaactgctgattcttgacgaaccgctacatgggctggatacgtacaaccgccgtcgcgtcaggaaaatcatagaagccttctgccgtcgtagggacaagaccatgattatggtgacccattacgagaacgagttgccggaaacgataacccaccgtttgtgcctgacgcgtaaccgctaaaatatcctgctgataaagaacagactatggcgtaaatcgctatatttgtaaaataaatccttaaacaaattatattatgaagttctttatcgacactgcaaatttagaccagattcgggaagcctatgatatgggcgtactcgacggagtaactaccaatccctcgctcatggcgaaagaaggcatcaaaggcgtggaaaaccagcgtaagcattatgtagacatctgcaacatcgtgcagggagatgtcagtgcagaggttattgctaccgattacgagggcatgattaaggaaggtgaagaactcgccgcgctcaatccgcatatcgtggtgaaagtaccctgcatcgcagacggcataaaagctattaaatacttttcgggaaaaggtatccgcaccaactgtacactggtattttccatagggcaggcgctgctggcggcaaaagccggagcaacttacgtttcgccttttgtaggccgtcttgacgacatcagtgaagacggtatcgctttggtgggtaagattgtggacgtataccgttattatggctacgctacccaggtgcttgcggcttccatccgccatacggcgcatatcatccagtgcatagaggtaggggcggatgtagctacatgtccgctttccgccataaaaggactgctgaatcatccgctgacggacgccggattaaagaagttcctggaagactataaacgtgtaaacggatagctcttaaattcttataagcctatctttcacgcatttcttaaccaatattggcgagaaatagaataaaaaactttatttttgccgaatatattcagtttaagaaaaagcaccgatgaaagataggcttataggatttctcaagacatactgcttgtttatctgtatattcgcattacagaaaccgttttttatgctcttctaccgttccttgtacgagggcgtttcgtggacggagtggttgggtgtgatgtggcatggactgccgttggacttatcgcttgcaggctatctgactgttgttcctggattgctctttatctgttctgcctggacggtatccaatcttcttcgccgtatatggtacggttattttgctttcgtttcggttttgctctccgttatatttaccgtcgatttgggattatacgaatactggggattccggttggacgctacgcctctgttctatttcttttcttcgcccaaagatgcggtggcaagtgtcagtatatgggtggtaatcgggggaattattgcaatggttgcctatgtggcggcattatacgggatattccatggcgtgctgttgcggaaacgggttttcgaacgcatgaagataccttatcggcgtttgagggtatcgggggtactgttgctgctgaccggattattgtttatcccgattcgtggcggatttacagtctccaccatgaataccgggaaggtgtatttcagtaccgaccagcgtttgaaccatgccgccattaatccggctttcagcttaatggagtctctctctaagcagaaggacttcggcagtcaataccgtttcatggaagcggatgcggccgaccgtattttttccggtttgacagaccctgccgttccgatgcgggacggtatttcggcagattccctgctgcaggctccggattctttgcattcgttgtttacgacaaagcgtcccgatgtgctatttatcatcatggagagtttctcttcgtggctgatgacaacgcttgggggagaacccggcgtggccgtgcagttggacagcctggcgcaagagggcgttctcttcacgaatttctatgcgaacagtttccgcaccgaccgcgggttggttgccatattgagcgggtatccggcacagcccactaccagcataatgaagtatccccgtaagacgcagtctatccctgccattgcaggctgtttgaagaatgccggttacaggacgaaatattattatggcggtgatgccgacttcaccaatatgcgttcctatctgatgtcgtccggttttgaggacattgttgccgaccgggactttccggtatcggagcgtctgagcaagtggggcgtgcacgatcatcttgtgttccgccgtttgctggacgacctgaaggcggaagctgccgacagtaccctggcgggtagggagacgccgcatttccgtgtgttgcagacttccagcagccatgagccgtttgaagttccgtacagccgtttggcgaacgaacgtttgaatgcttttgcgtatacggacagttgcatcggtgattttgtgaaacagttccgcaggttgccgcaatggaagaatacggcagtggtactggttcccgaccatttgggagcctatcccgaacgtatcggaaaccttgaaacgggcagataccggattcctctgctgatagtgggcggggcggtacgcggaccggaacgtatcggtgtctacggttcccaacaggatattgccgctacgttattggcgcagttgtcgataccgcacggtgagtttacgttcagtaaagatatgctcaatccggcttctcctcattttgctttctttaccatgccggacgctttcggctttttgacgccggacaaccaattgatatttaataatgaagcggatgcgattgttgtagatgaaggcccgaagaaagggcaaaacctctctttggggcaggcctatctgcagaagttgtatgacgatatagccaaaagatagaatgatattagcagatgttttgtcggggttggtcgaaacggacaccgacttgttgctcgcaataaacgggtggcgtgccgaatgggcggattattttatgtatgtctttagcgggaagtggatttgggtgccgttgtatgccgccatcctttatgtaattgtccgcaacctgcattggaaagttgccatcggctgtgtcatggctattgcgctgaccattgtttttgccgaccaggtgggggcaaccgttatccgtccggtagtgtgcaggcttcgtccggcgaatctggagaatcccatttcggagttcgtgcagatagtaaacggttataggggcggtcggtacggttttccctcctgccatgccgccaatacgttcggcctggctttcttcctgttttatctgtttcgtaaccgtgccttgaactggttcatcatgttatgggcggtggtaacgtgctattcccgttcttacttgggagtacattatcccggcgacttgctggtaggtgcttttgtgggctttgtaggcgcttctctctgttactggcttttcagccggctgtgtaagtataggcgtaaagagagttatgagcatatctatgttccaatctgggtaggaggaattaccatatccggcattctggcttatgcattggtacgggcgatgttgtagcggcttgctttgtccgcttctttgaggcaaaggtgaataaacatcttttctttggatttgttatccttatcgacagactaataaaaacagaatgcttatggtgagcttaggaagctggatgaacgaaatcctcatcgattggggagtagacccgaaacttgcgaatatgtttgacgagacgatcattgccgtattaatgataggcgtatcaatagggctggattatctgtgtcaggctatatttgtaggggggatgaaacattatacaaagcgtgcaccccaccagtggaatacattgctgatgaaacgcagggtggtgcatcatcttattcatatcttgcccggtatattggtttacttcttattgcccctggcctttgtgcggggaaaagagatactggacttctcacagaaaatatgtgcggtgtatatcattgctgccatactgttcactatcaacggcttgttgctggtgatgctggatgtatataatgcaagggacaagcagaagaaccgtccgatgaaagggtttgtgcaggttcttcaggtattgctgttctttatcggcggcattgttataatcgcggtgctggtgaataagtccccgatgactttgtttgcaggcttgggtgcatcggcggctgtactgatgctggtgttcaaagacagtattctgggatttgtggcgggggtacagctttctgccaatgatatgctgcgtatcggcgactggatacagttgcccaatggagtagccaacggtactgtcgaggaaatcacgttgaacactgtaaagatccggaattgggatgagacgatatctaccgttccgccctatacgctggtcaataactctttccagaactggcgggggatgcaggagagtggcggacgccgggtcaataaaaatatctatctggatatgactaccttgaagttctgtacgccggaagacttggatgctatccgtaagaatgtacctctgatggcggattatcagcccgcggaaggggaagtacccactaactcgcagctttaccgtatttatattgaacgctatctgcgcagccttccggttgtcaatcaggatatggatttgattatcagtcagaaagaaccaaccacttacggagtacccatacaggtttatttcttctcccgcaataaggtctggagagaatacgagcgcattcagtccgatattttcgatcatttgctggcaatagtcggcaagttcgatttaaagctctaccagtattccgattaatacagtaggcggaattccgcccatacgggcaggtggtcactgtatcccccttgatatttcatgccgtagtaggtgcggaagggttgttcgtcgccgtatttccggtcttcggtcagaaggaaaggagcacggaacacatcggctttctcctctgtggtgtataagggagaacctggcatcagcaggctgccggaaagaatgatatggtcgagcagtccccattccccctgatatttgtagctgccgaaatgcttgttgtcaatgccttttcttgctaaaagatggtaaagcatccgggaatccaaagagtccgtttctgtgggcggtattccggctttcagtatcttctgtatggatttgttgtcgggatagtcgttgaaatctcccataatgatgatttgagggcgggtgcggatccggagcaggctgtctgttgtgtctttcaatctttgtgccgctgccaggcggtacggttcggacgcttttgccccgccggaacgggacggaaaatgcacgacaaatatatatcatttgcagaacccacaagaaataat

SEQ ID NO: 4089 - DNA, 9735 bp, Unknown
  gut microbiota DNA sequence
atttgtggagctggagggaatcgaaccctcgtccaaacgaggaaatcataagctttctacatgcttatctttgcctgatttttcgtgcaacggcagaaccaaagccatcaaccgttgccttatcctctaaagtttcatccgagccacgaggctggcacgaactatccccgatttgactgcaccacttgaccggaatgcttcggagcaacagcttccgagtgatgtcccgtcccaacaccttgtgtcgggattaagctaatctactatacttcgattaagcagcaagagcaaattgtctttcgccagataaaattttgaagactgagatttaagtgcaaatcaacgacgcactgcatgcttacttaccatttctgcccgctgtcaaatccagtcaaccccatgacttcataacaaacagaaaatcaaaagaaaacgtatcatttctgatttttgagggataaaaaagagataaacaatatatcttttttctttcctttccgctttctcttctgcaaagatacgaataaatttccttattacggttcttaatcccggcaattttacatcttattttatattatcagaggagaaactgaaagcagccgcacacgcatacccttcctcgtacaggtcggtaagcttacttatgtccctttcgatgcggtccaccactatcggtttttgcggacgtatcacggtaatctctcccgcatcttccagctgttccaccagttccaactgttcgttgtaaacactgctgcgccgattgatagcctcgcgcaggcgaggatatttcttataaataaaagatggaactttagtcccttgaatatctttccgatacccccggttacgcgtaagcaccactacattgcggtcgtaaccgtcgcggcgggcacgcatcaggggaatgctgtccgcaatgccgccgtccagcatcggaatattatccacatacgtaacggggcaaacaaaaggcagactgctcgaagcgcgcacaatatcgatgacacgctccttgttcttcttttcctcaaaatagtcggcctctccggtcaaacagttggtggttaccatgacaaaacgctccgggcaactgaaataagcatcataatcatacggcaggatatgctcgggaaactcacggaacaacaggtcgaaatccatgatgttacgtttcttcagcagatatttcagtccgatataattatacttctccagcaggtcgatattgctgtacctggcacgtccccgctgccccgacatgtacgacaatccgttgcatgcacccgcgctgacaccaatcgtataaggaaagcggatgccccggtccatgaaattgtccaacacgccgcaggtgaatacgcctcgcatgcctccaccctccagaatcaggccgctccgattgtctatatgtattattttctccataagtgtcagaattaacgcaccaaagatagcttttgtttacgatattctgtttatatttgcacacataactataaattaataacaatttaatcatgatgaaaaagtctgtattaattgccgccttaggactgttcagtctgaatacaatggcacaagacgcccccaaagaagagggattcgtctttactaccgtaaaagaaaacccgattacgtccatcaagaaccagaaccgttccagtacgtgctggagcttctccagcctcggtttcctggaaagcgagctgttgcgcatgggcaaaggagaatacgacctttccgagatgttcgtcgtacaccacaccatggtagaccgcggacagaactacgtacgctatcacggcgacagttctttctcaccgggcggaagtttttatgacatcatgttctgcctgaagaactacggactcgtgccgcaggaagccatgccgggcattatgtacggtgattcgctgcctgtacacaacgaactggatgccgtggcaggcgcatacgtagatgccatcgccaaaggcagactcaccaagctgactcccgtatggaaaaacggtctgagcgccatttacgacacttacctcggcaaatgccctgaaaagttcacttacaaaggaaaagaatacacaccgaagactttcggcgaatcactcggcatcaatccggacgattatgtatcgctgacttcgtatacacaccacccgttctacacccagtttgccatcgaaattcaggacaactggcgcaacggtctttcctggaacctgcctatcgacgagctgatggctgttatggacaatgccattaagaacggttacacctttgcatggggcagtgacgtgagcgaacaaggtttcacccgcgacggtatcgccgttatgccggatgcagcccgcggcgcagaactcaccggttcggacatggctcgttggacaggccttaccgctgccgacaagcgcaaagagctgaccggcaaaccgctgccggaagtcaacgttacccaggaaatgcgtcagactgctttcgacaactgggaaacaaccgacgaccacggcatggttatctacggcattgccaaagaccagaacggaaaagaatatttcatggtaaagaattcctggggactgagcggcaagtataaaggcatctggtatgcttccaaagctttcgttgcttacaaaaccatgaatatccttgttcataaggatgcactgcccaaagacatcgccaagaaactgggcatcaaataacgtctttccgaaaccgaaacagaaaaagaaaaacgcattagttgtcatcactcatcaccaaatccctgcatacccctattcatcgggcatacagagagtgacgacaaaattataagagtgacgaccgatattcggtcgtcactctttttttgcagtcttccgaaccaactatctgtattacaaacacttgctattcacagacagaaaattgattataccttgttttctttgttttttgccacatttcactccggttatttccggtacaaaatacaacaatgccttatatataatgccgcaaagcttcatacataatgtcgctatacctgtttcttttcttcgttttgcaattggcaaccgaagagcctgcagttggcaaccgcacggcccgcaactggaaaccggacagcccgcaattgagaaacgaagttttacaccgttccgaacggtattttacaccatacacaagcggaaaaaagacggtatgaaacaagaaaaacaacagatgtttcccacgtttctcaccttactttttttatatcttccacgatctgcggcactgtcagccggttgtcccgtagcaactcgcctgcatcataacggtctgcaaactctttacggataccatagttcagcactttcatacccgatgcgccgtaataacgggcaatcttctcgccaaaaccaccgtcgagcacaccgtcttcgagagttaccaccaacgtgtggtcgcgtttcaaatcttcgagcaaagcctcatccactccggtaatgaaacggggattgacgagtgttgcatccattccggtttcttctttcagttttccaaccacttcttcgcccaatcgaaagaaagagccaagcccaagaacggcaacctgcccgccacagtgcgccacttcataacggttcagcagcttgccgtaatccttctccggttcgatgccgcgcgaaaggactccgttggcgggaacacgaatggctacgggatgctccgtctgatgaatcccccactccaacatggcaaaatactcctcacagcaagtaggagccagataaaccatgttcggaatgttgcctatgaccggaatatcgaacaggcaaaggtgagtgacatcgttcattgtcgaagcgccgccccaaaagacgagaatcaatgcgggattgttgttgatacagaggtcctgcgacaactggtcgtaggcgcgctggatgaaagtgctgtacactccgaataccggtttcccgccaccggcggcaatggcagacgccatggcaacggcgtgctcctcggcaatgcccacatcgacaaactgacgccccgcctcttcgcgacgctctggcgtaaagccgaatacggtgggtgtgcccgctgtgatgccgacaacggtacggtctttcttcatctcttgcagcagataccttgccgtaaggtcgccgtaatcttcttcattgccggagtcaaccgccgggctgcccgtctccaggcagaacggagcactgtaatggaaacgttcctgctgctgctcggcaaggcggtagcctttacctttgagggtattgatatgtaccgcaaccgggtgggcgatgtctttcacctttcggaaagcatctatcaatgcctgcacgttattgccgtctttcacgtacagataatccagtcccatggcggtaaagaagttgcaaggcgcctgaccgtcggtttcgcgcagcagttgcaggttgcgatacaagccgccgtgattttcggcaatggacatttggttgtcgttcacaatcacgatgaagttcgttcccagttcgactgcattgttcaacccttcaaaagcctcaccaccgcttaaagagccgtcgccgattacggctatcacattgcccgtaccgcctttcaggtcgcgcgctttggcaagtccggtggcaaggctgacggaagtcgacgtatgtccgataacgaagaagtcatgttcgctttccgagggttcggtgtagcccgacacttcatcgtatgcggcagcgtccataaatgccgccttgcgccccgtgagtattttgtgtgcataactttggtgggaaacgtcgtagacaatcttgtctgccggcgaattgaacacatagtgcaaggcaacggtagcctctaccatacccagattcgggcctacatgaccgccgtgctcactcagcttcttcagcaatacgccgcgcacttcttcactcaatgtttccagttcgcctgccgaaagccgcttcacgtcggcaggcccgttaatcttttctatatacatagctttatttataaatagatggtttatttaaaaacgacggatagcataaaaatgatttaccgatatgtccgacgctgcaaaaatacaacggagagaacattcggaaggtagacggattacggtttgcgttaccctttttacggtttgcgtttttgctcaaaatctccccggatgtgcattttttaccttgttttcttgtcaaacccaactctttgcgtaaatttgcaagctgatagttaaccggacaatttcagtagcaggactctactactcctattcccggtactgacatatggaatactaatactaataattaataacatgagtttgaaaatcgttgtactggcaaaacaagttcccgacacacgcaacgttgggaaagatgccatgaaagccgacggaaccattaaccgcgcggcactccccgccatcttcaaccccgaagacctgaatgcccttgagcaagctctccgactgaaagatgcacatccgggctccaccgtaaccatcctgaccatgggaccgggacgcgcagccgaagttatccgtgaaggactttaccgcggcgccgacaacggctatctgctgaccgaccgcgcttttgccggagccgatacgctggccacttcctacgcccttgccaccgccatcaggaagataggcgattatgacatcatcatcggcggccgccaggccatcgacggcgatacggcacaggtaggcccgcaagtggctgagaagttgggattgacgcaggttacttatgcggaagagattctgaatgtggacaaagcagccggaaagattaccgtaaaacgccatatcgacggcggtgtggagactgtggaaggtccgttgcccatcgttatcaccgttaacggaagcgccgctccctgccgtccgcgcaatgccaaactggtgcagaaatacaaacgcgccctcggtgcgcaggagaaagccgccattgaaaaagaaggcgccgaactgccgtatgcagccctttacgagaaatacccttatctgaacatcacggaatggagtgtggccgacgtcaacggcgacctcgcacaatgcggtctgagcggctcgcccaccaaggtgaaaaccattcagaatatttcattccaggccaaagaaagcaaaacgctcacgggcagcgaccgggatgtagaagatttgattgttgaactgttagctaaccacacgataggataagattatgaataacgtatttgtatatttggagatagaaggcactacggtagccgatgtcagtctcgaactcctgaccaaaggtcgtaaattggctaatcagttgggctgccaactggaagcagttgctgccggcagcaatctggcaggcattgaaaagcaggtattgcctttcggcgtcgacaaactgcacgtattcgacgctccgggcctgttcccatacacttcccttccccactcttccgtcctcatcaacctgttcaaggaagaacagccgcaaatctgcctgatgggtgcaaccgttatcggccgcgacctcggcccgcgcgtatcttccgcactgaccagcggactgaccgccgactgtacctcactcgaaatcggcaaccatgaggataagaaagagggcaagacctacgaaaatctgttgtaccaaatccgtcccgcattcggcggcaacatcgtggcaacgattgtgaaccccgaacaccgtccgcaaatggcgaccgtgcgcgagggcgtgatgaagaaagagattctggatgccgactacaagggtgaagtaatccgccacgacgttgccaagtacgttcccgaaacggactatgtagtgaaggttatcgaccgccacgtagaaaaggcgaaacacaacttgaaaggtgctcccatcgtcattgccggcggttacggcatgggcagccgcgagaacttcgacatgctgttcgacctcgccaaggagcttcacgccgaagtaggcgccagccgcgccgccgtcgatgcgggctatgccgaccacgaccgtcagataggccagacgggtgtaaccgtccgtccgaaactctatatcgcctgcggcatctcaggacaaatccagcacatcgccggaatgcaggagagcggcatcatcatctccgtgaacaatgacgagaacgctcctatcaatgccattgccgactacgttatcaacggtacggtagaagaggttattccgaagatgattaagtattacaaacagaatagtaaataaggagttaactccgctaactcctaaagggaaaaacaatatggctaatttttatacagatattccggaactcaagtatcacttgaacaatccgatgatgcagcgtatctgcgaactgaaagaacgcggctacgaagataaagacaagttcgattatgcaccgcaggattatgcggatgcaatcgactcctacgacaaggtgctcgaaatcaccggtgagattacaggtgagattatcgcgcccaatgccgaaggtgtggacgaagaaggccctcattgcgccaacggccgtgtggaatatgccagcggcaccaaacagaacctcgacgccatggtaaaggccggactgaacggtatgaccatgccgcgccgtttcggcggactgaacttcccgattaccccgtataccatgtgcgcggaaatcgtagctgccgccgatgccggctttggcaacatctggtctttgcaagactgtatcgagactctttacgagttcggtaacgaagaccagcacagccgtttcattccccgcatctgcgccggtgaaaccatgtccatggacctgaccgaacccgatgccggttccgacctgcagagcgtgatgctgaaagccacttacgatgaagccaacaactgctggcgcctgaacggcgtgaagcgtttcatcacgaacggcgatgccgacctgcacctcgtgctggcacgttcagaagagggaacaaaggacggccgcggtctgtccatgttcatctacgacaagcgtgacggcggtgtaaacgtgcgccgcatcgaaaacaaactgggtatccacggttcgcccacttgcgaactggtctacaagaatgcgaagtgcgaactttgcggcgaccgcaagctcggtttgattaaatacgtaatggcgctgatgaacggcgcccgtctgggtatcgccgctcagtccgtaggtctgtcgcaggctgcctacaacgaagggctggcttatgccaaagaccgcaaacagttcggtaaagccatcatcgagttccccgccgtgtacgatatgctggccatcatgaaagccaaactggatgccggccgtgccctgctgtaccagacttcacgctacgtagacatctacaaggcactggacgacatcgcccgcgaacgcaaactgactccggaagaacgtcaggaacagaagaaatatgccaaactggccgattccttcacaccgctggcaaaaggtatgaactccgaatacgccaaccagaatgcttacgacagtatccagattcacggcggttccggcttcatgctggaatatgcctgtcagcgcatttatcgcgatgcacgtatcaccagcatctacgaaggtactacacagttgcagacggtagccgccatccgctacgtcaccaacggttcttatgccgccaccctgcgcgactatgagctgattccgtgcagcgaagaaatgcaaccgctgttggaccgcgtaaaagaaatgacgaataagttcgaagcctgcaccaatgccgttaaggaaagcggcaatcaggaattgctggacttcgtggctcgccgtctttacgaaatggctgccgtgtgcgtaatgtctcacttgctgattcaggatgcgacaacagctcccgaaatgtttgccaaatcggcgttggtgtacgtaaactatgccgagtctgaaatagagaagcatttcaacttcatccgcaaattcaaggcggaagagttggaaagctatcgcaagtaaagacgtatagatagaaaatgcagcggacaccggaactttatcagttctggtgtccgtttgctttttatacaccctaactctgtatccaaaacaagattcttcaaccattaatcaaatgaagccggatatagaaatcgcaaatattaactaaaaaaaaagttacttttcactcaatatacaattattatttatatctttattcttttcaaggattttctttgaaaatgaatctaaaacacaaccaaacgtatgcagcaaagacacgaaaacagaaagacttactttcaggaactggcaacgaccagtgaacttcatttccttccctacattcaccgattcacttctgtcactccccaaagccggattcttgaaatcggttgtggcgaaggtggcaatctggtaccctttgcccgcatcggctgccgggttacaggcattgatttatccgaaaaccgcatccggcaagcccgccagttcttccaggaagaaagactgcccgctactttcatagcctcggatatttttcaaatcatacaattggaagaagcattcgacatcatactgattcacgatgttatagagcatatctccgaaaaataccgccttttagaacatatcaaacgcttcctcactcccggtggactactctttatcagcttccctccctggcaaatgccttttggagggcatcagcagatttgccggaacaaatatgtttcacgcctgcctttcattcatttattgcccgcaggcatctac

SEQ ID NO: 4090 - DNA, 2182 bp, Unknown
  gut microbiota DNA sequence
atacacatgtatagggtatgcggttatagcaaacggcgtatctctcgtgaacttcatgtcagccgtcataccgttgacaatattctttcagagtacgaatcagccatccgcacggacaatccggaagaggctttgagtgatttgcttaccatccagcccaggtatgacagttccagacgccgtcctcgccggctcacccaggagattaaggataagataggattttgcctgaagaagaatgccgttaagatagctaccggacttcgcaaacagcgcatgttgaaaaaggatatccaccagtttctgttatctcaaggatacaccatcagttacgccacagtatgcagttatataaaaaatatagagtcatgcaaagagaagaaaaagagcgaagcctttatccggttgttctatgagcctggatgcattgccgagtttgactggggtgaagttcttctttttattgacggtgtcaaaaccaagttttatctggccgtattcactttcgggcatagcaatggcagatacgcctatcttttcaggcatcagaatacgcttgccttcatggaatcccaccgtaactttttcagggatatacatggtgtcccagccatgatggtctatgacaatatgcgtgtagccgtcaagagctttgtcggtggtgataagaaacctacagaagctttgatgaagatgtccggtttctattgttttgagtaccgtttctgtaatgtacgggccggatgggagaaaggacatgtggagcgcagcgtggaatatgtcagaaggaaagctttctgcctgacagaccattttggtgatatacattctgcccaggagcatttaaaccgggtatgtatgcaggtcaacaacgagcaaggcagtctttcaacagcggagaaaacatcacgtctggaagctgacctgtcatcgctgaagccttttcccggtaatctgggctgttttgaggtctatgagtacattgtggataaatggtcaactatcagcatgaaaaatgttcattattccgtacctgattctcttgtgggagaaaaagtacatgtcaaggtttatagtgaaaaaatcgtcatcctgtacgggaaggagaaagtggcctctcatcaacgcagttattgcggtggagactggtgcatcaagctggagcactatttgcgtacactttcccgtaaaccgggggcattgccccactctgtggtttggcaaagagcaccggaaaaactgagaaggctgtatgacatccatttcaaggaagacaacaggacgtttgttctgttgctggactatgcccgaaaaaatggattttccggaacggacattgtcgcggcatgcaaggagctgaccggacgtggtgtcagaaagatatctccggaccaggtaaaggccatgctgcatggtagcgtacagggagaaacagaagaaaccatggaaccgcctgttctcccggcacaacaggagaatatagaaagagaagctgtggatatgcttgaaggcatcacggcgctcatgacaggatacaatgaagtgcatgatataataccaaccatttaagtttataatatatgaaatcagaaaaagaaaccatttatgactatgctgcagaactgaagcttctgtcctttaaagaggaactggaatgcaccctttcattggcagctgaagaaaactggaaccatctgcagttcttgacggaattgcttggaaaggaaagcgccaggagaagggagtgtagaagaagatcaaggataagatctgcgggatttccacaaatgaagtatctgcatgagcttgttatggaagacatgcccaaagaggcacaggtaatattacctgaattggaaacactggacttcatcagacagggaagaaacctggtcctgtatggaaatccgggaacgggaaagacgcatattgctacggctttaggaataaaggcctgccaacaggactttaccgtattgtttacttcagtgccggtcctgcttacccagataagggaggctaaatcagcaaagacactgaggacgctacaattaaggtttgaaaaatacgatctggtcatctgtgatgagttcggatatgtcagttgtgacaaggaaggaggagaactgctttttaaccacctgtcgttaagagccgggaaaaaggctacaatcattactac

SEQ ID NO: 4091 - DNA, 30843 bp, Unknown
  gut microbiota DNA sequence
agcggcagattcctctttaagcggattccagccttgtgccttcagttcaaattcctgtccgtcgcggctgatgagggcacaacccagttccgatttagtaatatgacctatcagcttaatgccttccatttcggaaaccttttcatggtcggcgatgggcacggtgaacagcagttcgtaatcctcgccgccgttgagggcgcaagtcgtcaggttcatgttgaactcctctgccatgacggccgtttggtagtcgatgggaatatgctcttcatagatgcggcaaccgaccttgctttgcgtgcagatatgcagtaactccgaggataggccgtcggaaacatccatcatggaagtaggctgaataccttctttagccaacttctgaataatgtcgcggcgggcttccggtttcagttgccgttccagcagatactctttgccagcgaaatcaggttgtaaatctttgtcaccccctttaaggacgctcttctcacgttccagcagttgcaagcccatataggctgcacctaagtcgccggaaacacagataaggtcagtctctttggcgccgttgcgataaacaacctttcctttctcaccttcaccgatacaagtgatgctgattgtgagtcccgtataggaagaagaggtatcaccgcctacaatatccactccgtattcctcacaggcaaggcggatgccggcatacaactcttccatatcctctacgctgaaacgtttggacagtcccagcgaaacggtgatttgccggggtgtaccgttcatggcatatatatcggaaaaatttactacggccgatttatatcccaaatgtttcaaaggtacatacgtcaaatcgaaatgtacgccttccagtaacaaatcggtggttaccagcacttctttgtccgccgggtaggagaggacggcggcatcatccccgatgccgtaccggcttgattcgttttttaattcgatactctcggtcaggtggcggatgaggccgaactcaccgagagttgctatttctgttctcatcttaattagttgaaaggttaaagttgatagtttaaaagcgaatagttaccgcgtacttacactgcacggcaactttcaactcccgactatcaactttcaaccatttatttacttacgctctgttaatcaactccctcataatctccgtcatcttcggctgtgcggcatccgcagctttctgcacttcttcgtgggaaacctctacaatcttgccttccacgcctaagtccgtgataaccgatacgccgaacactttgataccgcagtggttcgctacgattacttcgggaacggtagacatacctaccgcatccgcacccaggatacgaaacatcttgtattccgccggagtttcaaacgtaggcccttgcgtgccgatgtacacaccgtgctgcaccttgatacccttttctgctgcaattgcatccgccttgcggataagctctttatcgtacgcctcgctcatgtccgggaagcgcgggccatacggaatattcctgccgtgcagcggatgttcggggaagaaattgatgtgatcggtgataatcatcaggtcgccgatttcaaaatcgggattcgtaccgccgctggcattagaaacaaacaaggtcttgatacccagttcccgcattacacgtaccgggaaggtcacttccttcatggaatatccctcatagaagtggaagcgtccttgcatggccataatatccttattacccagcttgccgaaaatcagtttgccgctgtgtccctctaccgtagaaacggggaagttgggaatatcctcatactttatttcatacttctcggtaatctcacctgcaaggctgccaagtccggttccgaggataattgctgtctcaggatgcgtgtgcatcttacctttcagataagctgcggtttcttgaatacgttctaacatagccaataatgttttggttaaatatatattgttgattttgtaaaaactctatttcgatgggaagcacataaatgtacggcttcagcgtttcgttcaggttgggatggttcttcagtcgggtagcatctttctctgtcgtgataatcagccttttgtttcccttcaactggttaaattgtttctcgatgagcagcaagtctttctcgccgaagtcatggtggtcgccgaactccagcaggctgacgctggaggtgtaggacttcacttcttccaccagtggggcgggagaggcgatgcccgtaacgagtagcacctgttcgtctccggtgcaggtaattctgccttttgccttttcggggaacagtggcatcagcgagccatagcggaatctggagaaatacagttgctggtacggatacagattcaacctcttggtgatgatgttgaaatctatcggcttgatatcatccggacactttgttacaatgactatctgggcgcggtttttcccgcaggcgggttcgcgcagtcttccggcaggcaacagggcgtcgtcacacagcaaccggtggtagtcggtcagcaggatattcattcctgcctttacatggcgatgctggaaggcatcgtccagtaacactgcatccacggcaggattcttcaatgtaagcaactgctcgatgccgtgacagcggttttcatctaccgctacccgtatatccggaaacttgctctttatctgatagggttcgtcgccgattttctgtacgctgctttcggcggttgccagtatgtaacctttgctcttccgtttgtatccgcggctcagtgtagctacgtttataccttcattctgcaataactttatcagatactccgtatgcggcgttttgcccgttccacctacggcgatgttgcctacacatatcacaggaacgtcaaaactccttgatcggagccagccccagtcaaagagtttgtttcgcaagcacacccctgccccgtagagccaggacaagggatatagccaatgatgtatttttacggatgcatctttcatttaaatttattgtatgttcagttcaaacggtacgcgtgcctgtatgcggtctatcttgtcaaagttctcgatgatgctgaactgacggtacatatcgctcattttgccgttcagcatgcgccccttgatataatttccgggattcgtattcatcaggctttccaggaaaccctctttcttgggataactcattacggtgtaagcgtctacacctgcttttgcaatggcaatctccaacgccttgtccaggccgcccaattcgtccaccagtcccagttctttggcggtgcttccggtccatacacggccttgcgctatcttgtccagttcttccatactgatgccgcgtccgtcggagcagcgggtcaggaagagttcgtagccgttgttgacgtacatctgcatcaatcccttttcaccgtcgttcatggggcgggtcaggttgccgaagtcggcatacgggttggtctttactacgtcgaagctcacacccagtttctccgtcagccctttggcgttgggcatcattccgaagataccgatagagccggtcagtgtggtaggttcggcaacgatggtatcggcattgcaggagatgtagtaaccgcccgatgcggcataatcgcccatggatacgattaccggtttctcctttttcagttggtttacggcgtaccatatctgttcggaaccgtatgcgctgccgcccggagagttcacacgcagcactacggcttttacattttcattatctttcagcttacgcaggtctttgataaccttttcggagttgataccctcgtcggtagaggcggacgaaccgccgtcaatctcaccatacgcataatatacggcaattacgtttccgctcttgtctctgggcacgttctttttcacgtttatcatgtcctgaatgcccagtataggcatgttgtcgtccttgtcgatgcctgccaggtttttcaggtagtcgcgcacatcattcttatatattaaggtgtccaccagtccgttcttcacgctttcctctgcggggtaaaacatcagcatgcggtcggcttccttgttcaaagcctctacggacaggttgcgcgattcggcaacggcactcgtaatctgtccccagatggacgacaggtatacatttatctgctcgcggttggctgcactcatttcggtggagataaacggttctactgccgatttgtatgtacccaccttaaacacctgcatctccacgcccactttctccaataaatccttgaagaacataggagtagctgccagtccccgccattcgagcataccttgcgggttcagcagaactttatcggccacgctggacaggtagtataacccctgcgtataggcatcaccgtaggccacgacaaacttacccgattccttgaagtctttcagagcattgcgaatctcttccagcgaggcgaaccccgctcccagtgaagtagcctgaatataaatacctttgatatcctcgttctctttcgctttcttgatagaagagagaatatcgtccagaccgtatgtcttgtaatcatccttcataataaggtccagtgggttttcctggctgcgttcggccagtgtaccgttcaagtccagcatcatgatggagttcttacgtacttgcgtttccgattccgaggatgaaaccatactgaaaactacgagaatactgatgaaaaacaacacaacgctcgatataacaataccggttacggtggcgagtgtaaatttcaagaaatctttcattgtcttattgtttttgggtatgctaacttttcaagctaacaaagataaataattaggttgatattttccctatctgtcgcatgaattttcagtttgtcacatggggggcttttattctgcattaaaacaatcccccctctcatttgttgctaaaacaatttttttattcattattttagtaacaagttctgtgtttaggtgcaaaatgtgtacttttacgcaggcagtaatgcttaattggtaaatgaacttacaaaacaagaagaaaaagttgagtattcgtgttgtcatacatccttgtaaagcgagcgcagcgggagtttactcccttgcgattcgcgtgctgtactgccgtaagaagaaagaatactctttggggtggcgggtccacgagtcgaattaccggcgggatgccgaccgggtggtttattcgtccgagggtatcctcacccgtagggaagtgagcctcgtcaaccgtcttatcaggaacgagaaagaagaccttgtcaggaactaccgtctgctggagagaaccgctcccggctttacgctggagcgcctcatgctgaaacaccggaaggagcagtacgaccagagtgtggataaattcatcctgcaatacatcgataccctgctcgaagaggggaagcaaagcactgccgcttcctacacaagcgggctgtactcgctgttgcgtttttgcagtttgaggaaaatcaacttcaaagacatcgactatgtgttcgtcacggactatatacactacctgcgcatgcgcggcatttcggagaacagcatccacatgtacctcagcaatttccgggcggtgtacaataaggcacgcaagcaaggcatcagggtatgtggcgaaaatccctttgccgggctgaacgtgcgcaggcaggaaacggtgaaacgggcgttgagcaaggaagagatagcgctcatcgcttcggccgacctacggcggtatccccagttggaagcggcgcgcgacctgttcatgttcagtttctactgccggggcatgtccttcgtcgatgtaatccacctcaagcacgacggcattgtgcgcgacacgatattctacacccgcagcaaaaccgggcaacggttgcagataggactgctgcccgccatgaaggagattattgaaaaatacaggacatccggcccgtacatttttccttatatccacgggcagtcaccgcgagatgcctacacgcaataccgctactctttgggcacggtcaaccgttacctcaaacgcttgggcacattgctcaacataggcattccgctcaccacttatgtggcgcggcactcgtgggccaccatagccaagaatgaaggtatcccgatatccttaatcagtgagggactgggacatacgtccgaaaagacaacccaaatctacctgaattcctttgcggtcgataccctgaacaaggtcaatgaaaacgtggcggatgccgtatcggattgtattaaaaatgcaggtgaaaaattcatctgtctacataacacagataaaacctaagaaacgactcaaataaaccgaacttttctacttgctttcgctatatatactttgtccctgttctttgatgttgcaaaggtaaaggatatttttggatattgcgttatccaaatccatcaatcagttatccaaattaaccaatctgttatccaaaattacaaaacgctgaatatcagtgtttatttttgctgcttttttttaatttcctgccttaattcgctgggtgagcagccgaaattgttcttgcaatacttgttgaaaccggctgcggaggtgaagcccaactcgtatgccacctcttttatagagatgaaatcgtaattgagtcgggatagtatttccttgtttttttgtttctgaagccaggattgaacggtttctccaaactcttgcgtgaacttgcggtgaagttcggaaccactcatgcccaacaattctgccagctcttgtttgctgcgcacccggtctttgtgtttgagaacggctgccttgaagtctatctcaattcccattatagggtagaggagttggattatttcgctctttgtgtaggctgtgcggaagatgatgaacaactcgcgctctttgagttcgtgcaggtgcttgcagttgacgcccgcctggagataggactccagcagatgcaggaacgtgtccaaaggggcacgcacggaaagcggttcgaagcataggggtgtgtgctggacttcgtctaaatagctgctaagcatgtgcttgtcgcacaatgagattgcatcgtgaaagaatgacagactgatgtatgtgcccggctggataaccgtgcccgtgtaatgggatgaaaggggaatgaagatgaattcgcccgcacggactcttgtttcttccttgctgtctttggtgatgctgacttcgcctgacaaaataaatatcaggtggttggccttaatcttttgttgccggttgtcgaaatgttctcccgaagcagcttctttcagtgcgaaaccggcgtcttcctcggtcttgtagttcacgcatgaggtgtgttctttaatgtagttcagttccattttatgtactcgatttaaagttaataatttcgttgttttatcgccatgtttcattttttgtttcagaaaaacggatgtatcgaagcaaaggcttgattgtcattttgtcatttataacggcatgttgagtttcttttgttggtgtttaaagggggaactcttcattactgcgtgtattttaaggacagaatggtatcagaccgaagtcccgatacatccttgtttttctttttgtttcaggaaaatcgttcatgccggatagcattgaaacggttttccttttttaattacttgattactaatgaaatgcacattaataatctgttttatgtaaacagatgaaatttctaaaagcagcaaaaggaaaattaacctctataaacaggtaaaagattacgaataaaacgaaagagaatatgcgaaagaattttacgattttcatgattaccctacttgtttcgcttctatccggaacggcttcggcgcagcgtcttgcagtgaaaagtaatttgctgtacgacatcacctctaccattaatctcggagtagagtatgaggtagctccccgttggacgctcgaaatgtctgccaactacaatccgtggagcttctcggacaataagaagatgaaactctggatgctccagcccgaagcgcgctattggctgtgcagcggtttctccggtcacttcttcggagcacacctgctgggcggggagttcaactacggcggtatgcttccctttggcatcaccccttcatcatccgggttgggcagcaagcgctaccagggttggatggcgggagccggaataggctatggatacaactgggtgctgggcaagcgctggaatctggaagccacgttaggagtggggtacattcatttcggatacgaccgcttcgagtgcaagacctgcggcgacaagctgggcagcggcagcaagaactacttgggtcccaccaaggcaggcatctcccttatctatataataaagtaacgaaccaagaagcgaagattatgaaatattgtgtgctattatgtggactgctgctgatgcaggcagtcggtttatcggctaaggaacgggcacggttgcaggcagatgatgtgaacatcagccgcagcggcgacagcgtgcacgtatccttcaggctgaaggtagaaagattggctaaggattacattttgagagtaaccccgttattgtacgggaaagacgggcagcaggctgtgcttccgccattggagtacggcagccgcacggcacagattgttgagtggagagaaaaaagagtgaaagaaaagcggaagtctgcctctgcataccacaaggcgggagaagcggttgcctataccttcgtccttccctacggggaatggatgaatggcgcttccctgcgtttggatgcaaagagcaaagggtgttgcagcgaagaaatgctgccgcccgtgctcttggcagaagatgtggcgcttgccactcctgccgagctgtttgtgccggtgatacccgaggcgaaactcgtgacggaaacggttgccgacaagctggcgcaggaaaacggtttcctcgcgccgtggacaggtagtataggcagtaaagaagatattgcccgctacaaggatgaggccacgctcattgtctatttcccggtgggcaaatgggctatacagcccgattacgaaaacaatctcagcaggttggatcatttgttgtctgttctgaataagattgccgaatcggacaattcccgcatagccaagatactcgtagtaggttcggcttcgcccgatggtccgttagacctgaacaatcgcattgcaggtaagcgtgcgcaggcattggcggattacattacgaaccgtactttactttcggcttctttctttgaagtgagcaatcacagtgtggcatgggatttcctgcgcaggttggttgcagacagcgaaatgcccgagaagcagcagatattggatatcatagacaccactcctgtgtgggatgcagctaagaaagtaggccgcctgagcctgcttatgaggttgaatcagggtaggccctacaactatatgaaacggcatttcttcccgaaacttcgtaatgcgggttatatcaaagtattctttgaggcacagcccgaccccgaacttgtaggactgaacaccgctatcgacctgctcaacgggaaacgctactccgaagccttgcatgtccttcaaggaaatacgcatcccaaggcggacaatcttcgtggagtgtgctatatgctgacgggcgacaccgaaaaagcgcgtgccttgttccaaaaagctgctgccgccggtgtgtccgaggcggagagcaatctaaagcaattccaataaacagcacaaattataactaaacgattaaatatcattttattaactatttatttaaaacaacaatgaagaagattaatttattagcagtggctcttgcagccttcactatgttttcatgctccaacgaggagattgccgatttgggcagcaatgctccgggcgaaaaggctactcttactatcaaggtagagggagtaggtaataacgttgcgcagtcgagagcggcaggtagcgccggtactacaaccgatgttgtaattaacgactacatcgtattcattttccgtgacggcggtgctttggactgtccggcgtattacagttctaccaatgcggcggctacgataaccaacggtacaactgctgccaagacggcttatgtaatagccaataccggtgcacttgccaacggtccttttgctaatgtaacaacggaagctgaccttaaggccgttaccggtgatttgatatccggtaacgcggctacccaaacgaaaaataacctctggatgtccggtacagatgatatcactttctccggtacagacggttcggtcactgtacaattaggtttcgttgcagccaagattgaacttatcgttaaggacaaccgtaccaatctcaccggtggcactattgagattacagacgaaaacgttgtattgctgtatgcaggtaaaagcggaaaattctttggaacaactgctgacaaggcagctcaaactgctttctattcgggcgatatctcttatccggattttcaaactggtgttgccacggagtccgcagttttgaaagatgcggtaggcgcagctttcacagctaacgctaatggagatgtattcaatcacttctacaccttcggtaatgacggtacgtccaaaccgacaattcttgccattcagtctaaaagaacggtaggtggcgctgatgaaaccatttactacccgattcagttcaccgtagccgatgccggaaacactatcgaaccgggtaatgcatacacggtaacccttaccctgaacggtgatgtaagtgccggtggtggcggtggtactaccaatccggagcagccgttggttaaatcacaaataacagttactgttacggcagcaacatggcttgccaagaccgtaagcaaggattttaattaatatgattgcagacgttcatcttattctttaaagctgcaccgaaaggcgggtatgtttcccgtgcccgcctttcttttcactcatgccattgataaaattcaataattaaaaacaatactaaccatcaactaaaaacaatccatgcagaataacaaattccattattgcctgcacatactgcctattttgttctttatggcatttgtgtctgcaagttgcatcaaggacgaccttagcgattgtcctgctccccgcacttccggattttccttgcaggtaaaggcttttgatgccgacggtggaagtctcggcagtgaaacgataaaagacatcacactctatatattcgatgccgataaggcattgctcgatacccgcaacattctcctgtcggaaatcgtattcctggactatcccggacacgacaacctgaagctggtggcgtggggcaatggcaaacaaggcgcccagtcgatgcccgcattgaaagagggcgaccacttagagacggcattcgtgtcgctcatccaaacccggacaaccttacccgtggcaggctcgcccgacgacctgttctacggcactatagatataacccccgatgccgacgcttctgccagggaactccccttgcgccgcaaagtctccggggtagccattacggcacgctaccttagagagtacgtaggcagcaccgaaggcgagtaccactacatcgtgcgcaaaaccaccgataagctcgacttctacggcaagcccaacggcacggaagtaaactaccgcccccaggcggcattcaatgacaatggcgaattcgtatcctctgctttcaatatattccctaccgaagcggacattaagatagacatctaccaccgcgacgtgctgaaaaccaccgtaattgccgacagtaacggtaaccccctgcgtgtggcggaaggcaggctgctcaatgtgctggtagacttccggggagttgtaagcgtagacgtcaaagtcaccgactggggcaaacaggagatatggaaagaattttaatacctgataaaattaaaaataaaagtcgatttagatgagaaagatagcaatactgtatctgcttggagcattacttgtttcgggttgtgtacgcgatgagttcgataccacgcgtgtggtggaaggcgcagcggcgcgtatcagtctgaagataacattgcccgttatgggtggtggcaccgacacacgtgcagtatctgccgatgtggaaaaacgtctggacaacctgttcgtactggtattcgacggtgggggcaaaatagtgaccagacatagatacacggcacaaaccggtgcttcgctttcatctttgctgatagacacccgttccggtaagggccatacgctctgctttgtagccaacgtcaaggacggtatggacagtcagttaatggcgcttacctcttacaatgccctcaaaggacttttggtgacggctaccgaattaaatcttggtcagagtaccgatgttccactcataatgacggcaattatggagaatgtaaatgtgcaagagggagcaaactctatcagcaaccccgtacagcttcaattcctggcggcaaaagttacactgactcttgtcgacaatacccccgacactcaggaagtaaccattatcggttgggatgtgcaggatgctcccacacgcagctaccttttccccgacgatagtaaagacgccaatcccaatccggaaacagcaggtgccgataaggacgaatactggctgacaaccggagtggactatccttttgaggaggaagacaagcaggcaggaactgctacccaaacgctctatgtctttgaaaaccgccgtggtgggcgtatacccagagcactgccagccgacccggatgaacaatacagtaatatggggctaaatgataaagactcccgcggcaaggcatggtataaacccaagcgtgccactgccattgttgttacagccatgcacaaggcagatttggtaacaagacagataaaggcatttatctatttaggtcaggacaaccacagcgattacaatattcggcgtgggcatcattatacctttactgtaacggtgaacggtctcaatgagattaagatagattcgaatgtagattttcttgtgggcgattttttggtggatcatggtgataatctgacaatggatgcccatccggatttccgccctatgcgtattcaggctcccaaaggaacggcaaccatggaaatcctggattcgcagggcaggacttacgacgacccgtcgggatttgacgctacctggctcaaaatctctccattgaatttgatgtatcatcaagtgaagcaacccggcaatatatggcagcaggacgcagaccccgacagcaaatttgtgcgtcctaagtatattccgcacaagagtgtcagagctaagctggcaagtaaaggcggatggaatgccatccctgctggaaaggatgacgatgatgaaatgacctttgccgatgccacccaccgcatgtgttacaagattaccgacataccgtttaccgaggttacggttacagcgcaaaccttgtacgtctatgctgacgacttccctgtaagagacggaacccgtaatgcacgggtacgcttcacatatcataaagacggagatgctccggataagttgggagtcatgatttttgatattactcaaaggggatatgtctctttttatctggacgacagccatccggatgccggactgtatattttaaatgaagacgggacgccgagcaatgtaaagcggaaaacggtagtcgagagatttcatgaatatagaataatgatgaatccgggcattccagccagagtgcaatatacgggcggggtgaggtggggattctccaggacccgtttgtataacaagccggattttttccgtaatggtaaatatatgacagcaaacgccgtttataatgatgtagtccgtaatggtaatgagccgacggaattcgggaagaggacagactcttatcgcgagatgtatggtaatagcaataccgaccaagggtcgaatgttaatacaatagatccgattccaccctatacgggaagcaatagcggagcgccttactattatcctgatccggaagaaagggatatttatcatccgatttttagaacctctgctgcgcggtattgtcacgagaagaatcgcgacctgaatggagacggtatcattgatgattcagaagcctattggtatctgccttcagcacatgaattaataatgtggggcattgccggagtaatgagggataggaatgctaacctctcttcttcagagtctaataatactactgcacagattcgttctgtttatatgactgcatacgatgaagctgttatagcttatcataataaatatagtcaggcttttgttcgctgtttcagagaattagagaaaaccataactaaatagtgtaataattatattgaattggagttacgatagggatgagaaagtcagtgaaaatattattcggattatttgtctgcctggcggcaacgaccggtcatgctcagaagatagcgagtgaaaatgggaaagttattatagactcttcggcaataccgcatgtgacaactaaaaaagcacggactactaccgctacatccgatttgaaagggtcgaacacagccgatgatatagcgtctgtggcaagtaatagcttggtatattataagtttgaagtcgggcaggcatccacggacaagctttcgtggagcgatgctatacttgcatgcgcaaataagacggatacaggtggcggttggcgtcttcctacccaaagggagttgcagttaataggtctactgtctccggagctggaacagcttggactttttaaagcaggtgaattttggtctgctacagaattgaggaatcaaactggaaatgtaggaactcaagcatatcgtgctaaagtggaaacgagggcaaaaggttatgaccatgtattgagttcgaccgcgaaatatactctatccttttatcgctgtatccgcgacctcgactgaaagtgtttatttcacgctttagacctgtaatgtcttgataattagaaacgaaaacaatagtcaatatgaaaaagataataatcctgtattttttcggtgcactgctcctgtccgggtgcatgcgcgatgagttcgataccacacgtgtggaagaaggcatcgctgcgtgtgtcagcctgagaatgctgatgcccgatatgaccggtgctgtcagtgcaggcggcagtacaggcaatacacgcggtgcactcggttccggttccgacacccgcaccgtttcttccgatgtggagaaccggctggacaacctgcgtgtactgatattcaacggtagcggcgaggtcgtgaccaaccgcaaatacacggcacagcccgatggcccatcgctctcgtctcttcagatagacacgtggtcgggcagtaaccatacattctgctttgtggcaaacagtaaggacgatatggacagtaggctggctgccgttacctcttacgacgctctccgtgaattcatggtaacggcgtccggtttggacttcggtctgaactccaccgagcctcttgtgatgacggcaatccgggagcatgtagacgtgcagccgggcacccataccatcacaacccccgtacagcttcaatacctggcggcaaagctcacgctcaccgtcaccgacgcaactcccgcggggcaggaagtaaccatcatcggctgggatgtgcaggatgttccggtgcgcagctacctctttgagggcaatgccgacattaatcccaacccggataccactgccgacgacaaagatgaatactggctgacaagtgccgtagactaccccttcgaaacggaagacaaacaggcaaagaccgtttcccaaacactctatctctttgagaaccgccggggcggacgtatagccaaagcattgcccggtgaccccggcaagcaatatccgggcatgaagcaagacgataccgactcacgtggcaaggcatggttcaaacccgggcgcgccaccgccgttgtcattactgccatgcacacaaccgatgtcgaagtgaagcgggtaaaggcatatatctacttgggcgaagacaaccacagcgattacaacattcgtcgcggccatcactacacctttaacattacagtgcgtggcgttgacgatatcaaggtagatacgaatgtagactcttccgtaggcgatttcctcatagactacggcagtaacctgaccatggacgcgcaccccgattttcgtcccatgcgcatgcacgccgcaaacggtacggccgttgtagagatactcgattcgcaagaacggacctgcaatgaatcgggttttgatgccgactggctgaaaatctctcccttgaatctgatgtatcaccaggtgaagcaggcatcgcccgacgatgtgtggcagcaggcagccaaccccgaaagcaagtttgtgcgtcccaaatatattccgcacaaaagcatccgggcaaagctggaagctgaaggcaagagcggctggcctgccgttccctcaaatcaagacgatgacgatagcctgccctttaccgatgctacccaccgcatgtgctaccggattacggatataccgtttgccgggtcgtccataatcgaccggactttctacgtctatgccgacgaatttttgcagaacggcggcaaccgtaccgcacgggtgcgtttctcgttctataaggatgggggaaatgcggataaaccggaaatacggattttcattatcaatcagtcgggttatctctctttttatacggatgataatcataagggtgcagggctgaatcttttgaatgaggacggaacgccgggcagtgtgaaaaggaaaatggtcgtggaaaggtatccggagttcaacatggtgatgaatccgggaatcgacccatcgctgcagaacataagcacgatgcaatggggattctccgacgattatgtttacaacagtccggacaaattccgcaatggcaagttcctgacggcaaatatggtgtatacggatgtgcagcgtacggataacgaggcaaccggattcggaatggcatccggttcttaccgggaaatgtacggaagcgaggtacgcaatactaaaatcggcgcttataccggtactgttaccggaccctattattatccggaccctgccgcagacatttatcacccgatatacaagagctccgccggacggtattgccacgagaagaaccgcgacctgaacggtgacggcattatcgacgcatccgaaaccaactggtatctgcctgcgcagcaggagttgcttctgatgcttattgccctgccgcaagacgaacgtagctttgcaggcagcagttttatctcttctaccgaaacggggcctcgtaattatggttacgcagcggttggcatgaggcagggttatccttttatattcagcaatacacagggtaaaatggcgtcggtgacttataccgtccgttgcggcagggaactgaggtgatgttgcacgtgaatgaatgtacggttatacgcaaatgaaacagcaatgaggatatgagaaaaagcatgagaacattatgggttgtgctgtgctgcctgacggtagcggcaggttatgcccaggaagtggtgaaagagaacggaaaaatcattatagacgcttctgccatacggcacaccaaggttaagaaagcgcgtgccacggacggcacaaatgccaggctcggtacggatgatgaaaccaatatcggttcggcagcgagcgacgagcaggtgtattacaggtttgaactgtctgctgccagattttccgctacctggattaatgccgtaaacaggtgcaggaatcttgccgatgatggcggcggctggcgcttgcccacactaaaggaagcgatactgatttacatcctgtggccggagctacagcaggcagggctgacgggagtggcaggaggaacggctaccgaagcgggtgggggcggaaactcatacccgtatgtacgttataatgatacgggagccattgtgctggacgcgaagaatgttagtacggacagatattttcgctgcatccgcgaccttgattgaaactgtaggttctgctttgttgtccgtggcggttggaaaaagtaaaagtatccggctggtattgataataaggcttttgcctgaactttagaattggaattagaatgataacgaaattaatagaacccgaaaacagtcccaatgttatgaataaaaaaggtttgtcccgactttgttcgtgtttttgtttgtttgcacacagagggatatgctacggaatcgcttgcggaggcgtcctgtttttagcgattttcgtagccgttttcggttttcctgtatgggtggcggagcttttcgagaagcggatggaggcacgtaggaaaaatagagtggtgaacgccggcagatgaatgataatcggtaaatgaatattgagtgagagccggtagatagatgaatgacagataacagaaatattgataatcttaacaattgataacccgtaatgaagaatcctaagaaagaaactcgtgatgtcatagccaagcacgtccgttggaccgaagcattgcgcgtagtgcgcgcttaccaccccgaagtaaccattatcctgccccaggaaaaaactcagatttatcccggcgatgatgtgcggggcatgattgcccctgccgtcggcgtcattcgccatgcactcgatgcaggagtgtggcagtggcacggatacactgccgagtcgcgtgtgaagcaggtacgcaccctgctcagccattacttccattatcacgaggacagcatccatccggcggaactcgacctgatgattgaagatttgctgtttgtgcataaagcctgaggggaatttcatgaattaaagttgcttcaatattattttaaagtaaaacgtaatttaaccgaattatttatgcgcatctcaaaagtgatttttatttgctgttttcttctgccgttcttggcttcttgcacccgggacgaaatagaagacaatagttatccgttagccgaatatgacggcacgggtgttttgtttcgcttaaaggcagaggcttttgacgatacgggttccgctacccgcaccgtggatttgaccgcacctttcgatactctttgtgcctatgttctcaaagagggccaaattgacatcgaccgtgaagttaaattccccgatcctgcaacaattatggtggaagggctcgaaaccggcacctacaaccttcttatattagccatgaaaggtaactataaagaggatggagcccggatacataaaatagagaaaagttcctcaccgtggctgtcttttcctgaaaatacgccggcgaagcctctgaaagcccaatattattatacgaatcacaagttctcggtaataaacggaaaaatcaagatagaggaaatacgcatttcccaagctgtagggctggtctcttttgatatacaatacaaaagcgattacgtgcgcaaatcggttcacgactgtcattttattccttcggaagacagcaggagctattctgccctgcatgcagacggcagccattcgggacagcgaagcatagcatccttctcgttatcggaacaaaaacagtgcttatttttccctaccgtaaaggatggtttttccggtcaagtagtagtaaatacaatgaatcaccgaaaggaaagttttgatacggagtatgatgcaaaggcaaccttagatgccgccaggcattctaccatacatgtgcaggctgtacatccggaagacaatgtgggtactaaccttgccgatgaactcactcctctaaattattatacgattctaagtgatgaagaacctgcttcagtctataccaatgcaaatctacggtcattttatataacccaacctttgcagataaatatggagaacgatagtttgcacatgagattttattctcccgtaggaataaaagaggttacagtcatggcaaaaagtccgactatggatgaatatgtggagttcgtttacattgacgacattccggcatttgccgatattaagacatcgataaaggtattggagaaaggattataccgcactgagtcagggaaagttctacaattttcagcagaagagatgaatccggcttccttgagtcttaagatagcttgcaacgacccgtattggactaagatttcccagataaaagcgaaatggtacatcaaattcgtacttaatggaggaaatcccgtaacaggaactcccaacaagaactggtggggaatacgccctgtacattgcagggaagctgttgcactctttttgaatatcggatatatgtgtacgctggaaaagttccagcagcgggtttcgacgttccaaggaacctttcttgacaataacaggtatccagttgacacatcaacgcttatatccagactggaaaacctttccggattcgacatcggacttatatatagtggcaatggtgtatcaggattaggtgggggcagaacatggggagtctatcagaaatctttcctttatcattacgaaaacagcggcggatgttgttccactatttttcacgaattaggtcattgtttaggctacaaccataatagcaccatgacatacggacagtgggcttcgggatgtgccgatgtgttctacaagaataacataaaagattttcctgtcaattcccatacaatattaaaatcaagaagtaatcccaatatctactaataattatgaaacatttgtctgttattatatctgtattattttcaatactttgtatcggatgctctaaggaggattttaacgatggaaaaaccaatgatgttcagaacaagcattctctccggcttttggtctacacaccgacttcagaaactgttcttagtacggacctgccgggaaacatagaggcttatctgttcaaagagggagttctgtccgacgtttacaaaaatctgacagtggataagaacggatacactacaatcagctcgttagccgaaggagagcaaatctatttctttgtaaacaccggtaatctgctggatgggattacacaggaaataggccgattgaaagagaacgaactgcttgccactacaatactctctgcctctcctcaagcagatggagagaaaccggtgatgaccggaaaggcagacttaaccggaagccaggagagtaccacccaagtattgcttacacgggccattgccagagtagacttaaacatagctgacgatgccgacatacaaatcaataggataagtatggataacatacattgtgaagcattcctgcttccgcaaaatccggtcagttcgccgtccggtgcagcattggcaaaaatagacactacattcaataccccgttgaagccgggtgaatatgccggattggtccacctgtatgaacaagtgggggacggtattcctgtggagctgcatggcacccttgaaggcgatcctgtcacactttcactggcactgcctaacacaatccatagaaaccacatttataaaataaagttatttagcggagacagttctaatttgcaggcaagcatatccgtggaaaatgaaagttgggaagtcgaagaaactatcacggcaaaaccttctaccaatattctggttaatagtgaactttctactttggctgaaggggcgtatataagtgcaacaaaagatacggtttacctcccaagcaaggagtcaacgtcaatacttgtattggataaggtgccggaagatgcggaattcacaattgatgggacaacagcctccattactccgtatacggaaactcgtgccgaccttcaagggaaaaagttcttggtacgcaattcttggaaaaagccgggtactaagacggaatatatgtacctgaatatgcacagcaagaggcacccggactactacagtggccggttggtaattgttcagtccaatgcaacgaccttcaagggagaattgtataatcatcttacaaacaccccaccctataacattcatttcaataaatatgtcgacagtgctttaggccagatagaggtacctaagaactatgaggttagtgtcagtggtggcagttggctaagggcgataccccaaggagacggagtttatgaaattcaggcaggctacaagcctaacgatccggaagccaatggcagcactcaggagggtttgctcaccgtgaacggcccgaatggcatacatgaaacatacaccgttacccggctgaatcacggcttgcctgttgtccttatgggtgacacttactggtgtcgtttcaacttacaaggaaactcaaagagtttcgacgaccagataaccgtcagtgaatctgaaacaataggtgatctgtctgcctattttgcctcttgttctgacgaggattttgtacgtttaaccggcagtcagtacaaagggcgctatacgcagggaatgaatttaaagtatgacgcatccgtcccgcgtttctatttcgattcgtatgagtcgctccagaatccggcaatcataggaaatggatcggtaagcagccattgtccggaaggataccagcttcctacttcgagagattttgagcttttgttaaaatcgggggctattaactacacgcttaatggcacaccggtaaattacacaacgggtagtggaagaccggccgttatttcagcccatagccgagaaaatatagcgtgggaaggaggtctccttgcaacagccaattacatccaaattgcttttgacgaaaacaatctggtcttgggaggattcggtcaccaatttgattcttcaaaatcaattgctgcaaaggtattgtgggcaaccataagtggagggcaccaaagctggactcatacagggactacagccaaggcggaagaccataatgtaaacaaatcccgtacgattcgctgcattaagacgtcaccggcttttataatagaagaataattcggggttaattcttggtggctttttcttagtatggtacaacggttgaatgtgtgtcaaaactaaaatccgcttactatttgtttttttaggcacggattacgcggaaaacacggattttctttgttctttttccgtgaaatccgcgaaatccgtgcctaaaaagaaatcgtcaagtgtattttgacacatccccgttacactatggccaatcagaccgatgtacaaatagcacatcgcaaatacttgattgtacaagatattcaaagtgcaagcacttcaaacggaatcactccaaagtgcttaacttcttgcgagaacagcctaaagccacgcaaaaaggaatagccgtgcatataggaaaatatatcagtaatgatttataatggaatatatcagttattgttatttctgcagcctgtcaatcaatgctgttttcactacctcatatccttcttgtgggttaaaattctcatcaggacggagcaattgtttggtatctcctaaaaattcctcatcttgcattttttcttccatattaatgataaactccttgtatgtaggaatgtgatccaccacaaaatccatatacagattataacattttagtacatttacgatattaagctcttttgttgtcagtgctttatacaaatcgtacaaatctcttccttttcttctttgatataatgctctgagttttgtgcctacaagctcatcaagttggtaagtaagaacatcgcatcctcctttgtaccatttatttgaaacggaaaatggaattttctgcataggtagcacattgaaatgttccttacagtttatttctatctttaaatgaataggaacaaccggaggtatttcggactccattctgaatattaaagtattattgttcctcttttgcttaatctttggctctccgagaaatgataaggcttctctaatatgatcgtaagtttcttttattggctctgctgtaacctgtacaaggtcaatatcctcactatatctgggctgaggagaaaggtatagtttatgcaaggccgtgccaccgcgaaaagcaagatgagatgccagatattcatctttatatatttctgttaaggctctacaaataagtaagtcttgctctacttgttctgagtcggtccatggaacagtttcattccattctctaattgcaaattcgggtatcattcgtctacttctatttcttggttaatgattactttccattttttttctatttcacagtccagtgtagatttacctatcttgaacggtattttcctcatcgggagggaagaggtcttagctttaagcttatctgcaagttcttctctctccaaaacatattctaatatatatcccaatctttgatatgtaggagttgatgtaagattgaagaaatcttcatctaatctgtcgaagtcaatgctatctaccaattcatttagtacggtacataccctatttaatccgcctacatatttttcattctcaattaaatcaattgcagtcaattctggcgaggacacatttacatagcctgattgagctttatgtttccgtatgaatttttccggtatgtttttctttgagaagaaaagaatagaagttcctgtttttgtggtatttctcaatttgggagcctctgttgtcacggagaaagtttgagctctttgatgtgatgctccatagaacgatgctgcattaagtaaactgatatagtattcttttcttaagaataccattaacgcgtcaatataaaatacaggcgggataatcgctttcaaagcatattcaatcggcatgataacataaaaccctttccagggagaaataatttttttctttatagttaagcgatataacgaagtactgatataggcattaccaaattgaggaaaattcttttgaacttcctcaatagtgaaagtgtaataccctctcatctctttttcttcaatccagtctgataagctttgttctttcatgtgctctgcaatataattgcaaagataatcattttctgatgataaatgcaattctattgctttaattccgtgtatttttctcaccaccggagtctctgtttcacaaccattaattcagtgaaataaaatacgtactttcctttctaattgtttgtaaagtaaatatttacatgattttacgtgtaaatatttacttttcatgcctctttgttatttaatatttttgtgtattcatcgtgcattggggcagtgaaacgcttccgggcggtgtggtataaattttaaacaattagaaagaataatgaaatcaatgaaaacacatcgtctgtcaggggcggacacatcgtctgttacactcgtatacatcatccgtaggggtggaacgcatcatcggttctgccgctctgcgtcgccgttccgtaccgctacgccgtagatatacgatagtatatcttatcttctattgaattatattgtgtacgctgcgtggccggaagcatggctgccgcacgtgcataaccggttgacgtaaaggcatgtgccgtgaccgccggagcggtcgttttccggtttcgacatttatcaatatttatctgtaactttagtatgaaaaacaatttgcttagaatgggctatgtcatggtttcgcgtgcattgctacaagagatttgcgagaaaaaaggtgcggcatgctgcgaggaagaagccttcctgcgggtgctgacaaacgtcaacttcaagcctgccgtagtattctgcaacggagccggggtacagtgtgcccgtggagagtccgtcatcacttttatgggctgggcggacatattcggctggacaagggcgcgtacccggcgctttttcgaccggtgtttcgctgcagggcttatcgagcgcgtgccgggctgttgccccagccacatccatgtgcccggctatgatgcctggacgggacagccggcatccattgggaaggttatgaacgggggcggcagcttttccgccgctgccgcccccgttgccgccaagtcgaaatcctccgccgctttcgaagagtcgctgaaggagtttcttgcctattacggccgcaccacccacctgccggtggagaacggcagctatgtccgcgccctttggaaaaaactctccacccgcgagcgcgaacttgcctaccggaaagtggaagattattatttcagcctgaacaatacgcatttctgctaccaggctgccaaatatctggaatatagaatctttgaaaacgaatttgtcaattaatcgcccttttacccttatggcagaaatcctcaatcctcatgatgctgacctggagtcggtaatcttaggcgcttgtctcgccgaaagtaccgctatggtgcttgtaagcgggaagctgtgccccgaaatgttttacgaagcgaagtatggcgaaatctttgccgccctgcttgccatgcaccgcgcgggcaaggcgatagacatcattacggtgcgtgccgagcttgccgcccgtggcaaactggagttcgtgggcggcgccttcgaactggcgcgtctgttgggcagggtggcgtcgtccgcccacctggagtatcatgcgcttatcttgcgcggcatgtatatccggcgcgagatgattagcggcctgcatcgtctgcttgccgtagccgccgatgagtcggtggatttgggcgatgccctggccggactgcatcagcttatcgaacacctggaaggtaaaaccgactttgccggctgcctgcgcgacatggaccgcctgatgctggatacccttaggcaaatggacggcagagtggcgaacaaccgcaacggcatcaccggcatccccaccggcctgcgcgacctcgacaggctcactgccggctggcagcggggcgatctgcacatcatagccgcccgtccttcggtgggcaagaccgcctttgccctgcatctggcactggcggcgggacgtgccgggaagcaggtgttggtgaacagcctcgaaatgcagggcgaaaggctgggcgaccgctggctctgcgcacaggctgcctcgctggatgccggacacctcaaaagcgggcaactcagcgccgacgagcagcaacaggctctggaagccgcccggcaactgtcgtgcctgcctgtgtatgtggacgacaacccgaaggcgagcatggatcatatccgctcgtcggctctgctgcaaaagagcaaggggcattgcgacctgctgattatcgactatctgcaactctgcgatatgaagtcggaacagaagaaccgcaaccgtgaacaggaagtggcggaagcgagccgcaaggcaaagctgatagccaaggagctggatattcccgttatcctgctttgccagttgaaccgtgagtgcgagatgcgtgccgacaagcggcctgcactgagcgacctcagagagagcggcgccatcgagcaggatgccgatgtggtgatgttgctctatcgtcccgcactgtacggactgacgtccgagcgcaagagcaaattcccttccgaagggttgggcatggtgattcttgccaagcaccgcaacggcgagacgggagatgtatatttcgggcataaccccacgctgacgaagattggcgagtacgaacccacactggagtggatggcgagaaacgcacgctcttcctgttagaaaaaaacttcgcttttctccgaaaataaatggcaaaatacttgactttgcctctctgatttcgtatctttgtaatgtgctcgagaagggaagtaattattggataaggcgccttaaatcttttgtttgttgtgtggcccgggctttttcttttaagaattttatttactgtttttttttaatctaaacctaaactttatttttatggatgtacttgtagaacgctttcagcgtcgtagaatcgtgagcgataaaagctctcccatgttgtattatctccgtcagaaacccaaaacgtgcggaacggtggatattgatgtcctcgccgccagtattcagaagaactgcgccatgacaaaaggcgatgtgaagcacgtgatagaggctcttgtggaagagattcaggcgaaccttgccaacggcgacaaggtgaagctgaaccagctcggcacgcttcacatgacgttccgctgtccgggtgtggagaagtcggaagactgcacggtgaggaatatctccaaagtgaatatccgctttgtgcctgacaaggagctgaagcttgtgaacggcagtacggctgccacccgcagcccggcaaatgtggctttctcgctggacaagcctgcggacggcagttcttccggtggtagcggcggtaatagcggcgaagaggagaatccgctcggatagtcggttccctgctgatttcccggatttctttttatcccgttttccttttttatgcggaacagcattcgggcacgcccttatcatagtttttaacctaacccttaatttaaatcttatggcaacaaaatcaaactggtgggacaagctccttaaaatcgtaatcgccgtagcttcggctgttttaggcgctttaggcatgaacgcaatgcccgcctgattgtacttcatgcgtaaattacgtacttaattcttaagttacttaactttatacttaataaaagtgagatttatcaacctcatcgtcattcactgttccgctacccgctgtgaccgtagctacaccgaacatgacttgacaacagaccacctgcgccggggcttctccggcgcaggttatcactattatatccgcaggaacggcgatataaagacgctccgtcccatgacacagcccggtgcgcatgtccgcggctacaacgcccacagtttgggcatctgctacgaaggcggactcgatgcgcacggacatcctgccgatacccgcaccgattttcagaaacactccctgcgggtgctcgtaatgctgttgctgcgcgattatcccggcagccgcctctgcggtcaccgcgacctcagtcccgacctgaacggcaacggcgagatagaacccgaagagtggataaaggagtgtccctgcttcgatgcggctgcgattgtgcgggaagcagcgccgcctaatccggggtgtgcggggtgaggggagatgttttttcagtctttccagtttctttccagatttgccccatacttttgtggcatgagaagaggttgtatcaatgaagcctcttatggtaaagagaaaaacagtgtcttgaatttataaatgaaaaaaagaatgattatgaaaaaacatttgtttgccatggtttgtatggctgtgagtttgtggagttgcagtaatgacgatgcacctgttgtcggtggtccggaaaacggtaaggtgagtgccgaggcgcaggctgctttgtttcagctctatccgaatgctaccgatgtgaactggtcggtgaaaggagagtatgtggtggcggatttcaatatggcggctacccgtgcagcagcaggcgaatatgcggcctggttcgacaatgccggccggtggtacatgacgacggacagtgaaatcctcttcgaccagttacccgcagaagtgaaaaccgctttcggcgagagcgagtactccgcatggaccgtcgacgaggtggaacggattcagcgcaatggcctggaagatgtctatgtgattgaagtgaagaatacggtagacggcgtggcaacggaaatcgacctttattattcgaaggacggcgtactggtgaaaaaactggtcgacatggacgaggattatgattacagcgattacatccccgtagctccggccgcaggtgtggacgcgttcctgaaagcgaatttccccaatgcccgcattctggacatcgaccgtgaagataacatgacggaagtggaaattctggatggaaaggtagtgcgcgaactgctgtttgacgggacgggcaactggctgtttaccaagaccgaaatgagctatgccgcattgcccgctgtggtgaaacaggcgttggacgcttctgaatatgccggttaccgggtggacgatgtagaccattatgtaacttcggcagaggaatattaccgcctcgaactggagtctgtcatgggtgacgtgaaagtaaagattaccgccaccggcgaattgtcgccgatggagcagaaccctgccggacccggaaataacaccggcggcatactgaccgacaaaatcaaggagttcatcactcagaaatatgcgggagcgcgtatcatcgaatccgatatggagaaaggcatgacggaagtggaaatatttcacgaaggacgtgagaaagatgtgtacttcaacggtgcgcaggattgggtgagaaccgaatggggcgtgcgggtgaatgaacttcccgcggctgtgctcgatgttatcagaaaaacgtatgcggattataggatagatgatgcggattatgtggaaacacgtaccgaatcgtattatctggtggaactggaacggggagaaaacgaagtcgatctgcgtattcttccaaacggaacgattctttaacggagtgattctttaaacgaaaatggctttgacagcctctgatatgtgcgcgcgtacgggcgcgcatatattatattgtgtccctcttttcatccctttctcccttctgctggcgttcaaaaaaaatatgttcttcaacatatttatcaatcagcgtgttacgaaaaagttttcatcttccgtgtaaaaaatcccctgatatatttggcttgtatgttataaagtcctacttttgcacccgctttcgagaacgggagcagcgatgttttgacattctgacaggaacggcgtaggaactctta

SEQ ID NO: 4092 - DNA, 7141 bp, Unknown
  gut microbiota DNA sequence
ttttacattgacccgtaaaaagcaactccccccagcgaaaaagaaaagcgcatattgccccattttatttggcttgcttataaatggaaagaggagcgatacagcatcgtgtactgctcctccttgccaatatatgaaaaaacaaatcccaactattgcacataacggaccgtactcccagtcctgcttttaacatcggtctgttgtccttctaatagtatttcacggcaggagctgccgttcctttatattgtttattgacataaacacgtatccaatctatgtacatacaaggcatggcgctgttgtcccacagttcaggtttcacagctccggcccatgctttgggattggttgagataccggtgctaaaaatcataaagaaacctttaggatcactccacggccaatcggtattaccattttcccctcgtttgtgctcaaaataagtagctccatttaccccacctactatacggtcgggataccattccaaccaatagatattccattttgacatatctctgatttcaatagacgaagtaacacttcctgcaccaccaactacaccggcataatgattttccgagtgcagggtgaaatgagcacggttattcaatttccttttagggttctccaaaagatctatctcaccattggcaggccaaggaagattattattgcccataaaccacaacgcatcgttgaacccttcataggcattacgtttgaatcgcacctcaatgcgcatattttctgtaaaattacaccactcctcactacttccgggcagagcagtccgataacatccatgtgagaatttcacacgcttaccgaaacggttatccaccgaatcagcttcttctatgctacgaatctgcaatacaccattcttcacttccgaacaacggctgttatctacccgggcatcacgactcatatgcttgcctcgatgttcgatgaatcccaacggcagtccattacgggtatcccgctccaggaactcatgtgcagtaaaaaaactccatccatccaccgacggatgcgcatccccaacttttaaagtaagcggtgcaccgggaacgggatagactgcagattcatcatctttagcaggtaaagcaacagcgaatattcctatttcagcaatcgatgtacatggtttcccacttatttcagcaagaggaaccagacggaagaaacgtcctctataactttgttcaaagtgtacgaaacaagtcacagggttatgcataatgttactgaactccccggatgtggcacatgttttccaatgcgagccatccatactgacttcaaaacggtatttatagatagttcctgccagattatcgtcctgcgcaggtgtatagctgaatccggtgatttcggcatcgcgccccaaatctaccatgaatgttttcagcccttccgtacgccatactgtctgtacatttttatcaaaagccttccgcatagtctcatccgtaccggaaagacgccattggcttaccggcacatttcccaactgaactttagcgttattgtctgtcagcggacgggcataaaaaagtcctgtacgcagaatgtgagcttcgttacgcgcagagcgtatcgtcagacgaattttctccggttggcactctgtaaaacgcaccaaacgcttgtagcccacagtagtaccttcggcaagtgtccgccaactcccatcccaatagccttctaataaaaaactttccacacgttgtcctttggttatatcctcctgaatcataaatgtgtttacaagagcatccttccgtaccatgtattctttcgatgtacctgatagggcttcccaccgtgttctccccctcttcagataatctttttcaaaagtatttttgaggtaagtaaagaactcttttagcctgcggcaatcattttcatggataagtcccgacttattgggtggaatattgagcaataacaccgaattatatcctaccgacttgaagtagatatctgccagatgcgcaagcgattttacatgactatcctccttggaatggtaaaaccagcccggacggatagatacatccacctccgaaggaaaccaaaaaagctcttttgcgcgcgccacaatgtcccggcttcccaaatcttttgacttgccaaatacacccagctccttattttgtcctatggcacgggaataaataccaggagtcaataccgtagcgctccattctgtcttacgtccgatgcccttctcgttgcctacccaacgaacgtcatcgcccatgacagcagtaaccgctttgggctgtaaacgccggattgtacgctcaatagcctcccaatcataaatttgctttttgccattagccccttccccattggctccgtcgaaccacacttcatgcacttctccatagttggtaagcaactccgtaagctgctcgatgaagaaccgattataggcatcgccttgtccgtaacattcggcattgcgatcccagggtgaaagatatataccgaacttcaagccatatttcttgcaggcattgcgtaattcgcgcaccacatctcccttgccattcttccaaggtgacgacactacagaatgccgggtagtcttggtcggccatagacaaaagccatcatgatgcttggcagtaatgacagccatcttgaaacctccttctttcaaggcacgcacccattgctcgcaatccagtccggttggattgaaaagcgcaggatcctccttgccgtctccccattcacgttctgtaaaagtattgataccaaaatgtaaaaaagccgtcagttccatctgttgccactccaactgctgtggtgtgggtactaaccgggaggccatatctattttctcctccaccgtagcttgtggtggaaattccaaatgcttttcgtaatattcctgtgcattggactgtgtataacagctcaacaacatcaaagcagaaaaaaatgtctttttcatggttattctttttctattcaataattatctcatctatgcacaccttcgttgtttgctccggacgaacatgcgttggcggattcataccagctccataggcaacaatacgcacatagcgagactcatcttttaaatcaaactgcacatcctctgtaaacataccctgtctgaatatttccgtctctgtaaaggactgttcttttattttccggtattgacgatcatccggcgatacccagacctccatcctgcgcggtttgtggatgcccatgccgtaactgttgttgaatcccattatgagtttctgcatacgggttttcttgcctaagtcaagggtgatgcagattgtatcgttattttcccatgacgcccattcaaagtcagaactgcgactgctccctctgactccgttaaccagcacatcctttgccggagagtccgtatatactgtacaagctgtcgccttattcaaacaaaccggcaacgtcagcgttttccccatgcgccttccattgtaaaaagttgcacatttcagcagcgtgctctgttttacaatcagaggttttacatagcgcggagagttgaccgttggttcacccccgtccaaggtataggctatctccacatcgggacgaatacaatccagggtgacttgtaacttgccattgcgaaccgttacagagtgctgaatattatacattgattgggcgaaattcactcctttgacagccaatcgttccgtaaaatgatccagtgctttcagaaagcggctccagtctttctttcctggtatagtccaccccacttcagccacagccgccaaccgggggaacaacatatattccacatcactggtccggttgcagaactctgtccacatagaaccttgcacacccatcaacagcgactttatcccatcactccaagttggtcccacaggttcataactataaatatctttcaatgtattatttccaaaataggtatacggttcaaaccattggggaccttgataacggataagatacatgacacgagcaggagtcattacaaaacgatgcccttgcctggctgcttttagcgcagcttcacccatacctctccagccgaatataatagcatcatcaggtatctgcgattgggtcagttcgtcccatcccatcacttcacgccccttgctttgtacatacttgctcatacgtcgcataaaatagccttgcaaatcttcctcatccgccagtttttcctctctgatacgtttctggcaaagcgggcattgcttccaatgcgttttccaagcctcatcaccccctaaatgaatataccgggaaggaaaaagcgccattacctcatcaagaacgtcttgcaggaaatgataaacattttcattccccgcacaataaatgatgtcagcatgattccccccgagtcccggcaacacaccaatgaatttatccactacaggacaagcaagcatcggataggctgcaagagccgcattgctgtgtgccggcatatctatttcaggtataatttcaatacaccgtgaggaagcatatgccacaatctcgcgtatgtccgtctgggtatagaatcctttttccacggtaggctcaccttgccgttggttgtgcctctcatggaaaagcaagccttcccgttctacgcgacgggagcctacagccgtaagcaaaggatgcttttttatctcaatgcgccaaccgttatcatcagtaagatgcaagtgcaatgtatttatcttcaacaaagatatacaatctatcagacgtaaaaggtcttctttaggaataaaatatcgggctacatcaatcatcacgcctctgtacccgaaacggggactgtcattcacggtagcaaccggtacgctccaatcgacattcattgcacgctctcctccctccagctctgaaggcagaagttggcgcaagctttgaaaggcatagaacgccccttctttactcgatgtatacacgttaatccgcttaggagtgatgaccaggcgataagcttctttttttaaggaactgtcaaaacgaaggcagacatcaccggctttcgctgttgttttcacttgaggagtaaagcctgcaggaacattgaacagcgaggcgaactgttctgctacagataccatagctgtatcctctacggtgattaccgtactggctttaaatatgaaattacccttttcaagcgtaaaattctccggtgcaggtacaatttctaatttttgcatcttgcgctcttcacctctgacataaagaatgcagacacacaaaaagaagaaggtcaaaatgaagatattttttttcatttctatatttatatggtgaaaaatcagtctctatcacgttccggcgagaaccgcaccggatcgttatactgctcttgcagctccagcatggtctctttcaaactatctacaattgacgtatagtcgctgtttccgtataaattatgcatttctgtaggatcctccttcaggtcatacagctcccaagtgtcaatatcattgtaaaaatgaataagtttgaaacggtctgtccgtactccgtaatgacgtttaaccatatgctctgccggatattcataaaaatgatagtacaaagccttgcgccaatccaccggatgctcacctctcaatagcggcagcaatgatactccgtgcatatcctcgggcactggaatgccagcaagttccagaaaggtaggagcatagtcgatgttctgtaccatctcacggatttctccttttgccttcagccctttgggcagatgcataagcaatggtgtgtgcatagactcctcatacatgaaacgtttgtcaaaccatccgtgctcacccatgtagaatccctgatcagaggtataaaccaccaatgtattttccagcatacctttgtcttccaaataatccaggattcttccgacattgtcatccaatgacttaaccaccttcatatagtctctcatataccgctgatatttccattccgccagttccttgcctttcaagttgagcttatagaactcttcagtaataggtgcgtaaaaatcttcaaactgcttgcgctcaagcgagtccatacggttcagcatacattcatatgtctttttcaaacgcgactcctgaccgtctttcagcattttcaaatcatatataagatccatatcttcagcaatgcccatttcctgagaagcagcggcaatacgtccttcgtaatcatcatggaaattttccggcaatggaaagactttatcttcgtaaagtgaaagatttttgatttccggtaaccaattccggtggatggctttgtggtgaatgagcaaacagaacggcttcttcttgtcccgtgagttttccatccaatcaatactcatatctgtgataagattcgttatatatcctttcttccggatagtgtcgttgttcatgttaataaaatccggattgtagtaattaccctgaccgggaacaatttcccaataatcgaatccagtaggaagactttccaagtgccacttcccgataattgctgtctgataaccgttttcacgcaagattttcgggaaagtctgctgagtaccatcaaatacgcaagtactattgtcgtaaaacttattaccgcaactgtgtttacctgtgagcatgcaggcacgactaggcccgctaagcgaattggccacaaaactattggcaaatcgcactccatcagacgcaatacggtctaaattgggagtatgaacataacgacgatcatagcaactcatcatctgtgccgtatggtcatcggtcatgatgtacacaatattatacggcttatatttctgttcctgcttttgctggcaagaaaaaagtgaggaagatacaatagtcacccctgctactgaaaaaagtacatgtgttgttttcattttattaggattacgaattatggattacacacactatattattaattccgtctgcaaaaatggcaagctcttatatagattacagccctatatttactataaaaactccaataatcgctattttcatattattttgattagtatggagagtgcatcccggacttagcttaataaataaaaggaggcacagagcgaacagctactctatgcctccag

SEQ ID NO: 4093 - DNA, 319 bp, Unknown
  gut microbiota DNA sequence
acgcttattggttcggtcctccagatggtgttacccatccttcaacctgcccaagggtagatcacttggtttcgcgtctactccttccgactgaacgccctgttaagactcgctttcgcttcggctgcaggtctcaagacccttaaccttgccggaaaaagtaactcgtaggttcattatgcaaaaggcacgccgtcactcgttagagctccgaccgcttgtaggcgcatggtttcaggaactatttcactcttctgttcgaagtgcttttcacctttccttcacagtactggttcactatcggtctctcgggagtatt

SEQ ID NO: 4094 - DNA, 120274 bp, Unknown
  gut microbiota DNA sequence
atattggcgcacttttcaattagtatctacatttgattaatacttaatgtttctgttttttagtttgaagcggaaagagacattttttaggtgtatattgccgtcctcttattttattttacagttttgtttgctttcgtttttcgtaatattagtcctgtataaaggtaaacatcgggatttctcgtcgttggctttattttaaggatgctgtaataatgttaattttatatttacaaaaagccctttgtttaaaactttctttggatatatttgcaacaaatatagaaaaagttctgaaaaaaaatatatattctatgttgtttttataaattatttataattttgcaaaaagataacagtgtggtaactctctctttttcctctttgtttttcccatattatctccctgttttctacttatagtatttatctctatttattaactaattaattaataatgtatgaaaaacatttttaagacaatgcttcccatactggcaatggctgcttgcgtatggacaagttgctcggacgacaaagacaaaaacgatccgacaccggaaaagccggctttacctactatcacggtgagcgaacctgctcttagcgccgacaataccaaagccgtagtaaccgttaccccttccgatgatacggaaaaatggtactggaagtgcgaaccgaaaggcgaatcagctgccgcatatacggctgtaaccggcaaggaagagactaaactggaaatccccatcgatatagataaggattatgtcctgactgtctatgccgagaatgagagcggcaagagccaggaagctgtcaaggagttcatcttcaagtatgaggacctgatggacgaattggtggaatttgaaatcaagaacctttccgctttctctatggatgtagaggtgaagaaaggggctaagtgcgccaagtatgtgattggggcgattataaagggatatatgggaacggatgaaaccggacagcccaaatacgaagaaatctacaaggaagcgactttcatcgaagatgccgaactttctttgaatcccaacaaggattatcctatgcagccctacaactggtcggacgtaagcgctacgtttaatgaacagacattggtaagaagtgctttgcaggataaggatatcagcgaaagcaagggtattattctgaccgcattggatactgatgaaaccgaagtggttgttgccatttatgcggtagatgcagagggtaagggaacggtctttacaaaagaagtcactgtgcccgatgcagaacttaacggacaagtggtggcaagcatagagattcctgccggtaagattgctttgagaagctttgaagctacctttacggcagatgccaattgtgccaaaatgattgtgggacagacggatgcaggtgctattgctaaaaacagcggtaaggattttacagagatgacggtagccgaaatcgaagccagcattcttaagttgggtgcaagcgttcctgttacatacactcaaccgttctcaaaagagtttgccagcaaggatatggttcctaataccaagtattatgtatatgccatacctatcgacaagcaaggcaagcttggtaagattgtttataccggagttacaacgggacgtcctacttttgagggagtaggtagtattacaagtgtcagcttccccgaacagacttctccggagaaactgcttgtagatatcagtgtcaatgaaaatacgacagcggttcgcgtattctgggaaacatctgttcctgctaaccttgattggataatggtggatgaagcttccagcaatgtacagtggactgaatataaagtagaagatttgggtaaacttaagactgaggaaaataacggcggattgtatattttaagtccgggttctacttatcacttgagagctgtaacggttgataaggacggtaagctgagtgagattgttgacttggtggctaaggcaggtcaaggcaatgatggtattcagactaaagcggcagaggtggaagcaccgaaagaagctgacttctcaggtaatggagcattgacattgacggttgtgtccgctgaaggaactgctgcgacactaaaagttgaaaaaggtgctaataccaagaaagtttatatgctgaaaggaactgatatggtacctgctggtgttgatgcttatgtaaaggaacaagattttttcaaagatttcactccggatgcaacgcctactggtttaataagcttattcttagatgaaaatacatcaaataaggaaactgatgaaaactttaattggagtgtggaggaatatcatcctacatatggtagtgatgctcgtattttcataacattggataatgatggtaagtttaatatagctgattattatatccatggttacggaactaagaatgaccataactaaattcatttcccaaccaatatcctaaaaccagtaaatagtattttataacttcggagcgtaatgagcaggcgtaaacgccgttcattacgctctttttcatttcgaccgaacagcagatcggtttccattcaaatgtaatggagttaatagctgatctttattccggcgaaatagcttcgcggagcagccggaccgtaaatatatccggagtcacgctccactccctggtcgaaatcgttctgataagcattgaacacattctgcacacctgcactcaattgcaggtccaccgacttataaagtttgaaatcataggccaccttgactcccatatcgaagaaatcgcgtgtattcaccgccacatccttgtcaatataaccggccatgtgctgcaccagcatcgagccggtgtacgtgcccgacagggataatgagagaggcttgatcggcgtatacgttgccgtaaagtacccataggtattcggtgtacggaaaatcttcttctcggccggtgccgtttcgctccacttttccggttcgtcataacggctctgttgcaaggtgactcctgcctgtaactggaacaaagagagataagccatttttccctccatcgatagtcccaatactttggcacctgaaccgttacgccgctctttgataagaatgccgtcccgctctccgatgttctcgagtacaaatacatccgacagtctggtataaaaaccttcaaccaggaagttcacctgaaaagcaccgaaacggtgatacatatcggctgaggcgctgaaactctgagatttttcctctttcagattcttggcacgctcaatcatcgacaccgttccgcctacattctcaatatgcaggtcttcgtcgaaagcctgcggggcacggaagcccgacgaataactcaagcggagattaatgtcctcggaaggattgaaacggagattggcacgagggctaaagataacgtggttgattagattgtgcttatccagacgtccgcccaagagaatgctccatttttcgtttttccattcattctgcaaaaaagcactaccgatatttaccgtctgcttcgtataacggttgtatccccacatatcgtccttcaggttatcccggttatactccaatcccgcagtcaggtcggcaggcatgaaaaggcatttaccgaaactgtacacatattgagaaccgccgataaaggtcaggtccgttgtctttccataggcgttctggtcttttttgctgccataataactgtcgcggtccgtatgctgtgccgaagtataaacggtcagacggtgtttttcattcggagcaaaataatcgaatttcaagccgccgccgttgatagagtgctgaatctgctcggcaatgtcagcctcgtgaggcggacggttcagcaggtttccgccacgacggaactcctgtaagtgatgatactcgaatgtcaacttagaataagtgcttgtcttgaggaacgaacggaagccgactgtctggtttttaagtttcggcatttcggaataaccgtctccatcatgatcgtacgcatcccgatgacggttctgcccgaacacatagagtcccgcccgatgattatcggtcaccagcgatgcattcagcgaagtattattatcgaaagacgagctgccgccgatagaagtaagggtatgtgccaactgccccgaattgcgcagtggctccttggtgatgatattaatggttccggcaatggcggacgaaccgaacagggcagaacctccgcctcgcatcacctctacgcgctcgatcatattggcaggaatctgctccaacccgtaaacaccggaaagggcactgaagatgggacgcgaatcgataagaatctgtgtatacggaccgtccagtccgttgatgcgcacctgctggaaaccgcaattctggcagttcgtttcgacccggacaccgggctggaagttaagcccctgcgaaagtgtaggcgagtttgtattctcaaacatcttcatatctaccacattgaccaatgtaggtgccaggcgccgtttggtcacgctgcgattggccgataccaccactccgtcaagcgccacggcatcttcttccaactcaaaattttcttcaagtgtctttccttttctgagactgacattgcgactgatggttttataccccaccgaactggcttcgagcacaaaattcccttcgggaaggtttttcaggaaatagtgtccggtggcatccgtcaccgtaccaatggtagttcctttcagggcgattgttatataagagaggtgttcacccgtttttttatcgagtacatgaccgataatattggcatcagacgctttcagttccagctgttccggttggtcggccatagcaggcaacagggcacaacacaggccaacgaggaaaaatatatatttattcattttcatttttggatagtagaattactaaataaatttttctaaataatgcagtgagagagaggttctatcttccggcaggaggtgcccgcaaagataccacgcccacgacggacgaacagtatcctgccctatccggacgccacgaaagggtatagagcagataagcaataaactgaaaagagagaaaaaagataccggctccggtagtcgccacgtggctcagcaaatgaatcaattgaaattcgactgtggtatgactatggggagagtctttcttaaacgggtgcgaatggacaatggtcaccccattcactacatgcgagtgagtaaagagtgtgatacctgccatgtacgatataaatagtacaggcagaaaccatctcattattttcaggcacccttgtttcatccgtttagttttgtggcaaagatacaaagtattccataatggaacaatccctatttatggggataataaatacagccattatctttccctccaaagcgcatcttcgagtgtttcctctataagtatcaggcagaaagcatgcaagaaccaatccgttccaccgtggagaaagttttgttctgccacggagtagtttttgttccaccatggtggaatgaaaactactccacggtggaacgggataatcttttgctttgactttattggcagccatcttgctgctaatgagcggaatcaatacacctttcaaatacttataaaaccctgcgaaaccttacgatagtcttaaatttataaataaatgtcttttttgtgaaaaacaatctaaaaaagcgatgcgttattatggcgtataaattaaaaagttatcaatgagattattttatttgtcagagcatcgttcctgcttcaattatcaactgaggtatgaaagcggattttcacggtacgaattaactgcacacgaagaaggccggattgataatgacggttgcttctgtgtactgttcgtgctcaaaggagaggtgttggtagagctgggcagggagcataccatctccgtgcatgccaacaggatgctgctcatacctcagcgggaagagaaccgcttgacgggcatcaccccggcagaatgcctcctgctgttctggaacaaggaaataacggtgtgcgacaagatgtatttcgattccatttctcatgagaaacctattgccaccaacgaccacaccctgcccatccgtaaaccgctgcttcatgccttgaggcaggtgctgttctatctggaaacgggactgctgtgcaggcacatgcatattcttaaacagcaggaaatcattctgatactgcgcggcttttatgccaaaaacgaactggctggcttttttgccggcgcttccggaataggaagcaagttcgagaacctcatcctgaacaattaccggaaggtaaagaccgtcaaggagtttgccagtctgtgctgcgtttcggaacgctccttcaaccggaagttccagcactatttcaatcaaagtccctatcagtggatgcaggaacggaaagccgaacttatccacgagaaaatctgtaacccggatatcgctttccgggaaatagccagggagttcggtttcagctcttccgcgcacctcacctgctactgcaagaaacagttcggcacaaccccgacccacctgcgcgaggagagccacatcaaaaaacaatcgtaacactatgaaatatttaatggagaagaaaaaccactgcatgcacagttttgaacggcttgtcaggaagatgtccatgcagataaaagaccccagggagcaggatattttctgctcgctgctgacaaggaaagacggcatgcaggaacttgcggagaaatacggcctttcggcaaaagagctggcctctatgtatgagaggtcggtagaagagattatggacgattgggatgccatggcgcaggaacggcaggagcttcaggcaattagggtgagatacaggaactgccggtcgcttctgtccaaaaggaacatcgaccgtactccggtgagggttgtcgtaccgttcaaggagcggggcatccccgttgaatacctgaaaatgctgtcgacgcctctggcagtgcttgagataactccgagaatcctgcgcaggctcagggagtataacatctatctgctggaagaccttctgcgcttcgtcaagaaaaacggattcaatgccttggcaaagctgcacggcataggcatgaaatcgtgcgaggacttgtattcggcattgaagcggaaaggcatcatggagagtaaggacaactgccatctgtttcagtatatatgggtgtgaaacagatgtttaccgcttgtttattcttttttcgggcattttgtccgaaaagggaaattaattgtcttttatctgaaatgatgcgttgtaaatgtgtatgtatttttgcagacgaaataaaaggacttctggctgcccgaaacttacatccgtttgccatttgcatcttataaacagtatatacaaactataagctaattaaacaattgaaattcagatgagtaaatttaaatttgtacaatggtacgggatagttgtatgcctgttgatggccgcctgtaccgatgttgatatcaccatgcccaaagggcctaaaggtgataccgggctttcggcctatgagttttggaaagaaaaagtagcggacggaacggtagactggccgaaagaccggacggaagttgcggactttttcaagtatcttaaaggaaatgacgggaaagacggaaagagtgcttttgaccagtggaaggatatgattgccgacggcagtgtggataatccgcacaaccccggcagcaaatggcctgccggcaacaatacggtgcaagatttctggtatttcctcacaggcgctaccggcgagagcggccagacaccgcatatcggcgataacggccattggtttgttggaaatgaggatacgggcattgccgcgcagggagaagcaggcaaggacggtgcgaacggtaaagatgccgtgccgcctaccgtaaccatcggtgctaacgaccactggtttgtcaatggtgtggacaccggcaagaaagccacgggtacggatggaaaagacggcgtgtcgcccacgattaccatcggtaataacggcaactggttcgtagacggtacggatacgggtaaaaaagccgttggtgccgacgggaaatctccggaagtggccattggagagaacggtaactggtatatcaatggtacggataccggaaagccgtctttcggtaaagccggtaaggatggtacaaacggaacaaatggtacaaacggcgcaaatggtgcgaacggaaagagtgcctatgaactttggaaagaatacatcgcatccggtgaagtggataatcctcataaacccgaccagaaatggccggcagaccggaacaagcagacggacttctgggatttcctgacgggtaggtcttcggtgattgaaatacaagtaggaaaatataatgtcattcctgattattggaactcccagttacgggaatatgtgattcctacggacggttcggtgctctttaccgtgtatgacaaaacgggaaagaaagtagccgcaggcgtgcaggtaagcggattgcccggagtaggagcaacggaaaccttcacaaccgatgacaacggacagttcaaggtgacatgggataagttgccggacaaccaacctttgtcgcaccggacaggtagtgtaaccgtaacggttggcggagtgcaggaaacaagtgccaataatacgctggttccgaatagggtaaatgtgagggctacggtgagtacggtatatttgagcaacgcttcgtctgatataaattctaccagatatgcaaatatatcttttaaatttgaacgtcagatagatggagaatggggcgattatccaagtagtctcaactcttatatgatgaaggctgctaaaatcaaggacataaacctacctgtaaatgaacagaatttggataaagataagagtcaaacttatgattacggttattcatatctccgtatacggcgtcctttggtactgactcctacggaaaaagctaacgtggcaaagaatgatacgattaatgggttgttaaaatacgagtgggatgggaacgagttttattcaggcctttacttcggtgacggtgccggttcttataatgattatggacagaccgtatatttgcaggataagattcatattccggaaatatatccggttccgggtttcaaggaaggaactgtctttttggaaatcaaacagggagtaaccactttatggggtgaaatcgatacagaccaattgcctgatttctataaaacgtatgcttatccgacagggcaagataagtttgcgaaagacccggataccggtatctggaaatttccggaaggcaagctgcctgcttccgctttggcagaaaatcgtgctgtattcatccaaatgcgtacgttcgttaacggaacgggaggtactgtgcacaccggtactgtaccgctttcggaaggcggtaaacgctttatgctgacaagtgcttatccgggtaattggataggtctggatattcggagtagacaaaagggaactaatcagataacatataacacgacttacgaatatcgcagcagatttgcttattacttgctgaaagaaggtgagcagtatttcctggctgactttgcggacagaaccaagcgcatacctttggagataaaagattgcccggcagactggatgaattgattgatttacgtagataaatacatatgaatatgaagaaaaaaacaatactatatcttgtctccctcttcttcctgtcagttcctctgacgggaagaggccaggacaggaaagcatgggaaataggtgcaggcggttcgttgataaactggagccgcgtgtctgtcaccggtttccagagtactccggataattatatgtacaacctgaaggccaaccacctgatgggaggagcaaacctgtatgtggcacgggaactgaaccggtggttttatctggatttgcaaggtacggtaggcgtagcgaaaaacaagaaccggattgcgggcaatgaccggaaacacgacctgctgtatatgggcggtttgggcatgcagttccgctttacccccttgtttgagtctcaatgggtagaaccctacctcagagtgggggtgaattacctgcataagaatttcgcgtctgcctatggcggcaattttgtggacgaccccacgggagaggcgcactgggaatcgtccgatgtgtggaatcccgacgggcgctcatcggataagaactcttttgttccgctttcgttcggtgcaggtgtaaatgcgtggctaagcaattccttcgggcttggcctgcaaggtgaatatctcctgccggtgcagaagaatcttcctcactttgtgcaggtgtctgcccgcgtcatctggcgcattggcggaaagagcaaaaagcaggctccggtagtgaagtatgtggagatagagaaacctgttgaagtggaaaagattgttgagcggattgtagagaagcaggcggatacagccggttctgtcgaagcaatggcgtgcgacctgctggataatatctacttcgagtttgacaaggatgtgctgacggctgcttcggaaaaaacgctcgacaggctggccgggcttctgaaaagctatcccgacgcccgcttcctgattaccggctacaccgatgcaaggggaagcagcgcttataatacggacctttccaaccgccgtgccaaaagagtgtatgaagcattgctcgaacgcggcgttccggcagctatgctgaaatggcacggtataggcaaacgggcaagcatcatcccggttgcggcaggcaacagtgtacgcgagggcgacagaaaagtgttgctggaaagaattaccaatatgaagtactgggaagctctgtaaacaggctttcaacatctatttataaatttatgtactaacttaaaacagaaaattgtatgaagaaaattttagcgagtttattattgttgagtgttgcggttggctacgctgacggacaaacggcgctgaccggaaacaagtttgccgacaactgggcgataggtgtcaatgcgggtggaacgactccgctgacgcatcactcgttctttaagaacatgcgtccggtagtgggcgttcatgtggataagtatctgacacctgccttcggtctgagcctggaggctatgggcagctttaacactacgggcagcaaaacggcttttgacgcgtcaaacgtcagtctgctggggctggtcaacttaggtaatctctttgcggggtataacggtgctccccgtctgtttgaggttgaggctgtggcaggtatcggctggctgcattattacgtaaactccggtatgggcgaagaccgtaacagtatgtccagcaaactgggactgaatttcaacttcaacctgggagaaagcaaggcatggacattggctgtgaaaccggctttggtgtatgatatgaacgcgatgggtacggaagccgtgcgtttccatgccaaccgtgcagcctgggaaatcagcgccgggctgacttatcatttcggatgcagcaacggccgccattactttaccgaagtaaggccttacgaccaggcggaagtcaaccaactgaacgcccaaatcaaccgtctccgtgccgaggccgacaataccgccaaagtattgcaggatgccaaccggaaagtttccgatttggaaagtgaactggcagcttgccggaaccggaaaccggaagtggtgaaggatactatcgacaacagcaagaagctgttggagtcggtgattacgttccgccagggcagaatcggcatcgataattcacagttgcccaatgtggagcgcatcgccacttatctgagaaatcataaggatgcgggagtcgttatcaaagggtatgcctctcccgaaggcagtgcggaggtgaacgaacgcatcgcccgccagcgtgccgaggccgtgcgcaatatgctggtcaatagatatagaatcgccaaagaccggattgttgccgaaggtcagggagtgggttatatgtttgaagaaccggactggaaccgggtgagcatctgcaccataaatacccggccggatgctgcggaaggaaagtagtgaaccagttatgtagattttagatataaaaagggttgtgtaaagtaaagagaccgcatgcggcagcaagccgttgcggtctcttttttgttgtgtgccgttcttgtcttttacttcctgaaaagctctttcaggcttaccgtcttgttgttaatcagcggatgcgcccagaaaccgatgaatgtgatgtagcctacaaacacgaggataatcagcattccggtacgcagcgaagtggcatcggcaagcatgctgataatcatcgggccgcctgctccgcccacgattgccgaacacaggatgccggcaaacgaaccgtgatgttgcgatgccgaattcagcgccagcgagaacacgatggagtacatcatggaaatgctgaaaccaatggcagggaaggcaatgatggatgcttccttgcttccgaagagtgcggtgagcagtaggatgatggtgagtccgcccgatagctggagcagccgtttgctgtcaatgagcttcaacagcaccatgcctacgaggcagccggcagtcatcagtccccagaagtaacttacggcctttgcgccttccacctgcgggttcactccgtgatactgctcgaggaacgtactcataaagatggaagttccctgttccgtacttacataacagaagatgccgaggaagaacagccatacgtatttctgcctgaacagtgccaggtaggagtctttcgaaccgcctttctcatcttctttcaactcgattttcgggaaacgggacagccctacggcaaccagcatcaccagcaacagcaacgtgaatacccagtaaagcgatacccagggcaggtcgggcggggtgatacctgccagcaggtcgatgaaaaagttcctgccttccgtgtatatgtccggattgagttcgtgaatgaggtacgtatataccagcgggctcagaaacgaagcgatgccgaatacgaattgggccacttccgccacgaaagcatagttttcttcgccgcctacaacgcgttgcaacgggtttagcacagtttgcagcatagccatgcccaagccgatgatgaacgatgaggcaagcagcatggggtaggtgtgtatgcaggcaaacagcgtagtgccgatgaacggcatcaggaagcccagaaacagtaccggtttctcgccgaaacggtcgatcatcagtccggcaggaaccgacatgatggcataggcgatgaagaaagaagtcgggataaagcccgccatcgccaggtcgctcaggttaaagttatggataatgtccggaatgagcggtcccaggatattggtgataaacgatatggtgaaccagaacgccataatcagcgccagcattcctaaattctttttcatactatttcgtgtttagtgagaagaccagtgacgcggcgccgatgcttcctgccttgttacctaaagatgcagccatgatttgagtgttcacggcacagtcggctatggcatagcggtgtgccttctcgctgactttccggatatagaagtcgccggcttcggacagtccgccgcctattacgatgcgttgcgggctgaagatgttgatgaatccggcgatgccgtgccccagaaaatcgcaatgctcgtccaggcattccgttgccagcttgtctccttctttgtagaggcgtacgataagctctccgttgatttcctcgcccggaaacgagatgcctgcttctgcggcacgcttgctgaaacggcgcaccagtgcggaagtggaggcgtaatgttccagacagcccacagagccgcatgcgcagggttcgccgttggcgatgaggggcacatggcccagttcggtgccgcggttggcaaagccgttgaacagcttgccaccgatgaccactgcgccgccgatgccggttcccacggtcaggaacactacattctgtgcgccttgtccggctccgtacatcgtttctcccagtcccatcaggttggcgtcgttgcccatctgcacgggcagccccgtttccgcttcgatgcggtcggcaagattcagattctcccagcctttgatattctcggctccgcccagcacaatgcggttggtttcgtccacaatgccgggagtgcctatacctattccttccaccgctactccgagttgcagggccgaagccattgcctctttgcaggcggttaccaactggccgattaccgcttccgcagatacatcggctttcgacggcagcttcccttgaaagtgaaatacgccttcattgtcgataagggcgtatttcacggaagtaccgccaaggtcaattcctatagcgtattttttcatgattgtcaaactctttcagcccatataggagaactccatgcccattgtccgtcgcgctggcgcacgcgtacataataataatcggtgtcgcgctgcggctctttgtcttccatatagtgctctacggtgaagcagctttcgggcatggcgcggttaaagagaatggcttcgctcaaccagcctatcatgaagtgcgaacgtgagccttcgagcagttcgcccaatgtgtgttcgaacttcttgccgttgaagtctgcggtaagcacgccgtctttcggcatctccaagtcgaggattaccgcctgcatggctgcggtggtggtattcgggttcttgctgctgtacaggtccagttccgtttccttctcgcctacggagaggatgcggttgacatgtgtcttgaattcggtttcgccctcctgaggagaggtgaaggcagcgccgcggaagcagggggtaacgcttacgatacggcccttgttgacagacagcttgccttgccagtgcacatagcgctcttcgcggttccagccgaaatccacttttactttgcagcggacggtgtcgccttccggtgcaaccggggtcaacgggccgttcatgcgtgccagtatctggccgttcttgacaacgtctacatagtcgatgcagctttcgccggttacgttcaggtagatgcgacggctgttgccacggactacatcgcccatgaaagcgtcgttgaggcggaagtcgatgatgattttatcaccggtggcggcacatacgtggcgggtgcggagagcttcccaaatggcgtcgcgggtcagtgacggagccaggacaccgatgcggccgtcgccgtagctgcctgggtagccggagtgctggtcggtggaagccatgataccgaatttatgtccttgctccagaccgtactggatggttccttcccattggcggggacccatatcgtgcaggtacgggtagtcgccctggtcgctttccgccaggccgtgacgggaatacatctcgacgaacggagtgatgtctccttcggtgaagcatttccagttgtaaccgcggtaaccgccctgatagcccatgtggtgcggagtaacgaatactttatgtcctttggctttctctttccagtcttcgatagaggtacattccacgagcggcgcatccaggtcgtagttcaacgccacgtggtcgccgtgctccatgctgtgggcctcgtatccgatgaaggtaaggaattcgccttccttgttgtattcgttgctcatctttacgtacttctcatagccgccttcgcgcagacgcttgaaagctccggtatggtagtcgattacccatttcagacgagggtcgtttgcacccggaatgtccggccacatggcatggggcgttacgctgacaaagtccagctggcctttggccgcctcgaaagcatcgcgcatatcgccgtgtccgtaagtgaggttgcagtggttgtgcaagtcgccccagaatactttcaggttgcttgccgacggcataatcttctttgcttctttgcttcctgccacgcaagagccgagcaggcttcccgaagctgccagtccgagaaaagaccagcctgtgttttttagaaaacttcttctatccatgataataaatttaatggttttatctgtttttcattaatcttctgtcgcccttgaaaagctcgtttactttttcgtcggggtcgttgtctttatactgtttttgagtctcttgcaacagttgcatcagctctttctgcttttcggcgtattcgggcttgccgaacacgttgttcatttcgcgcgggtcggctttcaggtcgtacatttcccattcgtcgatgtcgttgtagaaatgaatcagtttgaagtcctgtgtacggatgccgtaatgacgttttaccgaatgctcggcagggtattcataatagtggtaataggcagccttgcgccagtcggcgggtatcttgccttcgttctccaacaccggtttcaaggaagtaccctgaatgtccgacgggatttccacaccggcaaagtcgaggaaagtgggagcgaagtccacattcatgcagattgcattgcttgtgcttcccgccttgatagctttggggtagcggatgataagcggcatgcgctggcattcctcgtacatgaagcgcttgtcgaaccagccgtgttcgccgaggaagaagccctggtcggaagtgtagacgatgattgtattgtccagctctccggtcttttcaagatagttcagaaggcggccgatattttcgtccacagacagtacggtagccaggtagtcgcgcatgtattgctggtatttccaactgattaatgccttacctttcaggtcgcccttgcggtattcggcaatgcgctgcgcatatacgtagtcccatttgtcctgtacggcggcaggcatgcgtttgtacacgctgtaaaggcggttggtggtatccttcagcatctcttcgcgggtcagcagtttcaagtcccagtcgttggtcagggtatgttcgatggacatgtcctgctcgcgggctgctctgccgcgtccctcgtagtcgtcgaacaggctggcgggttccgggaatgtggtattgttgaagatgcccaagtggcgcggagccggcatccagttgcggtgaggcgctttctgatgatacatcatgcagaacggtttgctcttgtccctgccttcgaggaatttgatggccttgtctgtgatgatgtccgtggcatagcctttctctacgatatgtttgccgtcttcccagaaatcggggtcgtaataatcgccctgttcgtgctggccgctcaggatgctccagtggtcgaagccctgcggttcgctgataaggtgccatttgccgatcatggccgtctggtagccggcttgctggagcagtttcgggaatgtctgctggtcgccgttgaaggtgcttgcattatccgtaaagccgttttcgtggctgaacttaccggtaaggacgcaggcgcgtgacgggccggaaagggcattgaccgcgtagcagttgtccatacggataccttcgttggctatacgatccatgttgggagtttgcaggagattaccgccatagcaggacatggcttgtgtggtatggtcgtccgtcatcatgaaaattatgttcggacgcttgggttcttctttttgctggccggcacaggaagcgaggcttaatgtggctaacggaagaagtacattggaaagattgtttttcataaccgggatgtatcgcttttcattatgaagaaagggactgctcaaaaactaaaatcgctatcgctttgcttttcatttttgggcactccctttcgtcatgttgcttttatattataatttgtaatttaaagactgtttcttgccgtttactttcacctctacttccagtccgttttcattgaatgccttgtttttgaacttggcagacaatttgggggcgtctgcgctgttctttatcggacagataacggtgatgtaacgtactgcatcttcgctgtctttcttcacattgaaggatacgttcatacgtttgtaacgtttgcggtaagcggtggagcaccagcccggctcttttttcatcgtcatgccttcggggccgaagcattgcagcttcatgttgcttccttcttcaaactgagtgacgaaagtcatgtcctcgcggctgttggcgatttcgcctttcggcatctggtagtgcaggttaatggagcctttctggcttcccaccatttcgtctacaattacgaagtagctgttgtctacgaagaatacggaacggcggtgtttcaggttcttgtagctcggattctcggtaaccagtatctgtacgttgccttccggctgccacagcttggttacggattcggtctggtccagattcttgttgttcagcgttacggtgttgtgtacgcaggtctgacggtgccagttgcgttgttccatcacttcgccctcgccggcatatacatacgaaccggaatcggggaacaggtttttgccgttgaaccagagttcgaaagtaccgttatccggctggcagtgccagaatgctttcgggccggcctttacaaccatttgcatggcatccgttccccaagagttacggaatacgaagaaaccggatttcaggaaacctttggagagatattcgggcagtgcgccttctttaccatcggttgccagatacttgatgaactggttcttcgggaacatcttgctccagttgcggtagttcttcagcatttctttcttattggtcagcttggcatcgctgaaacacgggttggtgtagtcggggaaagaaacgttggcatagaatacaatcattttctcgattgtatccaggtactcctgcgggaactcgttgcggaaaccgttcaggtcggcaatgttcagtgccttgcagaaaatgttgatggcagcgaggtggtagtgcgggtcgagctcgaactgtccgccgtcgttatacacctgtacgttgatttcacggttcatgatgtcgataccgctctttctccaggcagcagcctctttgaattcggggaagaaagcgccggcgtagatcatacgctgtgcctcgaacagcaggtgattgccctgtgcagagtaattgcccaatatatggatggcatgtttgtggtagtttaccaggaactcggtcaggaactccggggtgaaagagggagacgggaggaacagttggaactgtgaggtctggtcttgcagacggttgctcacttccagcggacgccatgcgaaacgtgcgttttccacatcacctttcagttggttgtcaccggtcatttcatactctttcttgtcaaccttcaccagcgggtttttcttgatccagtcgatgtactgtttggtccactctacggcgtatttctcgtcgccgcttacacgataggccttgcccatgggagtaaaccatttgtggcggtgcaactgccagcgcagttcgttgtcctttaccggccagtatctccagtcgatgtcttcaccgtagttgaatgacggctggtagcctttgtgggcaaagaatgtatgttgcagagcctcgtcggccattttctgttcgtccttgccgatggtaacctttttcaggtttatgtcgggagtcttcacgttggtacgtgcacggtagtagtcgagcaacgctttggctgcatcggcatctttgccttcctggtgcagggcctttactttctccagtccgggataatccaggttgaggagcgagaacacttcggttttcaattcctgggcatttgctttgccaacgaagcaggcaagtgccagcaggacgatatatttaaaagtcttattcataatgtttgttggtttacagtctggttattagaggtttttgtagctgatacctttcaagtccatgaagcgtttcagagcttccaggtaatagtaatccgcatagttcaacggagtgtcgatttccgaaccgttaggcagcgaaccggtagagtgcatcaggatgaatccctggttttcgccgacctttgccagataggcgtcgcccgacaggctcttcaggattttttctgcatagtccaggtatttctttccgtcgggaaccattgtgctcagctctatcagggcggaagcggttacggaagcggcggatgcgtcgcgcggagtctcttcggttacgggagcgtcgtagtcccagtaaggaatggcatcgtcggtcttgacacggttcataatcatgtcggccacttttacggcgaaattcaggaaagtagtgtcttgcgtctcacgatagcaggcggtatagccgtatacggcccatgcttgtccgcgtgcccatgaagagtcgtcgttcttgccctggaatgtctgtttcttctctaccgtgccgtcgttgttgtagcttactacgtgccagcaggtatagtcggggcggaagtggttgttcatggtagtcattgcgtgttttacggcgatgtctttataagagttgttgccggttgccttggctacattgaacagcaaatccaggttcatcatattgtcaatgataacggggaagttccatgttccgaagtcccatgaacggatagccgagatggaatcgttgaagcgtccgcacaggttgtcggctgtttctttcattacggctgcaatagtgtcgttaggagccagacgctctgcgttgccgtaactgcaatttaccatgaagcccaggtcgtgcgtaccggtgtagtaacggacggggttcaacaggttggtatattggatggcccatgttttcagtgtatcgttgcccgtcagttcgtaggcataccacaaagagcccggatagaaaccgctggtccagtcataaacgctgcacaaacggcgttttcccaactggtcggctgtaggctgcgcacggagcgagtccttgaaagtaagcgagtctctttccaactggcggcacaggaagttcatgtcatagcctgtacggatagaacgcggcagcatattagtggacgaaatttcttctgcggttaattgcagttgcgcagaggctgcgtccaagccttttttaatccaactgtagtcttctttgggttgtgtttggcatgacacgaaagtcaatgcacccaaagccaagagaacaaggttctttttcatgttattcgtttttaaaataattgattttagtagattttgtaacgaaagcaaagctaacggattttttatggttcttgtagcaagaatgttgaaaaggcaattaatccgcgttctttgaatgtcacttttgttgaaaagagtttagaaaatctccaatatgcccctctctgggcatattggagatgtatttggggtggttgttaccaacctgggttttggttgaactgggtacacaagtccatttcgcgttgcggaataggcatcagttcgtgctgaccttttttcgtgtagtcgtatactacatagctcgcagaactccaccagtttttcaattcattatatgtttcttgaatagtctcgtagtaaataccccaacgtattaaatcgagacgacgatgaccttcgaaagctaattcataggcccgttctttatgaacagcctttcggaaagtagcttgatccataccttctggtaacgaatagttgcccttattgccataaccacgtttccgtactttattaatagcggcataagcgtctgtggtaggtccgcctttccactcattcagtgcttctgcatatagtagcagtacatccgcataacgtaaaacataccagtttacagttgatttgtcgttgttgacaaaaggtatactttccatgtatttatcaatatcccatttggccggcgtgtaagtttgtttggctttttgagatttttcaggatctaaatccttgcttaatgctgtggcttcatcatcggttggaatgctggccgctaaatagtaatcgcctaaataaactgctccggttttgctgtcattgtgtccatgtttatagttggctatagacaaattttgacgtctgtcgggacttatgccagtgcttgcatcgggttgtgcctcttctctccaattaagtacaaatgaatgaacaacctgaacgttggcagcagtacttccgctgcgaccggcatcgactgtggtctttacgccgttccactttccgatacggcctacaggatcactgtttcctgaatatgtgggagaatagaaagatacttcaattaaactttctgttgggtcccaaattccgttacaagtattttcccataatttttcatagtcagtcagcaaatcatgtttgcccgattcaattaggatacgtgctgtttccgcagctgcttcccatttgcttgtgtcctgtatgggatatccagcccaagtggcatatactttagtgagtaatcccaaagctgctccttttgaaaaacgataatcgttactactacgataagtgtcatctttggcatatggaagaatatcgcaggcatacaataaatcgtcttcgataaatttataaacatcaacagggtcggcttgtacgaaagttgaggggtgttgattagccatagctgtattagtcattaaaggaatatttccccaacgacgaactaactcaaaatagtacaatgctcgtaaagctcttgcttcggcaatataaattgttgccaattgtttgtcggattcattatacgaatccattttcacagaaatgcgttccagaaaatcatttgcattatagattccgctataaagagatgcccatgaggtctgtacttcagcttgtgaagcagaatatgcgttcgtaggaagaatacggaaattttcagttgtgcttccctctacttgtgaaatatctgttcccatagagaaataaatggatagatgatgaccatacattccttcttctatagtagaacggtatactccaagtagtacatcttgtgcctctttggcgtcattcatatatttatttttttctacttcagtgctactttcttcttccagagaacatgcagctggaagaaggcataaggctaaaattcctatatagtatataaactttttcatatgtatattattttatgaattagaattgaaggtcgattcctactgtgaatacacggctcttaggataagcaccccagtccaagcctggcatcattgggttattcagactattgacttccgggtcgtagccgctgtaattactcaaacagaacagattctgaccggtagcatacacacgaagtctggaagcatggaacttgttcgtccattttttcggcaaagtatatcctaatgtcagattcttcaggcgcaggaatgaaccgtcttcaacgaaacgtgagtatacatcattagtgatgtagccatcgtaagcaggaaccacattcgaagcattggtcggactccaacggtctgccacttcagcaagcatattacgacgtccgctacggctttgtgtagcatataaacgtgtagcgttgtagatgtcattgccatagttgaattggaacataaagctcagatcgaagcctttgtattcaaatgtattggtgattccaccaaaccatttcggcatggcattaccaataacggtacggtcattggttgtaatatcgccgtcgccatcttggtctttatattttgtaacaccggggcgggcgcctactttcttatccttgctgtagcgtgagttttgggtgattcccggtttcaataccaaattaccatttgtatcagtatagaaatcatcatattgatagactccatcgaattcgtaaccgtaaatcaatcctaaagattcaccaactttagcaatgtagtcgtaactggtaaaattgctatcaaaaccagaacgtgcatacatgtggcttgcaccgtctgccaatgcttttaactcattccggataaatgagatattgaaattggtattccatgtaaactctttagtctgtatgttggtagaggttatactcaattcaatacctttgttctgaatcttaccaatattttgccattgtgaggtaaagccggttgcctgtgccagcgattgtgctaataataggtctttagtgttcttgataaagaaatcggctgttacattcaaacgattatcgaagaagcctaaatccaaacctaagttaacagaacttgaaccttcccattttaagttggaattttttagttgcttgggtgtcaaaacagttactgtactattaccaatgccatatttgttatctgtatacaaatccatagacaaatagttactgatacggtcattacctacaataccccaaccaaaacgaactttgaaattggaaatccatttaaggtctttcataaatgcttcttccgatactcgccatgcggcagagaatgaggggaagaaaccccatttattcttgttagagaatacagtagaaccatcggtacgtacagttgctgtcagtaagtaacggttgtcatagttatagttggcacgggcaaagaaagaaagtaaagttttgtcataatagttggtattaactttacttggtgtagctcccaaccctaagttgtcattacccaaattatcaaaggggaagtccattgcttcaccaagtaaatactcactgcttctaaaagatacttcgtgggccaacatcacatcatagttgtgtttttttaccttatctttccatgtcagtgtatttgtattagtccaacggacatcacgtcccatctgcgttcttccgtatggtttctgtccgttacggtaagcctctttcgaaccatctctgtagaatatatctgtacggttattggttgtgttataggaaccgcttgtcttgaatgtcaaccctttgataatctgccaatttacggctgcattggccgaccacatttcagcacgcttatcattcgttacagattctgcttgttttacgggatttacttgtgccaagctttcaccagtacttaacatttcagggtcaatagccgattccaaaagttcttcattagtcattttcagaccaccagtaggacgtgcacttaatatctgtgccaacatgttgaagcgaccggagtcaccagatgtacctacacctttacggttagtcatggcatagtttaccgttagattgaaagatacttttttgttgatcttctggtctaagcggaatttagctgtagttctgtcgaaaccactgtttttgaagataccgttttccacataacgtgagagtgagccgttgtatttagtattgtcggttcctcccataatacttatgttatggtcttgtgaccaagtagggttgaaggtttcaccttgccaatctactccggttacaccaatataatcatcaagtgtttggtatttataaggattaccatctgcgtcattctctgctttgaaataagtactactgtaagcttcgttgacttctccttgtagttttacgaattcatatggagagagcaggtctaatgtctttgagattttacggtaggtagcagaaccattgtaagaaatagttgtcttgcctgctttaccggatttagtagtgattaacacaacaccattggcagcacgtgcaccatagatagcagatgaagaggcgtcttttaatacttcgatagactcaatatcggagtttgaaagataatctatgtccgaaacttcgaatccgtccacaatataaagcggagaggcatctccagttaatgttcccacaccgcgaatactgatgttgaagcctgcaccaggagttccgtcagtagacgtaatttgaacaccggcaatttggcctcctaaagctccggctacagaacttgtctggaagccttcaatgtccttagaagctacggaagcaacagagcctgtcaagtcgctttttttcatggtaccatagcctacgacaattacctcatccaaagttttgctgtcaggagttagttgtactgttatctgtgtttttccttgcaggcggacttcctgcgtcaagtatccgatgtagctaactaccagtgtggcgtttttctttactttgagagtgaagttaccatctaggtcagctgcaacaccgttgttctcaccttttacttgaattgtagcaccaattagaggctctttattttcgtcgagcacagttcctttcactgttacaccttgtgcgaaagtgataatggagacgaggagagctaagagggtgatgtaccctcttttgctcagtgtgtgatatgttttgtacataatgctttttacttttttgttagattattagttatctccgtaggtctcatcgaaccaaatagcaataggataaaatacttggctatttggaatcgtgccatctgtagtatatgctattctagcaaataatatcccgttaatatattctcctttttcgtttttccatttttcaggattaattctaatagctttgcttattgggtctacgtaacctaatagtctatctgttatgcttttattatcaatattactatctgtgttataatatgaaataggtttaatagatgagtaagatacagtcttatcaatatctgcaaagaaagaatcccaaacttcttttaggggactagatgtaggagtaagtcctttgggattgtcagtaatctcaatgttaaaataattaatatcttttcggaaatccatttttaaagttgtgtggtctgtaggtttttctattattggagcttcagaccaaccacctattttgggattgactttaaacacaaatggagaatatttaacgaatacaccatttttttctacattgcatctaatgaatattggagttgttacggagtatgctaaatccccatcgcctgctgttgctttaacgattatcaaccccatattcatagagccagttgtataaccatttttagataatgtaatctttcctgtttgtgtatcaagtactgcatcctttcctactccaattgatttattgcctccaataagatcttttatttggtattcccatttgatgttaggagtagttgtatttgtgaggaaattaacagtaggtattagctctgcattatccatctcgtctttagaactataggcgaattggtttgcatgttgaaccgtgtttaatccgatattatttccatagtagagtgtgaatttattaggattggctttgatttctaagacaacagttgttgttgcttctcctttatcttcagtaggacctacaactttgacatttattttataattaccaggagctaaagtgttgtctgccgttatagaaatcgtaccactgacagggtcaattgtaattttattattattaatgtgttcctgaataataccagtgttatttgtaaagctaaatatagcttcatcacctttaaatttagggtctacagggattttataggctttttcttcataggtttctggtactacatatttgaacgtttcagggtcaataggttctatataatctacaattgttacagtgtaagcctctgcaaaatctgctgaaccgtattcattagtcacagttacgtcaatcttataaacattaccgatctcaagtgtactattttctgctaaactaattttaccagttgtttcatcgattgtgaagccggcaacctctggagtaacagatttgatagcataggtcattcctttcgaaccttgaatggtcggtatttgtgattcgtgtgctgtattttgttctactcgcacagtattgggcttatataatagatttaacggcttggaaatgacattgaatgttactgcgtctggataaaggtgctctccagcttttgttgttagtttcaagcttagaatgtacttttctccggggataatctcatctttatggtcaggattgaaagtgatgacccctgtattcgaaattgtgaaatactttatgtattctttactttcgtcctcagcgaattcatacttagtaatacttacatgtttttctgtgtcagtagttactttagcactggcttcccaccaattttcatcctccatttttactaatacttctgcaggttctactgatacaccttcgggtactgcgagtagcatatttacttgcacagcatctttgaaatcaaagaatttgccattagaatagcaacctacgctaatattgtataatcctggtttcatctcatcagtgttctgaactgtaatttcaccagtttcggaatttatcacaaagttgtcattgttgctgaaagattcgttatcaagtgtaatctttgtgattgtaaaatcataaggcgtactgcctttataagcaggtgcttttaatgtgtatgacatgctggggcctatatctgttatacccagatagtgaagaataaaccctgttgtatctgttgtctctgtcttatcacaagagacacagaacacagttaatgcagctaccatgataattcgtagcttgttgaacgtgcttgataatttagatttcatattttaaaaattattggattgcaagatataagataatgggtattctataccattaatagttactttgattgatgctccgtttgcactgtatccattatctgtgaatactgcttcaatagtttgtccttctgttttcttacaaggataaataaccgtaataaaacgagctgttttattagctaatttatttattttaatttgataagctttgcgcttgtcaaatacatcattttttacaacataggctactcttccttccatttcattgaaagtggctgtttcgttagtaaatgtccgtactacgatattattatctgtgaatgtagtatgagctcccatttcattggcatcatattctacttccgactcatatctgcaaagattgaaacttaaatttgcagaaccagccgcgctgccgataccctcgtctaccaatacaaaaaactccttatttacatagaatacggcacggcgatgacgcatattgggataactttgattttcaaaaacaagtgtctcaacgttccctttagtttcagattgtagtaacttaccgtcagctttctcacaattccggtcatcaagtgtcaatgtattatggtgcattgttttacgatgccagttacggtagccttgtatggtcttgtcgctactttcataagcacatacacccgaatcagggaagaagtttcgctcgttgatatatagttcaaatgtaccattatctggctggttatggctataagaagcaaaactggtagattcgtcattaaatttgttattgctgaaaatcattactgttgattcgggaacccatccattacgcatgatataaaatcctgcatcttcaaatagtttcatttcgtttcctggagtattaccttgagatgcaccaccgtttcctgatgtggccatgtacttcaattcgtcactctctgggaacatttctgagtattttttgaaatttttagtaagtatactacgagtcttattccatgaatcattaaacataggaacaatttggtctaatttctcttcgctgtcactgctgctacctttggcaaaaaaattaggataggtaaagtgcattaccacctcgactgcttttcggagtgcatctttaaactctactgattgtccattagcattagctaacttcattgcttcataaaaattatcaattactccaatatgatagtgcagagaaaattctttgtgccaaccgtctgcaagaaattgctgtatctcagtatttaagatttcatttcctttgttcttccagttttctgcatttttaaattcaggcattaatgtaccggctgtagcaagcgcattggcttgtgttataaggatgtttccaccagacttataaggatacgcctgcaaaaaatcagcttgttctgcaaaggataccagaaatgtggtgagccattcaggagtaaaattggaagatgttttataataatccaaaagctgtacttgatcaagaacgcgtgtcgctacttgtagctgccaccaaggaccttcgtctataggtcctgcttctggcttcgggttttggacaatccaatcgccatatacttcaatccaggaattgatatatttctcatcatgggttccacgatatactttagcttgcggtatgaaccattgatgacggtgtaactgtttctgatattctgcacttgttcctttaggattattggcccaattgatagctcctgcttttcctacagaatatggttttcctatagcaggatcttcaagttgtccgttaacataaaaacgatattctaatgcataatttgctttggataaatcagcatcgctgtaagttacatcgaccaatgagagattaggatttataacattagttcgtgttcggtaatattccaacaatgcgctggccgcaagataatcctcacctgcttcatgatattgctttactttttccaagccgggatagtcgaggttgagttggtcaaaaacagcagtgttcaatactgcgttttctttgttctcaggagtcagttctggactgatgtttccgcctgtggcgaattcttcttcgtcgtcaacacatccggagagtgcaaacattgcgaacaaacagataaaaagagtgttcttcatacttaagttgttttttattagtaaaagtttcaattttccttgccgcaaatatattacattgatttctaagagctaatctgtcttgtttatgctttctttgaaatctgaattttattattaaatttgttgaatgaaatatcgtatttgtttaaaaagcctgcatgaggtattctgagaggggtgttcggatgaataggaactatcctttcttatgtgcattctatcagtatcttatcagaaaaaatgttagcctgtacctccttcacccttcacaactctttattcatgcgggatagcgggtgaagcccggttgtagagcttcattggcaatgctacacaattgcatataaaactccacaccttaccacccgaaagtgcaggcatttgcttggcaaacctcagggattttatctgttatagcgcggcatttcactcgcaaagacgcggtgtttcggacgctaacatgcggtgttttgaaaagcaaaattgccttgcgggataaggcctatccttttacttttttaatgtactccgtcggcaaacagcctatatacttcttaaagcaagttgcaaaataagaagatgaattaaatcccaccatgctgctgacttcggttaccgtataacgtccgcttttcagcagttcggtagcccttttgaaccgtactttacggataaagtcgatggctgactctccggtgattgctttcagtttcaaatgcaggttggagcggctcatattcatcttttgcgcaaattcatcggtagagaactcaaaattatcaatgttttcttctacgatgcttacggcgcgtttcagcagctcttcgtccatggcattgaaagtaatcttctccggttccacttccaaggatttggcgtacttctcgagcatgtggcggcgggtacgcatcatgttctgtatcttggaagtgaggacggcgatggagaaaggcttggagatataatcatccgcacctacttgcaggccttccaactggtcttttatgtcggttttggcagacaggatgataaccggaatgtggcaggtacgaatattctgtttgatattcttacacagcttgatgccgtccattacaggcatcatgacatcggtgataataatgtccgcctcatggttcttcagtttttccaatgcttcttcaccgtttccggcctccagtatgttgaacaatgcagccaaaccgctgctgagataatggcgaatctcctgattgtcttccacaataaggatggttccgcgtttcttgtcgcccgtttctatggcttcattctccattttctccgtatcgatgaaatacatttctttggagttggtggagtacacctgctcttcttccttggaagtgttggagcctgccagctcggtggccttataaacagccaggtcttgcggcagatagacggagaatgtacttcccttgccctcttcgctctccagttcgatgcgtccgtggtgcaaatcgaccagacgctgtaccagtgacagtccgatgccgcttcctatatgctggctttctatctgatagaagcgttcgaacactttaccctgcttattgataggaatgccggcaccggtgtcgctcacttgcagtatcagccagttgttttcctctttcagggtaacggtgatactctttccgttgtccgtatatttgaaagcattggacaaaagattgttgacaatcagttccagatagttagggtcgaaaagttcctctttttcttccaaatcggagtggaaagcgtagtgtatctctttgtggcgtgccagcttgtcataatacaggaagttctcgcgtatcaggcgataggcattgcctttctttattttcagctcgaaaactccgagttccgcccggcggtagtccataagctggttgacaagatgcagcaggcggttggcattccgctggatgtattccagttggttgcgggtccagcggtcgttgattttactgatgacctcttgaagcggtgccaggattaaggtaagcggtgtacggagttcatgcgaaatgttgatgaagaagcgcatcttcatctggttgatttcttcgcggtgttccttgtcgcggcgttcgatttcaagctctgcttccattttcttgcgcatccagaagaagcggaatacgaatgtgacaaagccggcaaaagtggcaaggaacagtatgacagcccaccaggtcttgtaccacacgggcagaataacgatttccagtacggtaggcgtggtgttccatttgccgtcgttattggcggctttcaccatgaagtgataagtaccttgcggcaggttggagtaggacaccggatgcctgtccgtgaggtagtaccactctttatcgtaaccgtctaatttgtaggcgaatgtattatgctgtccggagatgtagttcgatacgacaaactccagggagaatgctgtctgccaggatttcagcgtgatgctttccgtgtcgctgatattcttgctcagaatgccggtttcatcgtcgggacggacggtcttgttgaaaagctgtagcttggtgattactaccggcggggtatagggattgtcctgcaacagttccggacggaatgtggtaaggccgtttatgcctccgaagtacatctcgccatcggaagtgcggtagcaggaagaggtgttgaactgattgctctgcaatccgtccgcttcggtgaagttgcggaatttctccgtttccggattgaagcatgagataccccggttggtactcatccacaggcggccgtaagagtcttcgagaatgccgtaaaccacgttgttgggcagtccgtcggctttggtataccgtttaatctgtttggctttctcgtcgaaacaatagaatccttcgcgtgtacctatccagaccaaaccgttgtttgcctcgtagatgtaattggtgaatgctttcgtagcggtggattcgggtaaaatgtccgctttctgtatggaggttccatgctggttgaatacggacactccttcctcaccgcctatccaaagacgctttttggaatcccggaacagggtagtaatcttctggacgttgattggcgttccgtcattttcctgagtgatggtggtaaaactccgtttttccgggttgaagtgtaccagagcgcttaatgttcctaaaaggaaattgttctctccgtcgggaaggatggcatatacgttctcattgattaacgggctgttgagctggttgaagttttccatgcgtccgctgttgcgatgcaggatgctcaggccgccggcatgtgcgccgatgtataccagtcctctcggttcgtccacgtatacggatttgatgttgttggagcctaagccgtcttcgcgctggctttcctgcaatgcgtagtggatgaacttctgagcgccggggacgtagaggttcaagccgccgtcgttggttcctatccaaaggttcttctgcttgtcctcaacgatacagcttgcaacattgtcgctcagcgagttcttgaacgggatgtgctctatgttcttgaagcggttgcggatggggtggtaataattcagtccgccgaaatacgttcccagccacatgccgccttgcgagtccatgaagatactgcgtacggagcgttgcgacaggctgccgctttctacgggattgctgctgtaggacatgaacgagtcgtttccttcatggtagatgttgaggtcgttgaaagttcctatccacaagcggttttgtgaatccagtgccagtgagcggatatagttggagctgatggattgcgggtcggaaggggaatgcctgtatgttttgacttcccgggtcttggggttgacaaggagaaggccggaaccttccgtggctacccatatacgggtaggagattgctgcaggatgctttggatttgcttgctgcctggaatgtaagcgagtttttcgagtgtattcttcggaatggaatagcagtacagaccgtccgacggtgtgcctatatagatttggtcgtcatgcctgtacagggcggatgcaaccattttgtgcattgccgtgccgaatatgtcgtctacaaaacgggatgcggggatgtcgaacatagtcagtccttcgagcgtgctgataagcagccgctccggcgaaagttccacaatgccgttgacttgcaggtgcttgccgttcttttcgaggaagaagttctggaacttgtctttttcctcgtcataatacgacaggccgtcgcgggtgccgatccatacacgccccttgctgtcggtcataacaatgcgggagatgtcgttggcgatgctgttggggtcgttttcatcgtgctgatatacggtaaatgtgtatccgtcgtacttgttgacgccgtcgtaggtggcgaaccacatattgccgagcttgtcctgcgctatggagaagaccgtgctttgtgacagaccgtcgttaatggatatataagaaaagtttatctgtccccaagcttccggataagcgttagagactcccgttatacataaaataaacaggatggttgttatctttttcaggatactcattattgaaccgtaaaatttatgatggaccaaagatactaatatctttcagaatttctatatcttgtggagtatttgcacaaatatagggttttccgaaacaaataggggataggtgtgaggcgcagctttcgtacttttgccgcatcgtttttaagtttaatatcaaataaggatgaagaaaaacatttttgctatctgcatggtgacggcagcggggtgcatggcaacgctgaccgcacaaaccaaaggcgctgaaacgttggttcccctgaccgaacgggtgaatgttcaggcagactctgcacgtatcgaccagattatagacggtcgctgggtggctgtcggtgcaaagaagaaacacgcgattcagcgggatttcacatgtctgttcaacggcaagccttcttaccgtttcgaactgcgtcgggaggacaacacattggagggatacggcaagggagaaaccaaaggccgtgccgagctttcttattgttatgccacttcggcggattttaacggactgccggcggatgcttaccggaaagcgcaaattacgaaaaccgtatatcatcacggaaaaggcatctgtccgcaaggggcttcgcgcgattatgagttttccgtatatatcccgtctgatttggacagcaatgtgtccaccatttttgcccaatggcacggcatgcccgaccgcacgcttgtgcagactcctgagggtgaagtgaagaagctgaccgttgacgagttcatagagctggataagactactatcttcaagaagaataccgggtatgaaaaggtggcgaagttggataagctgggaaatccgatgaaagataaaaagggaaaccctgtttataaggcagggaagaagaacggctggctggtagagcagggcggttatccgccgctggctttcggattttccggcggttggttctacatcaaggccaattcggaccgccgctggctgaccgacaaagacgaccgttgcaatgccaatccggaaaagactccgataatgaagcccgttacttccgaatacaaggcttctacgatagcctataaaatgccttttgccgacttccccaaagattgctgggtgactttccgcattcatatcgactggaccacctacggcaaggaagccgaaaccattgtgaaaccgggtaagctggatgtgcagatggagtatgccgacaaaaagaaaaccgttaaagagcatatcgtgaataacgaagaaatcctgataggacgcaacgacgacgacggctactacttcaagttcggcatctatcgcgtaggcaacagcacagtgccggtatgctataggttagcggttagggattagtgataacactaatcgctaaccgctctttctctggtagacgaggcaggtggtgaggaagtaaattccggtttgtatccatagggcctgatactcgaaggctacttcgttgagggtggctcccatgctgttgatacgtacatagccgttgattccgaaagtggaagggaagatataggaaaaatacctccagaattcgggcattgcggcgcctggccaggagatgccggagaggaataacagcggtacggaagtgaacacaaacaataacatacaggtttcccggttgcgtatggcaatggatgctgtcattgcaaagaagatgcaggctgtcaggtagggcagggcaaacagagccagcacactgggaattgctatctggttgaggctgaaaaggcgcggtactacacatagtatgtacacggctaccagcgagtagaccataaaataactcaatccttttcccatgacgatacggaatgttccgttgtaatgagggtcgtcaggaatcaattctttgaaccggttttgctcgcgggctgttccggcagccagaccgatacccaacagcaatgtctgctgtataatcagtatgagtacggcaggtatcaggaaggcggcaaacccgttggtggggttgaagatggctatgtcctcatactcgatggggtaggctgttatttcatcctggcgggtggtagtattgccggcacgttccattttaatatccgcattcatggcgagcgacacgttggtgttggcagtgagcaatgccttgtaatagagcagtccgctcatgtcgcagaagatgctgacttgcgtctgcttgccccggactatgtcatcgctgaagccggagggtatgtagatgatgccgtatgccttgcgctctttcagcatgagtctggcttcttccatatcagcgcaatgcgccacgatgcttgtttcgggactggcatccactttcctcagatattcccggctcagggaactgcgcgagttgtccaccaccacggcgggcacttcacggactgtttcgttggtatagatgaacgagtatatcaaaggatatgtcaacggaacgagtacaaagaatatcagcacaccctggtcgcgaaagaggttgcgtaattcctgcttccatatatagaacaggtcgtatatgccttgtactactttctgtttgaaggtaatctgtttcatcagggtaggtatttatagtgtatcaatgcttctttcagcctgcgggccacaaggaaaggaagcatcatgaaaacaagcagtgccacatagttcatccacgagtaaatcatgggatagccgttcagggcctggtctgcgtagataaggaagtaatggcgcaggggaaacaggtttgccaggccttgcagtacgggatgcatcgccatggcgggaaatgacagtccgcacatggagaacgacagtacgccccatagggaagcaaagctgagtcccagacgcagggtgggcagagtacctatcatcagtatgcccatgccttgcgatgccagcaccaggcagagcgtggcgagcagcatcggcagtatcccgctgttgcaggggaaatgcaggaaaccgtacaggtatgtgttgtataagattcccataaggaagaatacggctgtatgtggcagcagctttccggcaagggatatccagatggaaccgttgcccgtgcgcaaccattcgcgggcggtacggtccttgatttccaccccgatggagtagacggttatcataaagataagcagcatcagtacgcccggagcaaaagtgttgcacaggtatacggagtagttcagccacggattgttcagcggatgggtgtcgatgacaatcggttgcaggaatgccattgcctgctcttccgttgcgcctttggcgtatagtgcggtgcgtgcggcggctcccgatgccagttcgctcatcatcttcatgtctttaaagagcagtgaaccggctatgagcaacgtattgttggtgtagaaggatactttaggctgccgttgtgcctgtgctttggcggctgttccttcggggatgtagtagaagccgtaaatttctcctttctgcatggcgatgcgtgcatcggaaatatcgggatagcgggctacgacggcggtttgctcaaaagcatccaggttgcgcaccaattggcgtgaagtggcggtcatgtcccggtccaccacgccgacgggcatgtcggtaggcaagccggaatccattagcgttgtgaagaatatatagcagaacagaggtgctatgaccatgcagaacaggtatagcgggcgcgaaacgagccgtcgcaactcgcgtttcatcacattcagcagggccgtgtatttgttgttcttcttctccattatcactctgtcaccttattgttttacaaccttatgcaatcttatcacttattcaatatcacgctcatacccggacgcaggccttctgccttctccagtggagatgccttgacttcaaatgtctttaagtcgaattgtccggttgttttggtagctttccaggcggcgtatgtgccgaggtctttcaggtagtatactttcagacggatgttcctgtcgagggcggggatgaaagcttcaaattcggttcccatgcccagtccctgcaataaatcctcgcgcacgttgaaagtgacccacatatcgtccataacggcaatgttcatgatgggggcgcctgtgcctaccagttcgcctgttttggggaatatttcggaaacctctccggctgtctgcgctatcaggcaggtttccctgatgtatgattccacttcggcaacagcgcctttcgcacgctctaccagggcggctgcggcagccttgtcctcgcgttccgcgccgttcttcgccatagtgtactgggcttgtgcggctttttcagtggcttgtgcggcatcgcgctgggcggtaacttcgtccagcttctgggcggacatcactccctggtcgtgcaggttctttacgcgtttgtacgatttttcggcaatggcaagtcctgcccgggctttttgccatatttcgtaggctgcctgtatctgttcctggcgggcgcctttcaaggctttttcgttttgggcttgtgcggcggcttcggcagcacgggcctgttccagttttgcctgcacatccggggcttcgagaatggcaagcgtatctcctgcctgcacgctctgtccctctttcacccggaactccaggatacgtcccggtactttgctcgatacgcgatactctgttacttcggcctgcccttgtatgatttccggccctttgcgcagcatgaagaaacctacgagggcaacgatggcgattactcccgtcagggtgaggaatgccagcaacatgttactgttttgtgattttgtatccattattgtaatttatgatttcagtttttaattctcgatattcagacttcccgttgctttcttcagatagatttccgtcagcttcacgtctatctgtgcatctatcttttccgattgggcggacaaccaggcggtgtgggcttccaatacattgcttgccgggataaccccttcctcgaatccgagagtggcatagcgcaggttctcatcagccttttccaggttcttctccgccatgataagtttcttggccgcttcgtttaccttgaaaaccgattggctgacctgcagttctatcttttctttggcatcgtccagttggtaccggctgatgcgtgcttcggacttggcggcttttaccttgtagatgccttctccccaatgccagacaggtatgctgaccatgacgcctacgttccacatgcccttgaacttgttttcgaagctgttgaatacggacggattggttgccatatagtttccgatgagcgctacggacggcaggaattccgaacgggtcacgttcactttctgcttatagatttgtgcggcgagttccaggctgcgcacttccggccgtgtggcatatacactattcatgtcgatgctgccgctgtcggccggggtggggagcaggtcgtcttcctgctcgtctgccagagtgacgggagtggaaaggtctaatccgcatagttggcatagcaacattctggaaaggcttaaaccgtcgtttacttttgtcagtgtcatttcggcttcgttcactttgacttttaccgacagtccgtccgctttggtcgccactccttcggcaatcatcttgtctatgtcgctttccagtttttgcaggagttcgagatagccttccgccagtttcttcttgttggcgagagacaccacttgccagtatgcctggtcggtgctcagaattacttcctgcattccgctgttgtgctgctggcgtgccagttcttcggcatatctggttattttgttgtaggcgcgtatcttaccgcccatatagagaggttgggtcagcgtcagcgctccggcatacatattgcgtgtgtcggtgcggaaagcatctacgagcgattgtcccaatccgttgagcggggtggcaatgtctatattgcccaatgattgcacaagtgccatgaattgcgggttctgtgccagttgcgggtattgggtcatcattccctggattccgttttgcagcgcgccgcttacctgcgttcctacactgccgagtgcacctttctgtgcatcgttcaataaggaaaactctttctggttgcgcatatatccgccggtagcggaaatcttgggcagatagtttgtaaatgcttcttttttacggtagtgcgccgcattgattttctcgcggcttatcagcagctccttattgttggctacggccagtgcacggcaactatccaggctcaggatgccctgcgcgctcgttggcagcatcaggcaggtcaagtagatgaaacagaagaactttttcattgtatctatacattgtaaatgttgtggaaatattgttttatgaagcaacaataattgcataaacaacgatgcgaatgtatagggtttcaatgatattacaaaataaattgcggattttttgatttaagggagggaagaaacagaaaacaatctttttcagacagaagaacaaaagaacaaattttagttttgacacacctcaaatttgttcttttgttcttctgtccgaattaatccgaatcatccgaatcaatccagattgaacgactgtgaaccgataagcgttccgtccgagaatatgtctacacggtagcttcctgcgtacaggaactcttcgacatcccaatacaccgttacgttctgttcctcgccgttatattctatatatttcttgatggaatataccagttcgcggttttcataggggaatgtattggaatcgcttttgctcaatacgccgttgtccggtttggtgatacggacgtagagggtgcgttcgcctgtttcggcagttatgttcttgacaattgtaaagttgattttcagcttgacgacgtcttttacctttttggctttcttgccccgcttgttggcggcaaagatgttgatgttcgttgcatcgagctgggcggcaagcgtcactttcttattcaggtttttcttttcttcggcaaggctgctgatttgttgcgaagcgacgttgtatttgcgggtaacgtcggctatcacctctttctgatgggtagtgaggcggctcagggagtctatctggttgatatagcctatcattactttacgcagggttgccagttctttcttcaatcggcgtatttcggtggcattggtactttttacggtacggagttcttccagcagacgctgcgttttcagttgttcctgctccagaaggacggaaagggagtcgttggatacggtgagcttcaattcatcgtactgcttggcgaagtcggtgtactggttttccaggtcttccttttccaggttgaattcctgcaccaactcgttgttggcgcgtttttctgaaatcagcaatacggtaacacctattaataatagtatcagaatgcttccgacaacaacctgaagcgtatttttcttgttggccattttgatagtgtttagtggttaatgattggtgattgacagacggatgcttcccgctataatcgtaaatcgccgcaaaaataatcattaatcaccaatcactgatcactaaccccaatcaaattcttcatttaactaaaattattacggaaatatttctttaatcaggaatgtcgttgtatttttgtagcaactttatagaacactaataaacaaaaactttagaaattatgtcaaaagtaaccgtagtaggtgcaggtaacgtaggtgctacatgcgctaatgtgttagcctttaatgaagtggctgacgaagtggtaatgctggatgttaaagaaggcgtttcagagggtaaagcaatggatatgatgcagactgctcaactgttgggcttcgataccactgttgtaggttgtaccaacgattatgagaagactgctaactccgatgttgtggtaatcacttccggtattccccgtaagccgggtatgacccgcgaagagttgattggtgtgaatgcaggcatcgttaagtcggttgcgcagaacattctgaaatattctcccaacgctatcctcgtggttatctccaacccgatggacactatgacttatttgtctttgaaatctctgggtatccccaagaaccgtatcatcggtatgggcggcgctttggacagctctcgtttcaaatacttcctgtctcaggctttgggttgcaatgccaacgaagtagaaggtatggttatcggcggtcacggtgatactaccatgattcctctggctcgtctggctacgtacaaaggccagccggtaagcacgctgttgagcgcggaaaaactggatgaagtagttgcttccactatggtaggcggcgctacgctgactaagttgctgggtacttctgcatggtatgctccgggtgcggcaggtgcttatgtggttgaatccatcatccacaaccagaagaagatgattccttgctcggtatatctggaaggtgaatacggagaatcggatatctgcatcggtgttcccgttatccttggcaagaacggtatcgaaaagattgttgaactggaactgaacgctgacgaaaaagctaaattcgctgccagcgccgctgccgttcacaagacaaatgctgctctgaaagaagtaggcgctctctaatcgggagacgacctggaatatataagtaaagcctcgcagacttttgccggaaagggaaagttgcggggcttttgcgtttttactatctttggacatatcctagtgggagttatctcacatctgctccccacatcatcttattccgcaacgtatcgaaaaagatgtgattgaatcgtttcactacctttatggaatagtccgcacgtgaaatagtgagccgcgtagtctccttgcacgattcgctccgtccgtcgacggctacgaggaagttgtggctacggctttccacatcgagcgtgatttcccagtcgtcgcagatgacaatgggacgtacattcaggctgtgaggggcaacgggggtgatggcgatggtcttgctgtgaggcacaatgaccgggccgcccacacttagcgaataggcggtggaaccggtaggggtggcaatgaccagtccgtcggcctgataagtggtgaggtgtgctccgttgatggcggtatggatgcttatcatggacgaactgtcgcgtttcagtacggctatttcattgagggcgtacggatattccatcagtttttcatcatcgcatttcaactgcaatacgctgcgttcctctactttatagtggttgttgtagatttcgtcaatcgtttcttccatttcttcgggcgatatgtcggccagaaagccgaggcgtcccgtattgatgcccagaataggaatgtttttcttgcctacacggctggcggctttcaaaaacgtgccgtcaccgccgatgctgataaccatatcggcgcggaagtcgtcaccgtcgaacaattcggcgggcggaatgttgaggtgtaggtcggaagtcaggaaattatagaactcgcggcagacacagagttgtgcctgatgctgagccagcaggcggaaaagattttcggcatgcgatgactttttcgcctggtaggtatttccgaatatggcaaatttcataattgttttctgtttttgtaagatgcaaaaatagtttttttctcagaatgctgccaacatattgctattatttgtacttttgccccaaactataagccgaattatgactagattaagtgtaaatattaataaagtagcgacattgcgtaacgcacgtggaggaaatgtgcctaatgttgtaaaagtggcgttggattgcgagagttttggagccgacggtataacggtgcatccgcgtcccgatgaaagacatatccgtaagagcgatgtttacgacctgcgtccgctgttgcgcacggagtttaatatagagggatatcccgcacccgaatttatcgacttggtgctgaaagtgaaaccgcatcaggtaacgttggttccggatagccccactcagttgacttccaactccggctgggacacgaaagccaatctggagtttctgaccgaagtgctggaagcgttcaataccgccggtatccgtacgtcggtattcgtgtctaccgatgcagagatgatagagtatgccgccaaagccggtgccgaccgggtggaactctataccgagccctatgctacggcattccctaaaaatccggaagctgcggtagctccttttgtggaagcagccagaacggcacgcagcctgggactgggactgaatgcaggccatgacctgagtctggaaaatctgaattatttctataaaaacataccctggctggatgaggtctctatcggtcatgcgctgattagcgatgctttgtatctgggattggaacgtaccattcaggaatataaaaactgtctccgctgatgaatcttatgttgttattggcccaagtggctccggcgttggccgattctgttgccggcgctaatccggtacttactcccattgccgctcccgatgaaatgaacctgtggagcatggctgtcaagggtggttggattatggtagtgctcggagtactctccgtagtgtgcttctatattctgttcgagcgcaattacgttatccgtaaggcgggcaaggaagaccctatgtttatggataagatcaaggattatattctgggtggtgagattaaggccgccattgcctattgccgcagtgtggatacgccttcggcacggatgatagagaaaggtatcagccggttgggacgcccggtgaatgatgtgcaggcagccatagagaatgtcggcaacatcgaagtggcgaaactggaaaaggggctgaccatcatggctaccatttcgggcggcgctccgatgattggtttcctgggtacggtgaccggtatggtgcgtgctttctttgaaatggcgaatgccggtaacaatatcgacatcaccctgctttccggcggtatatacgaggccatgattactacggtaggcggtctgattgtgggcatcatcgccatgttcgcctacaattacctggtgacgctggtggacggtgtggtaaataaaatggaagccaagacaatggctttcatggatttgctgaacgagcctgccaaataaatcataattcataaatcagaaacaacgaccgtgttacaacgtagagcaaaaatatcacccaatttcagtatggcgtccatgacggatgttatattcctgctgttgattttctttatgattacttctacggtagtatcaccgaatgcaatcaaggtattgcttccgcagggaaaacagcagacatctgccaagccgctgacaagggttatcattgataaggacttgaactactacgccgctttcggtaatgataaggaacaggcgctggctttggacgagctgactccttttctgcaatcgtgcgcagcgaaagagcccgaaatgtatgtggcattgtatgccgatgagtccgtcccctatcgggaaattgtgaaggtgctgaatatcgctaatgagaatcatttcaagatggtgctggctacacgcccgcctgagaataagtaaacggtgttaaccgtaaatagctaaatcgtaaatcggaacggtgaatcggaagaagaaaggaaaatatataggattggcaggtgcgctgttggtgcacgttgttgtcattgcccttttgatactggtgggatttaccttgcccgaacagtcggaggaaggcggtgtacccgtgatgatgggagaaacgcccgatgcgtggggggctgccgacccttctttggttgaagtggagacgatgccggaagaggccgctccggaaatgccggaagaggcggagcaggagatgctgacgcaggaagatgaagaaaccgttgccataaagcctaaggcggaagaaaagaagaaagaggtgaagaaacccgaaaagagcgctgccgagaaagccgaagaggcgcgtaagctggctgcggaaaaagcggagcgtgaacggaaggcagccgaagaagctgcccgcaaacgtgtagcgggagctttcggcaaaggtgcgcaaatgggcagcaagggtgctacggaaggaaccggtgtgcagggaagtcctacgggaaactcttcggaaggggcaactgccgggaccggcggatacgggacctttaaccttggcggacgctccataggcgagggcggattgccgcgtcccgtatataatgtgcaggatgagggaaaagtggtggttaccattaccgtaaatccagccgggcaggttatcggcaccagcatcaaccgccagacgaataccgtaaaccccgccttgcggaaagctgccgaagacgcggcgaagaaagcgaggttcaatacggtaagcggattgagtaaccagacaggaacgattacatattattttaatctaaaataagaggagaaactattatgggtacagtttatgtgttttttgcagacggttttgaagaaatagaggctttcacttcggtcgatgtaatgagacgtgcggggttgaatgtggaaatgattacggttactcctgacgagattgtgaagggcgctcatggcgtaccggtgctttgtgacaagaatatcgtgaactgtgactttttcgacgctgatttgatattgcttccgggcggtatgccgggtgcggccactttggagaagtgcgatgacttacgcagactgattttacgctttgccgaagaaaacaaaccgattgcagccatttgcgccgctcctatggtgctcggtaaactgggactgttgaaaggtaagaaagctacttgctatccgggttttgaacaatatctggagggtgccgactgcactggagcgatggtggaaaaagacggcaatgtcattacaggaaaaggtccgggcgctgccatggagtttgctttggcggtagtggaattgctgcagggcaaggataaagttgccgaattgaaagaggcgatgattgtctgattgtaaattatgaagaggctgtgtgaatccaatgaagtatgttctgattgtagccggcggtaaaggtttgcgcatgggatgcgaacttcccaaacaatttcttccgatagggggaaagcctgtattgatgcgtaccatagaggccttttatgcgtatagcccggagatacggataatattggtgcttccatgcaaccagcaggcttactggaatgagttgtgccggaaacatggtttttcaatccctcatcaaatcgcagacggcggagaaacacgcttccattcggtgaagaacggactggcatttgttacaacaccgggattggtcggagtgcatgacggggtacgcccttttgtggctcaggaggttatagcccgttgttactccctggctgccgggaagcaggcggtgattcctgtgacggatgtggtggagacggtgcgtcatttggttggcgaaggaagtgaaactgtcagccgcgacgcatacaagctggtacagactccgcaggtgtttgatgcggatttgctgaaacaggcttatgagcagccttatacttcgcattttacggatgatgcctcggtggtcgaggcattgggcaagcccgtttatctgacggaaggtaaccgggaaaacataaagataaccactccctttgatttgaaaatagctgccgcccttttggactcatgttcgatttaactacgcgtgacataaaatatctgtcgggcgtcgggccgcagcgtgcttcggtgctcaataaggaattgggcatcttttccttccatgatttattgtattattttccttataaatacgtagaccgcagccgcatctatcgcatccgtgaaatagacggtgcgatgccttatatccagttgaaaggtgaaatcttaggctttgaaacggcgggtgaaggacggcaacggcggctgatagctcacttttcggacggtacggggatagtcgacctgatttggtttcaaggcatcaaatatctgataggaaagtacaaggttcatcaggaatatatcgtattcggcaaacctacggtgtttaacggcaggataaacattgcgcatccggacatagacccggcttccgaactgaagctctctgccatggggttgcagccctattacaatacgacggagaagatgaagcgaagctcgctcaattcgcacgccatcgagaagatgatgaaaagcctcgtcgggcagttgaacgaacctctgcccgaaacgctttctcccgccctgctggcagagcaccatctgatgccgctgacggatgctttgatgaatatccattttccgtccggtccggatgtgctgcgaaaagcggagtaccgcctgaaattcgaggaactgttctatgtccagttgaacatactgcgttatgccaaagacaggcagcgcaaataccgggggtatgtttttgagaaagtgggggatatattcaacggcttttattcccgcaatcttccttttgagttgacgaacgctcagaaacgcgtgttgaaggagatacgccgggacttgggtgcgggcaggcagatgaaccgtcttttgcagggagatgtggggagcggaaagacattggtggcgttgatgagtatgctgattgcgcttgataacggttatcaggcatgtatgatggcgcctaccgaaatattggcaaaccaacattacgaaacgattcgtgaactattgtacggaatggatgtacgggttgaactgttgaccggttcaatcaaaggcaaacggagagaagccattctttccggcctgctgacaggagatgtacagatacttatcggtacgcacgccgtcattgaagataccgtgaactttgcatcattgggactggttgtcatcgacgaacagcaccgtttcggcgtggcccagcgtgcccgtttgtggacaaaaagcgtacagccgcctcatattttggtcatgaccgcgactcccataccgcggactctggcaatgacgctttatggcgatctggatgtatcggtcattgatgagcttccgccgggaagaaagccgattgctaccattcatcagttcgacagccatcgcgtaagcctgtatcgttccgtgcgcaaacagattgacgaaggacgtcaggtctatatcgtttatcccttaatcaaggagagcgaaaagattgacctcaagaacctggaagaaggctatctgcatatctgtgaggagtttcccgattgtagggtttgcaaggtgcacgggaaaatgaaacctgccgaaaaggatgcgcaaatgcagttgttcgtttccggcgaggcgcagataatggttgccaccacggttattgaagtcggtgtgaatgtacctaacgcttccgtgatgataatagagaatgccgaacgtttcggactttcccagcttcatcagctccgtggtcgtgtagggcgcggagccgaccagtcttattgtattctggtgaccggttataaattggcggaagatacccggaaacgtctggagattatggtacgcacgaacgatggtttcgagatagccgaagcagatttgaaacttcgcgggccgggtgatttggaaggaacccagcaaagcggcattgctttcgatttgaaaatagcggatatagcccgcgacggacaacttctgcaatatgtccgtgaagtagcccagaccattgtcgataaggacccgaatggttcccttcctgaaaatgaaatattgtggcgacagttgaaagccttgcgaaagacaaacgttaattgggcggccataagctgaaaaacggttaagcatacgctttatttgtacgtttatgttgttaaacatgtttgtgatgtaattagcttgttgttagttatttattagctattattcgtggcttttacttttgtgacttcaaaaaatagttaacgacacaaacgccttttcagagagaaatgttacctttggaagaatttttgaaaataatctggatattcgcgtaaaacagggtgcggttgattcaccggatatgctctgcggatatcgaaatgaatgacgaaacggaatgaattttaattggattagaacggctttattagcagcaacggcaatggtcagcctgaactctttctcgcaggacctgattgcccgccaagctcccattgacagaaaacttaaaagcgtagattcattggctttgcagaaacaaatccgtgcggaacagtctttgtatccggggttggatttgtatccgagttggaacaatgaatttgtgcaggcttatggcaatgctatcgtgccggaaagttatacttttgatttgaaaggcttttgcatgcctaccgaacatactcgtatcactgacgtattcggctatcgccctcgcagaagaagagcgcattacggtttggatattaaagtgtatgtaggcgatacaatccgtgccgcgtttgacggtaaggtacgtatcgttaagaatcagggccgtcgcggatatggtaaatatgtcgttatccgtcatgataacggtttggaaacggtctatgggcatttgtccaagcaattggttgatataaaccagttggtaaaggccggtgaacctattgcactgggcggtaataccggacgttctaccggctctcacctgcactttgaaacccgtttcctgggaattcctattaaccctgcattgatgttcgattttgaaaagcaggatattgttgccgattcttatacgttccgtaagaccaaaggcacttccggtacggctcgcagtatggcatcgggtgaaggtctgttctataaggtgaagaaaggcgataccttatccaagattgcatcccgtcagggtacaagcatcgacaagctttgtaagctgaaccgcattacccggagaacgattctccgcccgggacaggtattgcgttgctcataaaaacggaaatactctctaaacgtaaacaatctctataggagagggcactttaatataatttagagtgccctcttttcttttctctttaattattcctaaatttgcagcctatttgtaaggatatgaaagataccaagcaacaatttgagcatgtcatcgccatttgccgtgacctgttctccaagaaacttcatgattacggtcctgcatggcgcattcttcgtccggcttccgtaaccgaccagatattcattaaggccaatcgtattcggagcattgagactaaaggcgtgactttggtggacgaaggtatccgttcggagttcattgcgattgtcaactacggtattatcggtttgatacaactggagttgggatatgccgaatctgcggatatgacgaacgaagaggcaatggttctgtatgataaatatgcgaaagagtcgctggaattgatgcttgccaagaaccacgattacgatgaggcttggcgcagtatgcgtatcagttcgtatacggacttgatattgatgaagatataccgtacaaagcaaattgaaagtctgtccggccagacactggtttcggaaggtgtcgatgccaactatatggacatgattaattattccgtatttggtttgattaagatagagtttggagactgagaaaaaacatattataaagttcgtctgggtaaatacctgccgctttttgctggcaacgttgtttatcttctccggatttgtgaaggctgtcgatccgctcggttcattttataagattcaggattatctggcggcattcggcataatttcatggtttcctacatacctgccgttactttttgccatcattctgtcatctgcagagttctgtgtaggagttttcctctttttcggtgtacgccggaagattgcgtcgaccttggcgcttctcctgatgagcgtaatgactccgttgaccttgtatcttgctttggcaaatcccgtatccgattgcggatgctttggcgatgcctgggtgttgacgaactggcagacattcgggaagaacatcgtattgctgattgcggcgatagcggtattccgggagcggaaactcatgttccgcttcgttacgctgaagatagaatggatggtgtccttatacacgcttttgtttgtctttgcactttctttttattgcttggaatatctgccggtactggatttccgcccttataagatcggagcggatataaaggcgggcatggagattcccgaaggtgcgaaaccaagtgtattcgagagccgctttgtattggagaaagacggcaggcaacaggagtttacattggataattatccggacagcacatggacttttgtcgaaacgcgtaccgttttgaaagaaaaaggctatgaaccacccattcatgatttctccatgataagcctgggcacgggtgaagatataaccgacagtgtactgaccgacaaaggatatacctttttattggtagcccaccggatagaggaagcggacgatagcaatatcgaccttatcaatgaaatctatgattacagtgtggagcacggctacggtttttatgcgctgacttcctcgccggatgaagaaattgagatgtggcgtgaaagaaccggtgcggaatacccgttctgccagatggatgatattaccctgaaaacgattatccgttccaatcccggcctgctgctgataaaagacggtacaatcctgaataaatggagcgataaccaacttcccgatgaatatgtactgaacgatagtctggataaattagagttgggaaagcagaaacaggaaaataaattgcacaccattggttacgtattattgtggtttatcgtacctttgacgctggttgtcggcattgatattctgataatcaagcggagagaaagaaaaagcagggagcggcaagccgcccaatcctcggataatcgggagaatgacaaattgtaaatctttgaatagcagatatattaacccttttaataattaaaacaaaatgagaaaaaacattgttgcaggaaactggaaaatgaacaaaacccttcaggagggtattgctcttgcaaaagaactgaatgaagcgttggctaacgaaaagcctaattgtgatgtaatcatctgtactccgtttattcacctggcatctgttactccgctggtagatgctgccaaaatcggtgtaggtgcagaaaactgtgcagataaggaatctggtgcatatacaggtgaggtatcagccgctatggttgcttctaccggtgccaagtatgtaatcctcggtcactcggaacgtcgtgcttactacggtgaaacagtggaaatcctggaagaaaaagtaaaattggctttggccaacggtctgactccgattttctgtatcggtgaagtgttggaagaacgtgaagctaacaagcagaatgaagtggttgccgctcagttggcatctgtattctctctgtctgccgaagatttctccaagattatcctggcttacgaaccggtttgggccatcggtacaggtaagactgctactccggcacaggcacaggaaatccatgctttcatccgttctgccgttgccgagaagtatggcaaggaaattgctgaaaactgctctatcctttacggtggtagctgcaagccttccaatgcaaaggaactgtttgcaaatcctgatgtagacggtggtctgattggtggtgctgctttgaaggttgctgacttcaagggtatcatcgacgcttttaattaataacagagagccggaagttgcccgtatccaaaggaaggccaacttccgactcttcatgtttaaagcttgtttttaaaactgtataaaacactcttttatgaagaaactcggtttgcttttaattgcatgttttgcctttgccgctatatctgtggcgcagaataacatcgtaaagagtctggaacgtaatgtgccggggcagggtaaagtgtccattcatcaggatgcccgtatcggggcactgataggttcggagtatatccctaccggttcggacgaccggaaagtgattaaaagttcgggctatcgcgtacaggtatatgccggaaataacacccgtcaggccaagaatgaagcctattcggtggcttccaatataaaagagcgttttcctgaccttcccgtttatacatctttcaacccgccccgctggttgtgccgtgcaggcgacttccgcagcatcgaggaagcggatgccatgatgcgccaactgcgtgccaccggtgctttcaaggaagtgtctatcgtgaaagatcagataaatatccccctttaattcataactcataattatccccctcactttctcatgttaggaaaagaagaaattgtatctccttcattggacgaactgaaagaacattatcatcatatattgactttgttaggtgaagaccctgagcgtgaagggttgctgaaaacaccggaacgggtagccaaagccatgctggcactgactaaggggtactctatggacccgcacgaagtactccgctctgccaagttcaaggaagattataatcagatggtgattgtgaaagacattgatttcttttctctctgtgaacaccatatgctgcctttctacggcaaggcgcacgtggcttatattccgaacggctacattacaggtttgagcaagattgcccgtgtggtggatatcttctctcatcgcttgcaagtacaggaacgtatgacgctccaaataaaggagtgtattcaggaaacgttgaatcctttgggcgtgatggtcgtggtagaggcgaaacacatgtgcatgcagatgcgtggcgtggagaagcagaattcaataaccaccacttccgactttacgggggctttcaatcaggccaagacgcgtgaagagtttatgaacctcatccgccacacttcttaatgtcaggggagcaccacccggtctcccaaccgttttgccataatactctgcacttcgcgcatttcgctgtagcgtttcatgatggcgttgcatttctcttcgtcgttggcgatggcagggtcttgcagggcagacatcatgtgctttagctcttcgctgacaatggcatacttgaagtttatcattaatgccggaaccagttcgtaaagacgttcttcatcggttactatcttctggctttttgaatggtatttgctcagctggtaacggttgctgataagttccacgctcagtttgctgatggcagggtccggataagccagaaaataacgttcggctgtaaatccggcgtcatggatatgcgcggcggcttcggtcagtatttggcggtgcagcgggttgtggaatgacaactcgtcttgcttcaggtcgctgacgacatattcaattacgctcaccggtatttcctgcccttcttcattggttacattgcacatcactttttcgccatagcgcacaatcatttgaagaatcagccgttcgtatttatagaattcctgcccttcttttccttcttgcggaataaaggatatatagctgtcttccggcgggaacggtgcattcgcattgtgcccgggagcttctccggcggcagttggggttgcgtctgccgttgtcggggcagcgggagtcgaactttcggcgcctgttacattctgtgtgctttctgcctgtctgccggcgtttctacgttcccgttctgcctgttcggcacgcttttcagcctgcatctcacgccgtttggcaacttcggaaaccaacagtttgtcttccacccgcagtagctgggcgcattctttgatgtacacatcgcgcacaatcgcttcggggatgaccgagatgctttgtacaagattaccgattagttcggcacgtttaatcgggtctttgcctgcatcttccagcagcaggttggttttgaaacgtataaagtctgtttcatgctcctgtatgaattgctgaaactcggtcgagttatgtttgcgggcaaaagagtccgggtcgtctccgtcgggcaggaggcacactttaatgttcatgccttcttccagcagcatgtcgataccccggatagaagccttgataccggctgcatccccgtcgtacaatacggtcatgttgttggtgaagcggtgaatcagacggatttgccccggtgtcagcgcagtgcccgaagaggccaccacattttctataccggactggtgcatggatatgacgtccgtatagccttccaccaggaagcaacggtcttgcttcacaatagcctgcttggcgaaatagataccgtacagttcgttgcttttatgatagattgccgattcgggagagttgacatacttcaccttgactccttttgtggcactggcaagtacacggccgccgaaagccaccactttacccgataaggtatgtacgggaaagattacgcgtccccaaaaacggtcgcgcagttggtggtcgtccgtttcgtagcagagtccggtcttgacgagaaattctttcttatatcctttcttcaaggcttcttccgccatggcattatggctttcggtacagtatcccaactggaatttttcgatgatgtcatcccggaatccgcggttacggaaataagccataccgatgctgcgtccgtctacatggttatgcaggatattctggaaatagtcgcgggcaaactgattgacgatgaaaaggctttcgcgttcgctctgaacgagcttttcttcattggacagctcccgttccttgacctcgatgccgtatttcttggcaaggtatttcagtgcctcaggataggacatctgttcgtgctccataatgaagtgcactacattgccgcccttgccgcaggcaaagcatttgcacagtcccttggctggcgatacgtagaacgacggggtcttatcgtcgtggaacgggcacagacctacatagttcactccgcgtttccgcagcgtgacgaagtctgacacgacatcaacgatttgtgccgcatccagaattctgtctatggtgggttggtctatcatgattcgagcacaaagttacacataaaatcagcctctgcaaaaaaaaatagaggttagtgattagcgattaggggttagtgattagcgattagcaggctgcgctattatgccgcatggtactaatcactaacccctaatcactaattacttaattttttctctgatcttcgtcagatacttcttcattccttccgcatccttgttggtgataatctccagtagttgtttcagttccagacgtatattctctacttgtgagggggtgcggggattgaacagaatctcctgcaacagataatcgtcctcgctcaacaggcctttggcaatggccatgtgtttcttgaatgtagttcccggagcttcctgatgcttcatgactgctgcaaacacgaaagtcgaaacaaacggaatggacaaggagtaggccaccgtttcatcatgctcgtcgaaggtgtactcaaagatattgagcttcatggtctggtataaatctttaaagaagattttgcccaaatggtcaccctcgctgatgatgatggcgttttctgtattcaagttgctcagactggcaaaagtagggccgaacataggatgtgtcgacacataacggaaaccgctttcttcgtagaattttttcagtccggtctttaccgaggcgatgtcgctgatgatgcagtctttgggaagcacaggcaacacctgccggaaagcttccagagtatattttaccgtagcggcattgatcaccagttccggttcaaattccttgatttcttccagcgtggtgaaacggtaggtgttatagacgaaacgcagttggtgcggattgacgtcgaacacggccgtctcgtgttgaaaacttaaaatatctgtgaagaaggagcccattttgccggctccgagtattaatattcgcataattttctgactgttataaaaaccgaaggtatgtcaaaactacaatccacttactatttgcttctaccctcaatctacgaaattatcacttattgattatttccatttgttgtctcacactctcctcgtgtatcgcttcaaacactttcttgataaactcggaatccatgccgcagagcgaaccctgcgagccgcgtttttcgagaatctcgttatagcgtcccgtttgtagaatcgtcatatcgtgttcctttttgtaggtgccgatttcacgggctatacgcatccttttggccagttcctggataaggttattgtcgcattcgtcaatctgcttgcgcaattcgctgaggttttcggtgctttgtgtctccttgcggataacgagcaggttgagaatgtagtccaatacatccggcgtaacctgttgggcggcatcgctccatgcgcagtccgggttgcaatggctttccacaatcagaccattgaagcccaggtccatagcctgctggcaaagcggggcaaccaactcgcgttttccgccgatatgactggggtcgcagatgatgggcaggtttggaatgcggcgacgcagttcgatgggaatatgccattgcggcaggttgcggtagagcttcttgtcgtagctgctgaaaccgcggtgaatggctcccaggcgtttcaatccggcattattgatgcgctccatggcacctatccataattccagatccggatttacggggttctttaccaagaccgggatatccacgcctttcagggcatctgctatttcctgtacggcaaaaggattggcggtagtgcgggcacccacccagagtatatctattccggctttcaggcattcgtatacatgcttggctgtggccacttcggtggatacatacatgcctgtttctttcttcacctctttaagccaggcaagcccttctacgcctacaccctcgaaaccgcccggtttggtacggggtttccagatgcctgcgcggaatatcttcatacctttggcagccaattgcttggcggtgtccataacttgttcttccgtctctgcactgcatggaccggcaataaccagaggacgcttctcctcgatacccggcaacaagattgattctaattcaagttccatattctttatttgtttaattatattcggttgtataaatatttctaaaccgttactctcgcttctgcatccctttcctatagcgggttttcaggctattaataaattcgagtagaattttactataatttttcaagaattatagtaaaatcttgaagagatttattaagcggatgaatcggttttattaataagctgtttttctgtaatgatttatctcattcctttgatgcgtttcaacgcttccgccagtttgtcgtccttgcagcaaagcgagatgcggatatatctctttccgttgctgccgaagatgaatcccggagtgatgaatacgtgcgcttcgtgcaatacccgttcggtcagtttctctacatcggcgcaactgtcgggtatctttccccaaaggaacatgcctacctggttctcgtcgtaagtacatcccagctcacgcataatctctcctgccagttggcggcggttgcggtagttcttgttattgccttcgtaccattcctcaccggcttccagggcattggctgcggcaagttgcatggcacggaacataccgctgtctatgttgctcttcactttcagtatccattgtacaaagtctgcattagaggcgagcataccgatacgccagcccggcatgttgtggctcttgctcatggagttgaattcgatgcagcactctttcgcacccggaatgctgagaatactgatagggtgttcgttcagaataaagctgtacgggttgtcgttgacgatgacaatgtccttgcggcgtgcaaagtccaccagttttcggtacagttccggtgtggcgttcgctcctgtcggcatattggggtagttggtccacatcagttttacgcggctcatatccatcttctccagctcgtcgaagtcgggcatccagccgttctcctctttcaggttatagtttacgacctctgcacccagtatcctgctcaatgaagtataggtgggatagccgggattgggaaccaacacctgttcgcccgggttgacgaaagccagcgtaacgtgcaggataccttccttggagccgatgagcggctgtatttctgtattcgggtccagctctacgccataccattttttataccagccggcaaagctgcggcgcagttcgggaatacccacatagggctggtagccatgtccgtcggggttgcgggccgcatcgcaaagcgtctgtatggtactctccgaaggaggcatgtcgggactgccgatgcccaggctgattacatccttgccttcggcgttcatctgtgccacttctttcagctttttagagaaatagtattcgcttacgcttgccagccggtcggccggctttattttagatagttgattttccgtcttcatattctcccaatattttaagttctttggtcagtggggtgatagccacgatagattgtttatacttcagcacattgtcgaaaactacgtctacatagaattgatattcccattcgcgcccgatgatgggcagtgactgtatctttgtcaggttgatgcggtagaaagacaggatggacaatacttgcgaaaggcttccctcggtatgcggcaacgtgaataccatgcttgccttgttcacttccttgttgcggtggcggctcagctcgtccacttgccaggggtctgccacaaccagaaagcgggtgaagttgtgtttgttggtttcgataccttcctgcaacaccttcatgccgtaacgttcggcggcggctttggaacaaatggcggcatgtcctctcaggttttctttcctgatgatttccgcactgagagcggtgtcctcgccttccactaccttgatgcggggatgctgtccgaggaactcacggcactgcatcagggcgatggggtgggagtttacttccgtgatgtcgtcccaatcctcgtcgggcaggcaaacaaagctatgcgagatgcgcaatttgtattcgcctacaatctgtgtgccgctttggcgcaggagttcattgttgtgcagcaagcttcctgcaatcgtattttctattgccagcatgcctatggtctgactgtcctgtttgacagcagcaaatacgtcctcgaagctggcgcagcagataagctgtatttcttctccttcgaagtacttgtgtgcggcaatgtcgtgatacgaacctaatgttccttgaatggctaccttcttcattcctgactctctttttcttgatttatgctacaaaaaaatcccgcttccatacactggagcgggactttatatattacttagttctctattctgttcttaagcatcactgtcacttgatacatacaaactcccgctctactttccggctaaagtaaaagtaaaaaaagaagtaatatgcataagtaaatgatttcattcttgcttttcgttttgaattatgtggcaaatgtaacacttttcttttagatgcaaataaaaaccaatgttttttttgataattgcatcattttatagataatgttttataatcctaatacatttgtcgtattgttgcccggcagattgccgtattgtccgttgaaatcctgcaactctttcgggttaagctccaatccgcgtttcatgtcttccatggagccttccttgtcgccgttcagcagtttggcgcggccgcgttcgtggtatgcttgggcaaagtcgggattcagctcgatagcttcatcaaacaaagcgatggcttcggtcagctttttctggacgatgtacaactgtcccaagtagaggaatgcctgttcgttgaacggattcagttccgttatatgaagatagtcggcttccgcttcggcttctgcaccggtcgcttcctttatctttccacggagcagtatggcgttttcatcgtccgggtcttgggcgagtatggcgtcgatgtcttccatagcctctttgtactgctgcatcttcgtcagagcctcggcacgcagcagacgggcttcggtgaagtcgtccttgagtacgatggcttttgtgaggtgggcgatgcacatgatgccgtcgttctggccgttgtcggcttttcccagcagatagtgcgccatggcattgccttcttcaacggcaatggcttttttggcggcttccgccatggcggcatagtcctcctgcatgtagcagacgttggcaagggtgagtaaagtagaggtatgctccggttctgttcggatcattctttccaaaagcttgcgggcttcatccagttcgttggactggatgtatacttgtgccaggtagcccattgtctcgaaatcttcttgcaacgcaagggcttcggtgaaacatttgatggcatagtcggcacgtcccatacgttgggcacgcataccgtcgtacttgaatatctcgaagttcttctgattgtttttctgtttttcctcttccggatttgccggcttgccggagaagaacgatttaaagaatcccatgattatgatgttgttttagttatgtttttaataggttgactggattggtgtgctgatgcactgtacaaaagtaatgatttattttctgatttgcagtattccgtcgacggcaataatttttccttcgtccgataaccggtgcaatatttcggtcagaagctctttgtccattggaagttgtttgagcaggccggcgggagtcagggattcacgggacaatatcccgcatacttttgtacaaagcgcttcccggtccggttgttcagaaacttttgatttgctgcgcaggctgatacaggtgtcgcattgtccgcagttatgttcgtttctctccccgaagtagtccagtagcatacggctgcggcatacagtgtcgttggtcacgtaatcgagcatggcattgatgcgcgtttcatagcgtgctttccggtgttcgtatacttccggggagatatggatgcgctgtgcttccacgcgttcgcgcgtgtatattatataaggtgtctttttatggggaatatagcttacgatgcgcagtttggcaaggtgaaccagcatttcgtagatttgccggcgggtaagtcctgtgcgtatggcaagcgaatcttcgttgatataggtatagtctgtgaatactccggtataggaacgaagcacggcttgtatgagcctgtccatgtcttcgcccatttcgcgcagccggtagagttcatccctgcgtatggtgaagaggatgcgtgaggtgctgtcctgttcggcagtgtactccagatagcccgcctgggtcaggattcgcaaagcgctgtccaccggtacggggaagtacttgaatttgcggcagaaatcttcgatgttgaattcgcgtacgcaatccagcccgtcacccattgccatttgataatagtattggagatgttcgtaaacgtctctgatatattctttctccggaaaggtgtcggggatgcgtttgtgcagtgtagtcttgtccgacttggcatataggatgacggcatacgccttctgtccgtcacgtccggctcttccggcttcctggaagtaggcttctatggagtcgggcaggtccatgtggataacgatgcgcacgtccggtttgtctatgcccatgccgaaagcattggttgccaccatgacacggctctcgccggattgccagcggtgctggcggatgtctttggtggcatcgtccagtccggcatggtagaaatcggctgtgatgtgctcgttgttcagcagttcggtaatttccttggtgcggcggcggttgcgtacgtatacaatggcactgccgggcatgctgcgcagtatatgcaacagttcggcagtcttgttctctgttttgcgaacaatataagcaaggttgttccgctcgaagctcatgcggaatacattcttgtgacggaaatgcaaacgggcttggatatcctttaccacttcgggggttgcagtggcggtcagtgccagaacggggacatccggcagcagttcgcgtatctctgcgattttcagataggcgggacggaagtcatacccccattgcgagatgcagtggctttcgtctaccgtaatcatgctgatgtgcattttccgcaatttggtgcggaatatttccgtatccagacgttcgggggagatatagaggaacttatagttgccgaatatacagttttcaagggtgatgatgatgtcctgccggctcatgccggagtagatggcaagtgccttgataccccgcttcttcaaattctgtacctggtctttcatcagggctatcaggggggtaatcaccaggcacattccttctttggcaagtgccgggacttggaaagtaatggacttgccgccacccgtaggcatcagtcccaaggtatccttattcttgctgatgctgtcgatgatatcttcctggataccccgaaaacggtcatatccccaatactgctttaggattcgggagttgagagttgaaagttgggaggcgtcgggctgcgaggacatggttgtaaagttgaaagataaaaagagtgtgtgatactatatataatgatggtatttcaggtacggattacacggactttgtagactaaaaaaacagtaaaatccgtgtaatccgtgcctaaaggaaaaacacaaagagaatcttctcccgtcttcttcggcttaattcggctttatatcttcaatttgcaattgtacttctccccgtttgtgagtgttttcctcaatggtgtaacagatgtcgaacgaacgcttggtcttgatgtagcgcacgtgagaactctgcccgaaagcaattccgttcattacattgtttgatttgttgtccaccagttccagcttgatatgctcctggtcgcgtcctacgactttactggttccgtaatcgtacacattgtgggtacagaatacgggcttggtattgtcgggaccgaaggggttgaacttcttcaaatcattgcagaatttgggagtgatatcccggaagtcgatttcggcattgatgtcgattacggcgctggtctgttccggcagaatatgccgggatacgaattcttcgaaacgttcggtgaaagcgggtacattttccactttcatggacagaccggcagcataggtgtgtccgccgaagttttccaataaatcccggcagtactcgatggctttgtatacatcgaaaccggaaacggaacgtgccgatccggttgccatatcatccgtgcgtgtcaatactacggcggggcggtaatatacttccgtcaggcgggaagcgacgattccgattactcctttatgccaatcctcgttgtacaacacgatggagcggcggtctgcgagtccttccaggccggctacgatttgattggcctcttcggtcatggtcttgtcgaggtctttgcgggtttcgttatactggttgatttgtccggccttttccagagcaaccgagaagtccttttccgtcagcagatctaccgcttccttgccgttctggatacgtccggaggcgttgatacgcggacctatcttgaatactatatcgctgacggtgatttctttttccgacagtccgcatacgtcgataatggctttcagtcctacgctcggattactgttgagctgtttcaaaccgtgataggcaagtatgcggttctctcccataatcggtacgatgtccgaagcgatgctgactgctaccaagtccagcagcggaatcagatgatgaaattcgatgccgttgctgatagcgaatgcctgcatgaatttaaaacctactccgcagcccgaaagatgttcgtaaggataggtgttgtcttcgcgcttggcgttcagtatagctacggcagggggcaacacttcatcgggtacgtggtggtcgcagatgatgaagtcgatgcctttttccttggcgtatgcaatttcatctacggccttgatgccgcagtccagcacgataatcagtcccacaccggtttcggaggcatagtccacaccttgtgtcgaaacgccatatccctcgttgtaacggtcgggtatgtaataatctatgttcgaatagaactgttgaataaacttatagaccagggccacggcggtggttccgtctacatcgtaatctccataaatcagaatgcgctctttctttcccattgccttgttcaggcgttctacggccacgtccatatctttcatgaggaacgggtcgtacaaatccggtagttgcgggcggaaaaacttcttggcagctgtcgctgtcgttattccccgctccaccagcaatctcccaagtacagggctaatccctaattcctgggccagtcgttggcttgcttctgcctgatcggatgtaatgggtaaataattccatttgtgagtcattttatatattattttttctttttctatcgccaagtgccggagaataaggggaacttagtgttatccgattgctgtgcgctatttctccaacaagctgtaaaggtatgaaaaactcttgaaaccgatgtgaattctatggaaaatattcttaatgatgcgctttctctcctgaaatccttttatttttgtggcgtctaagagttcgtttggactttcttcaaatataaggaatatgcctatgctcacttttatctcttgtgccaagaccatggcgtcgcactgttctttgaaagtgcccgaagttaccgttccgtattttgaagcggaagctgtacggaatgcgttggaaatgtcacaggtttctgccgcagaactggaaaaactcttgaaggtgaatgctaaaattgctgcggaaaacagggcacgttttcatgacttttgttcggaagacaatcgccctatgccggcaatcggtgcatatacgggagctgttttcaaacgcatcctgccaaaggattttacggctgatgacttccgttatgcacaggaacatctccgtatcacctcttttctttatggattgctccgtccgctggacggtatcagaccttatcgtctggagggagatgtgcgcctgccggagaaaggcggtatcaccatgtttgattattggaaacctctgctgacggactgtttcatagaagaaatcaagaaacggggcggtatactggtcaacttggcaagtggtgagatgaaggatttattcgactggaaacgggtggagtcagaggtgcgtgtggttactccagattttcaagtgtggaaaggcggaaagttaaagaccgttgtcatttatgcgaagatgtgcagaggggagatggtgcgtcacatcatcaaaaatcgcattggatgccccgaagatttgagaggtttttcgtgggaaggttttacttttgacgagggactcagtacggataatcatttgcagtttgtattggagtaaaaattagacggatattttaagaatatattcctacttaattatatatcgaaacagtttgcggcggtaaacagttagatgcattttctgtttacgcaaaaagaggatttatattcgcaaattgcggctgtaagtcatttggcgtttgtgtacttttgtaatatctaatatttgaaactatgaatataacatctgtacacatgttttctgttgtatttatgctgagctggttcctttgtgcaaaaccggctttcgcaggcagcaaaggcgattggatgaaacttctttctgatacattgcctgtatgcaaactttctatccctggtactcatgacagtggtgctatttatggtggttgtatgttgaaaactcaagatgcaggtattttctcgcaattagaattgggcattcgtgcttttgatattcgtttagctgagaaagacggaaagctgggagtgtttcatagtcatgcttttcagaatatgtattgggaaacggatgtattacctacttttataaaatttctgaaagaacatccttctgagatgttgattgtgtctttaaagagagagggcggaagttctgaggcttacgcttctttggtagaaacctccttgtcggctattgatgcaaagcctttctttgtttggaatttttgtcaggatttagcattgggtgattgtcgtggaaaaattctgtttttacaccgagatgtagccatgaacaaatatcccggaactgcttgtgagggttggaaggatgatgccacatgtttgatgacgcttcgaggcagtaatggtgcggaagcacaagtcttacttcaagatgaatatcagtatgcttcggatgaggaagttggattaaaaatagaagcttgtatgcgtaatttgcataatgtagcagcagaacctagttcttcatatcgatgggcgatttctttcgttagtgctactggacttccgctaggcacacctgaagtttttgctaaacaagtgaataagtttgtgtcagagtatctaaaacaaagaagaagccagatgtgtggtattgtttttatggattttgtacagcgtcctgaagggcttgagttgttagattgtctcataagaggaaataattagtttgcgtaaaaagaggattcaaatacgcaaattgtttactttgttgacttatgtgtatttatatttgcaatataaaaatatttagaatagagaaattatgaggttagccattgatttaggtggtactaatataaggatagcacaagtggcggaaggaaagtgtttgaaacggaattcggttgcttgtttggctacacaagatgttgatgtgatcttgacgcagctttttgaacttattgaacctatgataggtgagactgttgaggggattggtattggtgtaccgtcaatcgttgatacagttcatggtatagtgtatgatgcgatgaatattgcttcgtggaaagaagtgcatttaaaggagctgctggaggagaagtttggcttaccagtggctgtcaataatgattctaattgttttgctttgggagaaagtctttttggaagcgggcgactttatgaaaatatggtgggtattactatcggtaccggaatagggctgggaatcattattcatcatagtttgtacggagggggatatgccggtgcaggtgaattgggagcattaccctatttagaggctgattacgaatattattgtagtagcggattttttaaacgtaggaataccactggtgctgctgagtcggaaaaagcattgaaaggagataatgatgctctattgttgtggcaggagttcggtgggcatataggacaattggtaaaggctgtattatttgcttattctccacagttaatagtactaggaggtggaatagtaacagctttcccgctttttaaagaagcgatgtatgagactttaaaagattttccttatccacgagttgtggctgatgtgaaaatcgtgtcttcacaattacaggatgctggtctattaggagcttcagcacttttgggatagacaggtattaccattttctggaaaatagtaatatttttttttatttttaataatattgtaattctgtttttaaacctttgtgatggaattataaatttatattataaactttaaatttttaatgtatgaaacaagtaaatcttggattttatcgaatggttttgtttctattattgggattgtttacttctgtgattgcgtactcacagcaaatttcagtaaaaggaattgtgaaagaccaaattggagagcctgtaataggtgctaatgtactagtgagaggcactactaatggagtaattacaaacgttaatggtgagtttattctttccgcttctaaaagtgatgtattggttgttagctttgtgggttatactactcaagaaatacctgtaagtgagaagcaaatgacaattgtgttgaaagaagacacagaattgctggacgaggtagttgttttgggatatggtgccaatacacgtaagcaagacttgtcagcttctgtaggtataattagtaatacagatgagttggctgcacgacctgttacttctacggaaagtatgttacaagggcagttgcctggtgtaactattcaggctgatggtggtgatcctacttcaactcctaatatcgtgattcgcggtcagggttcgcagaacggcgataacgtattatgggtggtagacggtgttccgggggctcctattacttccatgaacgatattgaaagtattgttgtattgaaagatgctgcttctgccgctatttatggtgcgcagtcaggagcaggtggtgtagtgcttgttactaccaaaaaggcaaaagaaggtgctcctactttgacgtatgacggaactttcggctttcgtcaggctactaatttaattgaaccactcaatgcagaagaacaagtggaaatgcgtagaaggtcgtatgaaaatgcaggccaggcattacctgatggctggaatgtaacaaaaaatccgtgggtaggtactacacgtactgattggatggatgctattttccgtacagctttttatcagcgccacaatattgctttaaatgtaggtacagataagtcttccagccgcctctcattgtcttttgataacgatcagggtactttgattaatacttataagaaaaatcttgctttgcgttataatggtaagatgcaattgaacaagtggattacaatcagcgaagatttggtgtggaagaatacaacaagtcgttctaaagaaacggataatgatgcatacactggtcctatattatcagctgtatatatgccggctagtgctactatttataatcccttggatggctcttatggtggtacaacaacagaagaccctgcttacattgaaaagtatggctcaaactttgccgatgctcatggtgatgctgtgaaccctgtacgtttgcttgaggcagaaaatctctacaataagacaagtgatgtgtggagtactactagtttggaaataggtaatgtgttgcctggtttaaagtttgtaagtcgttttacttacaatttgcagaactattattataaaaaattcaatcctatccgtgacgaagttggtaaaccgaacctatcaaataatgttcaggagcaatcttatcgtatggacgcttggaagacagagaatacattaacgtatgataacacatttggtaaacataccgtaggtgctttgttctctactacggctgaccattattcgaaacgggggttggaagcgattggaaaggacttgtctagtgaagcagcctatctgcaatacatggcttatgccaattcaactgaagtgcttgattatttaacgggaccagatgcgaatgtttcaatgattgctcgtttggcatattcttatgacgaccgttatttcgtaaccgcttcatggcgccgtgactatgcaggacgcctgcctaaggaacataactttggcgattttcccgctgtaacattaggatggaaaatttctaatgagaagttttttaagaagaacgatatcgtaaaccttttgaaattacgtgcttcttggggacgtgtcggtaatttggggtctattgattataattataaatcaccactattatcgaaaaatacttattcagaacaagcacaatacggtgtaacttctaatcaattatggaataactttgcttattatagtactgctttaaatccaaatttgacatgggagacttctgaacagtacgacttgggcttagatatggaaatgttcaataaccgtctttctttgtcaatggattattttgataaacgtactttcaatttgatacagccacaaccgatgaactggccttctactatggggttggatgctatgttggtaaatcttggagaggtccgaaatcgcggttttgaattgtctataggttggaatgatagaataaataaaaacttttcttactttgtaacaggtaacttttcttatctgaagaattgggtttctgacattggggtgaagaatgaggatggaactccgggagtgtggacagatgataagagtttccgtagtgtgaaagatatttatcagaccacagaaggtgaacctttgaattcttttcatttgatacagacagctggaatattccaaagtgatgaggaagcagcggcatatgtggataagaatggtaagagaattcaacctgatgctaaaaaaggagatttgaagtttgtagattatgacggtgatggtacaattggttttggtgaccgtcaatatatgggtagtgctactcctaaaactacctttgcatggacacttggatttacttggaagaaattgtcattcagtgcaatgtttcaaggagtaggtggagcacaagcaatgaatgtttccaaatatatgcttttaagtgatgtagaaggtaactttaaccgttctcgtgagatcttgaacgcttggtcgcccgataacagaggatctaacattcctattctgtcaaagaatgacaacaatggaaactttagcacagcttcagattggtatctggaagatgcttcatacctgcgcttgaagaatgtaacgctttcttatgatttgagtgacgtattttgtaagtggtcacacttgaatgaccgcaacagccgcctatctgtatttttgagtggagaaaatttggcaactatcaccagatattctggtatggaccctgaatgcggggggtgggatgctttgaagtatccggtatctcgtgtattctctttaggagtaaaactgacttactaattataaattgaatgaagattatgaaaaagaatatattatttggagtagtatgcgttgcactacttactgccacttcttgtagtgatttccttgatgtacaacccgaaggagatgccagagacaatgcttatttcttaaatgatcagcaggcaattgacgctgtggacggattatacgaacgttttcatcaggaagccatgtatggtcgagaattattttgggagcagggtgctgctaatgatatagtttggggaaaaacacgtgatttcccgacacttgcgacgtttaaatatacaggtgatgagtctccattacgtactgtgttcgaaaccatgtataaagtgatttcccgttctaattgggtgattgatcaattagtagataaggaaaagactactgcattgacagaaatagaaaacaggagtcttggtgaagcctattttacccggggatgggcacattttctgatggcttatcgctatggtacagataaacaaggagttccttttgtacgttatgaagattttgtaaatggatatgataactctattccaccccagcaggcttcagttattgataactataaattgattattgaagatatggaaaatgctaagaaacgtttgccacgtttcgaagattatgatgataaggacttagggcgcgcgcatcaggcagcagctatagcatttcaggtaaaggtatatgcctactgggccatgtgggatgaaacgaaatgggatgaggttattaaattggtagatgagctggaaacgacgtataatcgtggtttggcagacactttcgatgaattgttctcttctgacttctcaaaatattggggaaaggaatatttatggactattccaggtacgggtggttctactggaggaggttctgaatttccgggtgttatacttgaaaataaaggttggggcatctacaatggttggggacaaattaaaccgacatatgacatttatgcagaaatgctaaaagatggtgatggtaaagaaaatgaccgattgaaacgttctattttagaatacggacaaaaattcctattttttggagaggaacgcgagttttattcagcgtccgacattgaatcaggttttcaaattaataagtatatggaaccttttggttatgctaatgctacaaccgaaggatatgtaaatgctaatggtgactggcctactgcacgagttaacttcccgataatccgttttgctgaaatgatgctttttcgggcagaagcttatttgatgaagaaccaaccggataaggcttggaaagatttgaacagaattcatgtacgcgcttgtggtctttctttaccatcaccagctacaatggaacagttgtatcatgaacgtcgttgtgaattagcatttgaatttaccgatcatcttttcgacttgaaacgttggcaccattcttctaatgcagaaatcaaggcattggcggagaaagagttaaatgctcgtcctctcgttcgtcattacaaaaaccgtggtatggtcgatacaaatggagatggaaaacccgatgctattgattatacacataaagttgagttttacacggattatacagacaaaacttcttataaggattgcttcattgtttttccctatccgtctaatcagattataaactcaaacgggcagttgaaacaaaatatctatgagtaatctttctcttttggaagtttacgattaaaaagtagatcattgccattggtcttgtctgcaaggattggtgtcttctttgtatgctggttcttgcagatttttattagatttgtcgaatgaagtgtggttgttaaccgaataattttcaaatacatgctttgatgaaattgaatattttacatatcttgttgtatctttttatatgtagtgcttgtaactctgaggagaaattttccgttgattacgtggatccttttatcggtacagggtttcacggtcatacctatcctggagccaccgctccttttggtgcagtgcagttaagtcctgatacacgtgtaggcaattgggatgcctgtgctggatatcactataatgatactaccttgagggggttttcacatacccatctgagtggaactggatgcatagatttgggtgatatattatttcgtcctaccacccaagaaccaagctttacaaatgagttcttctacagtcctgctaacttttcccatcaagacgaaatggcatcggctggctattactcggtgctgttgaaagatgaaggtataaaggctgaattgacggcgacccctcatgtaggtatgcatcgttacacttaccttacaggaaatcttgctgctgtaattgtagatatggcacattcgcttgataatgaatatatttatgaagctgaattagagaaaactgcagacaacgaaattacgggtatgcgccgaaccaggggatggacagataatcaatatatttatttcgtagctcgtttttccaaatcctttcagactgtagagtttgtgaaaaataagaagaaagtgcctatcaataccaagttgaccggtacggatttacaggctatcctcacatttgataacacgaacggtgagcctattattgctaaagtgggattgtcattggtgagtgtgcagaacgcgcgtcaaaacatggaggccgaagtgaaggatttcgattttgatgcagtacatacagctactcgaagtgcttgggaacaacaactatctactattactgtggagggtggtagtgaagccgacaaggagaacttttatactgctatgtatcacgctatggttgtacccaatatcgtgaacgatgttaatggtgaatatcgtcgccacgacatgcagataggtaagttgccaataggaaggatccaatactccactttctccctttgggatactttccgtgcatggaatccgctgatgacgttgatagatactgacttggtcaatcacatgataaactcctttctcgacatctatgatgcttcaggggaacttcctatttggccgctttctgctggagaaacaggcacgatgattggttatcattcagtatcagttatagctgatgcctatttgaagggaattaggtctttcgacgcagagaaggctttggaggctatgatgatatcctccgataaaaacaaaaaaggctcggacttttacgtaaaatatggttttattccttctcatattaaaagagaatctgtatcttgtctgcttgaatatgcgtacgatgactggtgtattgcacgtatggcccaagaaatgggaaaagaagatatttataaaaaatacattgaacgttcgcaaaactacatcaatgtgtttgatggtgctacgagattctttcgcggaaagcgtatggatggcaattgggaatcaccttttaatccgcttgcagtgggacgtgcctatacagaggctacagcttggcaatatcgcttctttgtaccccatgatgtgaatgggatgatacaactttttggcggtaaagaagaatttgttgctgctcttgatgatattttcaatacggatgcagagatacatggcaatcttgtagatatcacaggtttaatagggcagtatgtccacgggaatgagcctagtcatcacatcgcttatttgtacaattatgtgggtgagccttggaaaacacagaaaatgtcgcgacgcttgctgaacgagatgtatcatcccactccggaaggtattattggcaatgaagactgcgggcagatgtcggcatggtatattctttcaagtatgggactttattcggtttgtcctggtagcaacgaatatgttcttactactcccttgttcgagaaagttgtagtgcatttggctaatggaagaaccttgacgatacttgccaatgatccgcagaaaaatatttatattacaaaggtggaactaaatgggaaacagatagatacaaactttattacctatgactgtctgatgggaggaggagagttgcgttttaccttgtctgacaagccaaataagagcagaggtactgctgaacaaactgcgccttactcctatactcgagataaagttgtatctatcccttacgtcgataaggatttgaatttattccaaggaagtgtagttgtagaactggccacaaccactcaaggtgcgaaaataaggtatacactggacggaagcgaaccgaccgaggagtcattcctttataaacatcctttcagtttgaataagacgactcaagtgaaagcgagaggatttaaggaaggttatcatccaagtagagtcttgtctattatagctctcaaagcggaattgaaggatgctctttctgtacatcctgtacagaatggtgtgacctataagtactttgaaggtaattaccagaaagtaactgacatagaaaaaacacctttgttgaggactggagttttgtctaaaccttctatacaaggtgcaagcaggacagaccattttggttacattttttccggactgataaaagtgcctgaaaatggagtatatactttccaaactagttcagatgatggcagtgtattatacattgataatgaactggtagtgaacaatgacggttcacatgctgcaattcctgctaccggattcatagctttagaaaaaggtttccattcctataagctctattactttgaagattatgaaggagaacatttgagttgggcttggaaattgccttctgctgaaacgttggtaccaattccttcttctgttttgtatgtggaataattaaatatattgttatgaaaaaaatcattttattgtttctatcttttggggtagtatcctgcgggcaagtgaaacaacaagtttctgaacaggcgcgtgttaatgtaatgtcatataatatccgctatgacaatccagaagatggtatgaataattggcaataccgaaaagaccgtgctgcaacggctatccgattctatgatgttgatatattgggtacacaggaagtgcttcacaatcagttagaagacctgaagcagcgtttaccagaatatggtgtgattggtgtcgggcgtgaagatggaaaggtaaaaggcgaatatagtgctctttggtacaaaaaagcgcgttttgagttacttgcttctggatatttttggttgagcgaaacacctgaaattgctggttctagagggtgggatggtgcttgtgaacgcattgcttcatggggtaaattgaaagacaagatttcaggaaaggaatactttgcattgaatacacatctagaccatataggagttgtggctcgtcgtgaaggagtgagccttatattggacagagtgaacgaattgagtgacggattaccagtaattgtaacaggtgattttaatgcagagccagaatcggatgttatcaagcacatgaccgatgccgagaatccaaagcatctgcaagatacacggcttatgtctccaattgtttatggaccatcatggagttttcacgattttggaaagataccttatgataaacgtccattgatagactatgtgtttgtacgcaacgatcttaaggtattgagatacggagtgcttgccgagacagaaggatcagagtttttatcggatcatgctccggtgctggttactgtagagtagttttctactttttgaactttaggttgaaaataataaatttaaggtttaggaggttcatctttaggtttagaactgaatatcttgtcctatgtactatgaataataaataatttgtaaatgtaactgataaaaccagataataatgaaaaaaataaggaagtgctgtgttatagtattgttagtagtattattccctgctaatatatttgcacaagaacgtcgtgataaagaacagacttatgtgttggagaatccctatgaagttaacaaaataacaccgttacaagggaagaagattaaaaatgttgttttgatgattggtgatggtatgagtcttatgcacgtatattctgcttggacggctaatcgtggtaaactttttttggataattgtcaggctgtggggctttcgaaaacctactgtgcaaataaactgattaccgattctggagcaggggggacggccattgctactggacagaaaacaaattatcatagcgtaggcgtagatgtggaaggccgtcctttgaagtcgttggtagactttgctgtaggcaaagataaatctgcgggtattgcagttacttgtcgcctttgggatgccactccagctgatttttgttgccataacaaagatcgtgatgctgaggctgaaattgtggcggattatgtgaacagtaacgtagactatgtctttggcggtggtgctaaactctttgagaatcgtgaggacggacgtgacttgttcaaggagttgcgcgacaaaggttttcaaacgcctcgtagttgggatgaactggtaaaaattaagagtggcaaggtatttgcagtgccttatccagtggatgctccgttgcctgacgaacgtggagaccttcttgcccgtgcgtcgttaaaaggtattgaacttttaagccaaaatgataatggtttcttcatgatgattgaaggttcgcaattggatgattatggacattttaatgatattaatctcttgatgcaggaaacacatgatttcgaccgtactatcggtgccatttacgaatgggcggctaaggatggtgaaacgctggtagtggttaccgccgatcatgaaaccggtggtcttacattggtagatggtgatttgaaagagggtaaaattgtttgtaaattttctacaggtggtcatagtggtgtaatggtacctgtatatgcttttgggcccggtgcacaggagtttacaggtatatatgagaataccgcaatttttgataagataaagaaactgcttaatctataactaaaatattatttcctatgctgaaacatatcttgtttacatgtttactttccttttctgtaactcctttattgaaagctcaaaattgtggtaatgatgaaatttatcatttgccctataagaatacatatgtaaaagaacctttggttaccgagaacgagtatcgtgtggccaaacccgaggttattgaaccgaagagttttgaagaagctcggcagatacttcccaatccgatttgggatgggcatggaaaagaaatggaaatgtattggagggcatgggaaatagcagtcggaaatattcgtaagccacagtccggttcgggttttgtatcaagttatttggatactgcttacaatggtaatatcttcatgtgggattcttctttcatactgatgtttgcacggtatggtacacgttttttcccttttcagcgcacgttagataacttttatgccaaacaacatcctgacggttttatctgccgagaaattaaagcagatggagcggattgtttcgaacgatatgatccggtaagcactggacctaatttgatgccttggtgtgaaatggtttattaccatcagtttggagatatggagcgtctgcataaagtttttcccgtactttgttcatattataagtggctgagacttaaccgtacatggcgtaatggtacttattggtcgagtggatgggggacaggtatggataatatgccgcgggttccgaacggatatagccctatttatagtcatggacatatggtttggttagatactaatcttcagcaattgttcattgcaaatttattacttgaaatgggattttatttagaacgctggcaagagatagaagaatttgaagacgaagctaagatgctgggaaagtatattcatgataatctttgggatgaaaagactggatttttgtatgaccaatatgctgatggcactctttgcaaaaccaaaggtataggtgcttattgggcgctatttaccaatgtgttagatacaatacaactaaaccgtatggtaaaagaattggataatccggaaacttttaaccgcaagttccgtgttccttctttgtcggcagaccatcctaagtataaggaaaacggtcgctattggcaaggtggcatctggccgggtaccaactacatggtgatacaaggtcttgtgaagaaaggttatcgtaagttagcccgtgaaatagctttgaaccattataatgaagtacttgaggtatataagaatacgggtacattttgggaatactattctccggagaaggcagagcctggatttatggctagaaaggaatttgtcggttggtcaggacttccacctattgccgaactgatagagtttataataggtattcggggagattactccaaacagcaaattgtttgggacatgaacctgacagaggccaatggaatagaacgttatcctttcggaccagaaggtattatcagtttaaaggcggaagcacgccgttctgtcaatgatgaaccgcacattacggtagatacgaatattggctttgaattgttcgtactttatggtgaaaaagagaagaaaattactgtgcttcctggtaaacacacttattaaaaagataatctatgaaaaagaatatgtcacgacgtcatttcctgaagatgggaggattagctttggctgctatgtccgtccgtccatctttgtcgtttgccgctttcagggaatcagaaacgaaattcgtttccttgcgtccttcaatagacaaaaggcgttttgtatcaagagctgtagaggtaatcattaaagaagtaaagccaaagataaaagatgaaaaactgcggtggatgtttgaaaattgttttcccaatacacttgatactactgtcagatataagatgaaaaacgaccgtccggatacgtttatcataactggtgacattgacgctatgtggttgcgtgattcttccgcgcaggtgtggccttatttgccgttgatgaaagacgatagggatttgcagtttttgatagccggacttattaacaggcagacagaatgtatactgatagacccttatgctaatgctttcaatgatggtccattgggtagttattgggaaactgatcatacacagcatatggtgaaagagttgcatgaacgtaagtgggagatcgattctctatgttatcccattcgattggcttaccagtattggacattgactaaagatacgtctatctttagtgcagattggcacgaggctatgaaattggtagtccgtacttttaaggaacagcagcgtaaacaaggaatcggcacttatagtttctcgcgcgattgtgatcgtcctacagactcgcaaatcaataatggttggggtgcaccagttaagccagttggactgatcgtttcttcgtttcgcccttcggatgatgctactcaatttggttttctcatcccttccaatatgtttgctgttgtgtcgttgcggcaattgtctgaaatagaacatacagtctataatcatatagattttgctaaagaatgtatagctttagctgatgaagtagatgccgcaattcgcaggtatggtacgtttaaccatcctatttgtgggcgggtttatgcttttgaagtggatgggtttggcaatgtgctttgtatggatgatgctaatattcccagtctgttgtctgctccttatttgggatattgttctttcaaggatgcagtttaccaaaatactcgtaaattgatatggagcgataataatccttatttttttaaaggaaaagctggagaaggaataggcggtccacatgtagggttgaactatatttggccaatgagtatcataatgaaagcttttacgactgatgatgaggaagaaatacgcagttgtttgaagcaactgcgcgatacggacggtgaaacaggttttatgcatgagtcttttaatgcggaaaatgcagctgatttcacacgtccttggtttgcttgggcaaacacgctgtttggcgagctaatccttaaagtagttcagacatatcctaaccttttattacaaacgttatgaaatatatttggggggtgtttactgccatctcattggctctcttttcatgtggcagcggaagcaaggaatctgtagaaaactatggtatcataccgatgcccaatgatataactctatcccgaggaaagtattttttgcaaggggagaaaactgtggctgtgtcttccggagagaatgaaatgaaagtttttcgttatttagagaactttttgaagaacacacaggtaacattaagagctgtttctccaacagagaaggccgatatttatctgttaattgataattctctaaaagatgaggcttatacattggaggtggcttccgatgctatacggatttgttctaacgaaactgcagcaggactgttttatggtgttcaatctttattgcaattgatgccggcagaaatctatgcttccgatcgtaggtatgagggacgtattgaaattccaattgtcagtattaaggatgctcctcgttttccttatcgtggtgctttgatggatgttggtcgtaatttccttcccaaagaagaggtactgaagtttcttgatttgatggctttctataagttgaataaatttcattttcatttgactgacgatcaaggttggagaattgagataaaaaaatatccgaagttggtagaggtggggtcgcatcgtagtcaaactcaagtaggacattctgattattattacccacggcggtttgacggaaaaaaacaagcgggatattatacacaagaagaaattagagagattgttaagtatgcttctgaccgttttataacagtaattcctgagatagaaatgccgggacatgcttctgctgcattggcgtcatatccagagctttcttgtgggttgagaaaagattatgtggtacgcgattactttgatgtttttgatgaagtctattgtcctaaggagcatacgtttgatttcttggaaaatgtattggtggaagttatggaactctttcctagtcattacattcatattggaggtgatgaatgtcctaagaaagcttggaaaaagtgtattcattgtcaaactctgatgaagaaagagggactaccagatgaagaagctttacaaagttggtttattcataagattgaacaatttgttaacagcagggggcgtgatattatcggttgggatgagatattggaaggcgggcttgctcctaatgctactgttatgtcgtggcgtggtgaagaaggtggtattatagcggcccgtcaaaagcataaggttattatgacaccgagtaaacgatgctatatagattattatcaagagagcccagaatatgctccactggcgataggtggtttccttccgttggatagtgtatatttttataacccactaccagctggattgactaccgaagagcagtcttatataataggtacgcaggcgaatatttggggagaatatattcaaactcctgaagcatttgaatatatggcttttcctcgtttgttggctatgtccgaagtgcagtggacgcaacctgaatataaagattttgtgttttttactcgcaggttggataaggagttcaaacggttggactattgtcaggtgaattcttgccgcaatttttatgaagtgaattatgcgggagtgtggaatgagaatcatgagacctatgaagtggctttatcttctttttgtccggatgcggagatacactatgcgattaatgattctgtgataacggcttcttcttctctgtacaagtcaccaatattgttgagtaaagatgcagttatttacgcagccgtttataaggaaggcaaatctatgggtagggtgactcataaagaatttgccataaacaaggccactggatgtgattacaagtgtggtcctaaaacagagtgggaacatttggatgaaagctttggattgactgacggatattgtggatatgctcaagacatgcgtagatgggtaagcttctatcaggatagtgtacagattgtggtggagttgaaaggtacgcaaagaataaaacaagtagcttttgcttccttatggcgtccttggaatatgatttggccggcaaaggcaatgagtgtttccgtttcggcagacgggaaaaacttttttggagtaggtaataaagttttatcatatgattttacgttgacggaaagcactcgctttcctgcttctctttcatttcctgaagtggaagctacatttgtacgcttggacttgttgagtgggggcttatgtccaaaaggatatttcaatgaaggagaacaaagcagattggcgatagatgaaatagaaataaactaatcaattagattcttatgaagaaaatatcaattcttttgttagtgttatggggagttatcccatcaatgctttttgcacaacggcaattgtcttttcaaaatggaaagtttaaaatagttcagttcacagacttacattggacatcaggttcaccgaagtgtgctgaaacggaaagaactattcgtacgatactgaaatccgaaaatccggatattgccatattgactggagacatagtgacagaagcccctgcaattaatggctggatgtcggttgtagaaatatttaataatgccaaagtgccatttgttgtaactatgggtaaccatgatgcggagcacatggctaaggatagcatttatgatttgttgcaaaaatctccatactatgttggaacgaaggggcctggagatgttatggggtgtggtaattgtgtgataccgatttttgattcgatgacaaagaaaaaggtagaatcagtgctttattgtatagactctaatgattatcagcctgacaaactttatggagtttacgattggatacatttcgaccaaatagcatggtatcgtaaacaaagtgctcattttgcttcttgtaataatggacgtcctttaccttcattggcattctttcacatacctttattagaatataatgaactgataggtgatggtaagacatttggtaatgatagagaaggtggagttgcttcttcaaaggtcaattctggtatatttgcttcgtttcttgataggaaagatgtaatgggggtattcgccggtcacgaccatgataatgattatgttggtattaataaaagaatattgcttggatatggtcgggtgactggtgcggatgcttacggagaattgattagaggtgcacgtatcattgaactgtatgaaggtgaatttaagtttgatacttggattgctacgctttcaggtcgtgaggcgatctattactatccctccggattaaattcagatgaggaacgggtgatgaattattttccggcaatgaatgtagcatcacctaaacaaggggtagcttatacttattatgaaggtcaatgtaaacgagtggctgacattacttcttgtttgaaagtaaaggaaggtattatgaagaactttttgataaaggatgctgccattgctgatcactttgcctatgaattccgtactttgatttacatttccaaaagaggcgtatatcgcttctataccatttcggatgatggttctaaactttatattgatgataagctgatagttgataatgatggtggacatagtgttcgtcgtgccgaaggtaaggttgctcttgagaaaggttatcatgcattgcatttattgtattttgaaaattatatggggcaggaactggaggtcggatttttaggacgagatattcccgaaactcccattccggccgagatgctgtttttgccggattagaatttttttctccgtaccaggtggtgccgttcatcgtacaatcctggtatggagcatttgtttgagaatcggtattttgcttttttcatgccattaaacaataagaaaagcatgacgtctttttttaatgtattgtcaactataactgctatttcattcagattatgagaatacaaaaatagatacgtttaaagtgtaattatatgatttacatttatttatcttgtttgcgtatgtttcgtggaaaattacacaagctaattgcctaaaaaatgaatagaactgcagtctttagcttggtaatagcagtcggacattatttgatgcctttttctgtattcatagggagaaatattctttagagccttgaattggcgtgacaagttttttagattgtttattcctacagattccgctacggttgagataggagcattgctggtaagtagcagttgagcaaacctttctatttttagagaaaatatgtatttttgaatggactgttgggtaactcctttgaaacgaatctctagtaacctacgtgacaaggggacttgttttacgagatctgatacggtgatatgttcagtcaggtgcttattgatatatttcaaaattgtttggatatgcgtatcggtagtagaataaaaatcggttgaaagtctgtttataatatttatgggttgcagtactacatcttgatagttgactttctcttcgttcagtaggcgtacgatgagttctgctgcctcaaatccgcctcttacaatattgtggcttatgctggataaaggaggatcagataagttacatataatttcgtcattatcaacacccaatattgctatcttgtcgggtactctgatattatttactttacataattcagtaatgcgattaccttgattatcatcacaagcaaagagtgccgtaggcagggggagcgattgcaaccatttgagtaaaggaggagcttcataaaaccaaagatcatcgagagattgctcttgatatgattggaaacaattaccaaaaccatgttcggctatacatttatagaaaccttcgcaacgctcttgtgaccaaaccgtatctcgatagccatagaaagcaaaattttgatacccttttcttagaaagaattccgctgccatcctgccagttttgtaataatctccagtgatgtttggaatattactgaatcttgctttgtaatcttgtgctatggcaataattccattttcacggaaaatctctacattgtcgtcgttgtcgaatctgccgataatagcatctgcatgccacgtttttgcccacttcagcactccctttatgccataggtttgtttataggaaagcggcattcggcacaccacccacggttcgtggctgtttgcgtacatcaatactcctttcagtagattataggagaaagattcagtgaaatcgcttagcagtattaatcgaatcataaattatacgttccttaactatgcaaatgtagaaaaaaaagtattagttttgttttcgataaagttattttgccaatctttatttttttcgtaaatcccgcccctcgtatttgcagatagcttctatccactcttctgtcagcggtttggattcgtgcttgctgaggtcgtaagctaccatgacggaagtgcatatacattttacttcctgcgtctcgatatctatgacacgttgcgcaagatgaaaactcttcgtgcctatttgggtcacggcggtctgtacggcaatgtggtcagagccataaatctgggcaaggaagttggcttcgatgtggactacgacgatgccgtctttctgccagtcgacatgcggacatacggaagcgaaatactccgtcttgcctaaatcgtaaaaggaaaaatagacggtgttgttgacgtgaccgaatttatcgacgtcattgaaacgtagctgtatgggtagtgtgtggttaaatttaatatcttccattgttttctcctaaacattgtttgtaatcggtgcgaatttactatttttgcgtgttaatcactgtatttatagagtaagaaatgatagaagacattaaaaaagcctgccaggtaatgagggaaggcggggtgattctgtaccccaccgataccatttggggtattggttgtgacgctaccaacgaagatgcggtgcgccgtgtatatgaaataaagcagcgtcaggacagtaaagcgatgctggtgttggtggattcttccgtaaaagtggatttctatgtccgggatgttccggaggtggcgtgggatttgatagacctggcagacaaaccgttgactattatttattcgggagcgcgtaatctggcggcaaatttgctggcggaagacggaagcgtgggcatcagagtgacaaatgaagatttctccaagcgtctttgccagcagttccgtaaggcgattgtttctacttcagccaatatcagcgggcagccttcgccgaagaacttcagcgaaataagtgaggaggtaaagtcagcggtggattatatcgtgggctaccggcaggaagagatgagtaatccgaagccgtccagcattatcaagttggataaaggcggagtgattaaaataatccgtgaataaagaaaatgactggagaagagagaagttggttgcaacgctttatcatttggcgtgagaagaatgtcaaggagaaacggtttatcctggttcttagctttctggtcggtatctttacggcatttgccgcattgatattgaaactgttgatacattgggtacaaaattttcttacagagaatttcgacacaacagaggctaattaccagtatctgatatatccggtggtgggaatctttttggccgggttgtttgtacgttatgtcgtaaaggatgatatcagtcatggagttacaaaaattctatatgccatatcccgcaggcagggacgtatcaaacgtcataacacgtggtcatccattattgccagttccataacaatcgggttcggcggttcggtcggggcagaggcgccgattgtgcttaccggttcggccatcggctccaacttgggcagtctgttcaaaatggagcaccgcacactgatgctgttggtgggatgtggcgctgccggggccgtggcaggtattttcaaagctccgatagcgggacttgtttttacgttggaggtgcttatgatagaccttacaatgtcttcgctgcttccgttactgatttcggcggtgacggcggcaaccgtttcttatatcgtgacgggtacggaagccatgtttaagttccaccttgaccaggcttttgaattggagcgtatcccttatgtgatcatgctgggtattttctgcggactggtttccctctactttacccgtgccatgagttcggtggaaggaatgttcggtaaactgaaactgccttataagaaactgctggtgggcggcgctatgttgagtattctgatattccttttcccgccgctttacggtgaagggtacgatacgatagaattactgctcaacggtacaagtaatgttgagtgggatacggtgatgaataactctttcttctacggacacagccatttgctgctgctgtatttgatattgataatcctgtttaaggttttcgcttcgagcgcaacgaacggcggtggtggttgcggtggtatttttgcgccttctctgtatttggggtgtatcgccgggtttgttttttcccatttcagcaatgattttgagatgactgcctatctgcctgaaaagaactttgccttgctgggcatggcgggagtgatgagtggcgttatgcacgctccgcttacgggagtgttcctgattgccgagcttacgggagggtacgacttattcttgccgttgatgatagtcgcggtcagctcttatctgacgattatcgtttttgaaccgcacagcatttactccatgcgtctggcaaagaaaggtgagttgctgacacatcataaggataaagcggtgttgacgctgatgaaagtggagaatgtggtagagaaagactttgttgcggtacatccggaaatggatcttgccgagttggtgaaagccatctccgcctcacaccgcaacatatttccggtgacggacaatgagggtaagctgattggtattgtcctgctggacgacatacgcaatatcatgttccggcaggaactgtatcatcgttttacggtaggcaaactgatgacttccgctccggcgcgcctttatgatacggacagcatggaacaggtgatgcgcacttttgacgatacgaaagcatggaacctgccggtggtggacggagaaggcaagtatctcggtttcgtatccaaatcaaagatatttaactcgtaccgtcaggtattggtacatttctcggaagattaaaagagatgattatgaagaaagaagatttacggattgtatatatggggactcctgaatttgcggtggagcccttgcgctgcctcgtagaaggcggatataatatagtaggggtaatcacgatgcccgacaagccggctggacgtggacataaggtgcaattctctccggtgaaacagtatgcgctggagcatgacctgccgcttctccagccggaaagattgaaagatgaagcgtttgtcgaggctttgcgtgcctggaatgccgatttgcagattgtggttgctttcagaatgttgccggaggtggtttggaatatgccgcgtctgggaactttcaatctgcatgcttcgttgctgccgcagtatcgtggagctgcacctatcaattgggcggtgattaacggtgatacggaaacgggcatcacaacttttttcctgaaacatgagattgatacgggagaggtcatccaacaggttcgtgtgccgattgcggatacggacaatgtaggtattgtacacgataagttgatgatgcttggcggacgtctggttacggagactgtggatgccattcttgcagatacggtgaaatccgttccgcaggaagaaatggctgtagtgggcgaattgcgcccggctcccaaaatattcaaggatacttgtcgcatcgactggaaccagcctgtcaagcggatttatgattttatccgtggtttgtctccctatccggctgcgtggacagaattggtacagtccgacggaacagcggtggttctgaaaatttttgaaacagagaagatagagcatctgcatgaatccgctcccggaactttgcagaccgatggaaagacgtatattcgcatagctggtacagacggctggattggtgtgcgtgctttgcagcttcccggcaagaaacgcctgaaaacggatgagttgttgcgtggatttaaactgaccggagaatgtcgggtgcattaagcatttatccgaaatctttttgtacatttgtctgttgtaaattcgtgtaacctattagaatgtaactgttatgaaacctataatatccccttccatattgtctgccaactttgcatacctggcaaatgatattgaaatgattaacggcagtgaagccgactgggtacacgtcgatataatggacggcgtgtttgttcccaacatatctttcggttttccggtattgaagtatgtggcaaagcttgccgagaagcctttggatgtgcatctgatgattgtacagccggaaaagttcatcccggaagtaaaggcgttgggggcacgtataatgaacgtgcattatgaggcatgtccgcatttgcatagggtagtgcagcaaatccgcgaagcgggaatgttgccggcggttactatcaatccggctaccccggtatctatgctgagagatattatcaacgatgtctatatggtgttgataatgggggtgaatccgggattcggcggtcagaaatttatagcacatactgttgataaggtacgcgagttgcgcgaactgataacagtgaccggttcggaagccctgatagaggtcgacggcggtgtcaatctggatacaggctcccgtctggtagatgcaggagccgatgccttggttgccggcaatgccgtattttctgctcccgaccctacagaagcaatccgtgctttgaaaaatctgtaatatttattgataacagacagcttacaacggcatcctttcctgcgactgttgatgccgttggttggtggaatagtatatggggataaatatccttatatactgtccgtcggttggtggatagctgtcattctgctgttgatagggacatatattcttggccgtaagtattatgttctttgcaagctatatggggctgtcgtgtttttggcctgttttgtattggggtggactttagtgagtgtgcagttgaagcaagccgaatatatattcccgaatacggaaaaaccttccacttaccggattactcttacgacaaagccggaaatcaagaaaaacagtattttatttcgcgttgctttgcggggagaagtgctgaaagatacgtttttatataacttttcagaaaagacttttctgttttatttccctaaagattcggcggcatattccttgaaaagaggggatgaactgttggtgtgcacccgtttgtctccacctgccaataacggtaatccggatgagttcgattacgcccgttatcttcttcggaaaggggtaagcggaacagcgtacgtacgtgccggacattggtgtgcgattggttgcgacagcactctcacttttcgtcagcaggctttggagtgccggagcaggctggttgctttatatcgggacatggggtttcggggagatgaattggcggtactctctgcgcttacaataggagacaaagaagagctgagtgagagtatcgtagagacgtattcggttgccggagccagccatgtactggcactttccgggctgcatatcggctttatttccgccctgttgctgtttgtcctgtctcctttgtggattaggtggcggtttttaaagccgtttttgtttctgtctgtaatcctcttgttgtggggatttgctttccttacagggttgtcttcttccgtggtacgtgcggttgtcatgtgctcatttggattactttccatgctgatacctgcctgccggaagcttactttgaatacattgggggttacggctttcctgatgctgctgtttaaccctgtctggctgtttgatgtgggatttcagttgtctttttcggctgttgcagctattgtactgttacaacccgggctatacgggttgttatcggtgaagaaccgccttttgcgtaaggcgtgggggctggttactgtttccgttgccgcccagataggaacggctccgttggtaatgctctatttttcacgcttttccacacacttcctcttgactaatttgttggtaatcccgttggtttcgttgattgtgtatgcggctgttatattgcttgtcctgactccttttcctgtcttgcaacagctctttgccgatgtggtagaaataccgctaaggatgcagaatgctttgctccgttggatagaacagctccctttggcttccatagaccggatttgggtcgatatatgggatgtcttcctgttttattgttgcctgttgttgttctgccgtgtttggatgaggcgtacggcagcgaatgtgtatatcgctttgtcagccctgctgctatgcgtctcctatcattcgtatgcgtttatcacagatgctccccggcgcagcattgttttttataatgtccgtggctgtccggcagtgcattgtctggcagataactccgcttcatggctggtctgcgccgatacactgcccgatgtcacccggttggaacgttcgctttcttcctactggaaccgtttgcgcctggaacgtcctgacgtgattgagggagattgtttgcttcctgaaatttcagtccgtaacaaaaccgttttctatgcagggaaacgcatctgtctgttgtacgacgaccgttggggcaacaagatatccggtgtgcctgtttttattgattatctgtatgtttctcacggttataagggagatatgcaggaactcgtttccttgtttgaagtaggtacggtagtgattgacgcatctctttccgaatactatcgggagaggattatcagcgattgtgtccggttgggaattccttatcttcctctttccgaaaaaggttctgtgcacatattattataaatcataaactttttcgtacttttgccctttcttttgttgcaggtgagacgaagttgttccggatatgcaacgtaaactgtaaaatagcgagtaactatatgttgaccaaagtaatagatcaatctaaaatagaccactttgccaagtggctggaacgtgcggataaaatagttattgttgcccatgtggctcccgacggagatgcagtaggctcttctctggggttgtggcattttcttaatacgcaggacaaggatgcgactgtcattgttcccaatgcttttcccgatttcctgaaatggatgcccggcagcaaggatatacttctgtacgaccgttataaagagtttgccgacaaattgatagcggaagccgatgtcatctgttgcctcgatttcaacgctatcagccgtatcgatactatggcagacgccgtgttggcttctcctgcgcggaagatactggtagaccatcatttgaatcctgaagatttttgcagaatcatcatttcccatcccgaaatatcctcgacttccgagctggtgttccgcctgatttgccgcatgggctatttcagtgacatcaccaaagagggagctgaatgtatctataccggtatgatgaccgatacgggtggctttacgtacaactccaataaccgtgaaatttattttataatcagtgagttgctttcgaaaggtatcgacaaggatgatatttaccggaaagtgtacaacacctattccgaaagtcgtctgcgtcttatggggcatgtgctgtcgcagatgaaagtctatccggagcatcgtgccgccctgattacgctgactaagaaggaacaaggcaatttcaattatatccgtggcgatagcgaagggtttgtaaacataccgttgagcattaaaaatgtcgttttctcctgcttcctgcgtgaagatacggaaaagccgatgataaaggtatccctgcgttcggtaggcagtttcccctgcaaccggctggctacagaattctttaacggcggcgggcatttaaatgcttccggcggagaattttacggtacattggaagaggctaaaaaagtgctggaacttgcattggaaaaattcaaaccgctgcttaatgccaaaggataaaaaaacagcggttgtaaaggttaaaagatacgaactttctacttgcaacttttaactttcgggtaaatcagatatttttgtacgaaattactaaataacagaaatgaagaaacttactttattctttttatccttactggcattcggcttgggttttcaggcgtgtgatgacggcaagacctatgcggaaatgcttgatgaggaaaaagacggtataaatgactttatcaaaaaggaaggcatcaaggtcatctctcaaagcgaattttatgcgcaggattctactaccaacgtcgaggagaatgagtatgtgcagcttgccagcggagtgtacatgcagatagtggataaaggctctgaaaatgcagccgacactgtgaaaaacaacgatgaagtgctggtgcgttttatggaatatagcattcttgacaaagataccacattgtccaacctgaatgcggtggaaaccgtagatgcattccgctatgcggtaactccttcgtccattgcagggacattcctgcagggatatatgatgacttattattcatcaccgacagttccggcaggctggcttgtcccgttgacttatgttcgcgacatggctcatgtcaaactgattgttccttccaagatggggcatcagacagccatgcaatatgtctacccttatttttatgacatccggaaatatcaaatctggaaataactaaccatttatttaaataattaacctatgactctaatcaaatctatctctggaatccgcggaacaataggcggtggtgcaggcgaggggttgaacccgctcgacattgtgaagtttacttcggcatacgctacgcttatccgcaaaacgtgtacagtaaaaagcaacaaaattgtagtaggccgtgatgcacgcatctcgggcgagatggtaaagaatgtggtggtaggcacgctcatgggtatgggctgggatgtagtggacatcgatttggcttctactccgactaccgaactggctgttaccatggaaggtgccagcggaggtatcatcctgactgcttctcacaatcccaagcaatggaatgccttgaaacttctgaatgagaaaggagagttcctgaacaaggaggagggcaacgaagtgcttcgtattgccgaagctgaagagttcgactttgccgaagtggacaagctcggctcttatcgcaaagaccttacttataaccaaaagcatatcgacagtgtgttggcgcttgacctggtggatgtggaagctatcaggaaagccgatttccgcgtagccattgattgtgtaaactccgtaggcggcatcattcttccgcaactgctggaacagctcggagtgaagcatgtggagaaactctactgcgagcctaccggtaatttccagcacaatccggaacctttggaaaagaatttgggcgacatcatgaaccttatgaaaggcggtaaggcagacgttgcttttgtggtagacccggatgtagaccgtttggccatgatttgtgaggacggtaagatgtacggtgaagaatatacgctggttaccgtggccgactatgtgttgaagcacactccgggcaatacggtttccaacctgagttctacccgtgcgttgcgtgacgtaacacgtaagtacggtcaggaatattccgcttctgctgtaggcgaagtgaatgtaactaccaagatgaaagaggtaggcgctgttatcggtggcgaaggcaatggtggagttatttatcctgccagtcactacggacgcgatgctttggtaggtattgccttgttcctcagtcacctggcgcacgaaggtaagaaggttagcgaattgcgtgccacttatccggcctatttcatggcaaagaaccgtgtagacctgactccggatacggatgtcgatgccatccttgccaaagtaaaagaaatctataagaacgaagaaatcaatgatattgacggtgtaaagattgactttcccgacaaatgggtacatttgcgcaagagtaacacggaaccgattattcgcgtttacagcgaagcggctacgccggaagcagccgaagaaattggtcggcagattatgaaagtaattgaagacttggcaaaataattgtaccgttctttagaacacagaaacacaaagaaacagagtttagctgtctactctctgtatctttgtgtttctgtgttttttatgttgttacagttgaatgattctccctatctcttgctcgaaattgggagtgaatatccctttccctatattttctttaatttcctctgtactccagaagcgtccgccatccagctcgtcgctgggatgtatctctccgtcatatacggttttgtgcacaaagacaagctccttttcgcgtgcggattcaaaaacatagctggtaacggtttccggtgcgaagtcggttatccctaattcctcgcgcacttcccgtttcagtgccatttctacgctttcgcctaaatctacgtgcccgcctaccgaggtatcccatttgccgggttgtatgtctttccattcgggacgtttttgcaggtataattctcctttggaattgaatacatgcagatgaattacggggtgcaacagtttgcttccgttgtgacactcaccgcgggtggctgcacctatgatgtttccctgctcgtcaacaagaggaaacatttcctggttattgtcgctattcattaattctgagctttttgttggttttatcgatgaaaatggtgcattctccgagaatagttacggtatcagcaaagacgaatcaccgtaactcaaaaatcggaaatcatgggcaagcgcataatcgtaaatcttgcgccaatctccatgcagaaacgctgagacaagcagcagcaatgtgctttgcggctggtggaagttggtaaccatggcttttacgattctatattcgtatcccggagcaatgatgatttgcgtgctggaatgcaacgtttccatgtgatgccggtcgaggtaggctatgattgcctgcaaagcatctacagcgggtgttgctgctgtttcaagcgctgtttcataaggttgccattgttttacatgcaaatcttcttccgtagcgttaggattgtgcagcagagtaacgcctatgtgatagaggctttccagtgtacgtacagaggttgtccctactgcaatggcttttccttcatgtgctaccagcttctccagcgtacttcgattgacggatatgtattccgtgtgcatttcgtgcccttctatctcttcgcttttgacaggtttgaacgtgccggctcctacgtgcagggtcagttcttccaatgctacccctttttcacgcaaagcgtccaaaacccgtggagtgaagtgcagaccggctgtcggtgcggctaccgaaccttttatcttggaataaacggtctggtaagtctccttgtcactctcctgcgtctcccggttcagataaggagggatgggtagttcgccgaacacttcgagaatatcggcgaatgttatttccggattgttccagcggaaatccacccaatggctggttccatggcacgcaccgcgttcggcggtcagggtaagcggctttcctttcacggttatttcccgtttgagcgcaccttctttccatttcttcagattgcctatcatgcagagccatgcggcatgctccgtttgctggaagttgagggcatagtcgttgggttggatcggttcgagacagaatacttcgataagcgctcccgtttctttatggaagtgcagacgcgcctgaataactttggtattattgaaaattatcaggctgtttgccggcagatagtcgggcagggaagtgaatatatcttcggtaacttcgccgtggcgatacaacaataacttggattggtcacgcacgggcaatggaaacttggcaatgcgctcatccggtaacggataattgaattcgctgattctaatatgtttgggatcttctttcatatctttattttattaggggactgcaaaggtacggatatttgggaagatttggattatatacagccaattaatgacatatcagtcataaggtcattccggttcatggatacacaatgtatttcttgccaatacaaaaaaggtatgtttgtatataatcatcaaataatttctaactttgcgagagataaaagaagatgtctgaaccgtatgtttataatggttccgatgtgtcttccggataatgattaaaaaacagaatggaaattatgaaaataggagataaagtgcgcttcctcagtgaagtaggtggcggtgttgtaacgggattccggggaaaagatatagtgttggtggaagatgccgatgggtttgacattccgatgccggtgcgtgaatgtgtggtgattgaaacggatgattacaatattcctactcctgcttccaaagcagccaagaagaaggcggaggagcaatcggctgcgcgtatggcttcggcagcctcgaagccggtatcttccgttttggactccggacggcagatagagtgtccggccaaacctcaggtatctgtttatcgtcagccggaaatgaaaggcggagatgtgctgaatgtgtatcttgcctttgttccggaagatatcaaggcggtaagcactactccgtttgaggcttatttggtgaatgatagcaattactgcatgtattatacctattcgagtgcggagggcaagtcgtggactgcccgttctcatggtttgatagaaccgaatacgaaactcttgttagaggaatttgaaaaatcggaattgaacgaccgggagcgtgtagctgttcagttggtggcgttcaaggacaaccgctctttcgctatgaagcctgctgccaatgtggaaatccgcatcgatacggtgaaattctataagttgcatacttttcagcctaccgatttctttgatactccagcactggtgtacgatgtagtgaggaatgatgctcccgccaggcaggtttatgtgtcggctgaggacttacaggatgctctgatgcaaaagaaagcaacagacggtccgtccagaccccggactatcgtgaagcggggcggcaaaaatgaaatcatcgaaatagacctgcatatcggtgaactgttggatgatacgcgcggcatgagtaacagcgagatattgaactatcagctggataaatttcgtgaggtgatggaacagtataggaataagcgtgaacaacgcatagtctttattcacggcaagggtgacggtgtgcttcgtaaagcgttgctggatgagctgaaacggaaatatccggcttgtaagacgcaggatgcttcctttcaggagtatggatttggagctactatggtgacggtaaaataaggtatatgcgatgcaggttggtaaggaaaacaggattcttatcttaatctttctatgtttggcagtggcattgccgggtgcctgtacttataaaggcggcagtggcagagtttttgaaatgcaggaattcgattcttttttcagcactcacagcgattccgtagtgatggcgccgcgctggatgaaagcacaggcattacagagaatggaaaggaccaaagatagtatggtgcggtataattatcttgctgttgccttgaaaacctgtctggctacttccgacttcgactccgcacaacttttgctccggcaagttgaggcgtttgttggcagacagcctttttcgcatcggttggccgatttgcagtccgaatgttttaatataaagggtaatgtctattcgcgaaagggctatatagattctgccgcggtctgcttcaaggaggcctatgaagcaagattgaaaggaacaaaattcgaggtgattcctgatatcctgataaatcttgctgatgctaccaaccatttgggcagaccggatatgggtgctttctggtatagaaaggctctgctgatgtgcgattcgctgaagatgccttacagaaagaaaatctctatttattacggattgtcacaaggatacctggctttgcgcgattacgagcaatgcgactattattcggaacttgcgggcaagaattatgcggatatgtttccggatgagaagcatttctacctgaacaatcgtggaaactcttattattaccggggagattactccacggcaatcggttattttagaaaagtagtagagcttgtgaaagattaccccgatatgtcttgggcgcttaatctgagctatctgaatctgagcgactgctttctgcaactgaataaaaccgattcggtagtcaaatacctggagttatgccagccgttctttgaagaactcggttctactactgctctttattatattgatactcaaaagatagaactggcgttgcagtgcaaggactttgcggaggcaaggcgattgttggcgatgagtaaggcttcgccggaaatagatgcagacatgatacatatccgtaacaagtatttgcagcagttttacgaagaaaccggcaactataggcaagcgtatgattacttgaaagagaataaacgtctggacgactctattcgcaatgagcgtataaggatgcgtacggcagatttgacattgcgctatcagcaggactctaccttgatggcacataaagtgctgttccagaaacaggaaaacgagatgctgatattgaggcagacccgtctcgtgacattagcggttgccgttattgcccttttgattgcagctttcctatttctttataataggaaaaagcgggatctgctgcttgcccaaaaccgaagaacggtctctacacttcgtcttgagaacatccgcaaccgcctgtctcctcattttatattcaacgttctcaatcaggaggtggtaaaccgcaaggaagaggaaaagcaggagttggtatcgttggtgaaactgatgcgtcgaaatctggagctggcggagcagttgtgtgtcaccttaaccgaagaactggactttgtcaagacgtatatcgacttggagcgccgttcgctcggagcaactttccatccggttattgaaatagccggagatgtactgcccgagcaggtctggctaccttccatgatgatacagattccggtggaaaattccgtgaaacacgcattgcgtggcaaggaaggaaagcggaatctgtggattgccgcagatcgtcgggaaggcggtgtttgcatcaggattacggataacggcggcggttaccatccggagagccggaacagaggcactggtacaggtatgaaagtcatcatgcaaacaatccagattttgaatatgaaaaatcaggctgcaattgatatatctgtacataatgtcactttgccgagtggtgaaaccggctgtgaagtaacttttttattaccggacaagtacgattatagaatttaagagtaaccgcttagtggcattttttttattgatagagccggctgcggaagaatagttcgtaaatgcctatttgctgttttgtatggaaacgagaaaatatttatattcgccagaccaaaacatggaatatggacaaatacaaagtcgttatagtagatgatgatgacgtagctcttgaaaatttgagctttgagttgtggaaagatgcccgcttctctttggaaggtactgcacggaatggtaggaaagggaagaagcttattatgaaagtgcaacccgatttgttgtttttggatgtagagatgccggacatgacggggctggaactgttgcaggagatacgcgattatgtatcgtggaatatgagggtcgtattttatacggcgtacgacaaatatatgatacaggctattcgggaagcggcattcgattatctgctgaaacctttcgatgaacgggatttgaaagagattctgacacgctttacccaacaggttgaaaccaccgggcagcgggtatcgtttccggtaggaaatcccatgcataccggacagactttcatcgtttttactccaactaatgatatgcgtgcgttgcgccctgccgagataggatttttccgttattgttccgaacgcaaacagtgggaggtcgtgctgaatgaccagttgcctctggctttgcgccgcggtatgactgccgaacagattacatcgttctctccgtgttttgtgcagatacatcaatcgtatattatcaatatagattatctgatgctcatacgggataacaggtgtgtgctatacccgccttttgataaaattacggagttacttgtctcgaagaaatttaagaaggaattgcaagaacgtttctgtttgtgaaagcaggctgatgattggtatgtgaagttgaatgtccattactctaacaatgttgacaaacagaaaaaaggataccggggacatttgccggtatcctttttctgttttatatgttttccgtacctatgccggaaatacatgttactttacttcaatgcctttgttctgcagtgtaacgttcaaaacttttgcatagtcggaatattgcttttcatccagagttcttttcattaatttcagattaccgtaaatagcgttacgtagcaacttttcctgatttttctttgagtttgtggcacgtgacatctgctcgttaaagtattcgcaaatgttggtaacctctttttgctggttagcggacaatttcaaatatttgctcagcttgcttacattgatgttaccttcccaacttgcagttgttggctggtttcctgctgcgaatgtgctggcagacagacatacggctgccactaatgttaatccaaaacgtttcataatacctacttttttaattgttatacctaaaaactaatctaataaaaatctaatacctactgaaaacagtcgtaagcgtctagcttttctttttacctatgcaaatgtatgattatgttttataacacaaaaatgaaaataaagaaaagtgcaggttttaccttcatttcttgatttatatcaattggtgattgtgaaaatgcacaaaaacagttctgttttgtaatgcaaatgtaatattaaagggtattatgtgttaatgtgatagagaatatgcattataagtatacaaaaagaaatgcttgtagaatggagtggaacgctttcattcttctacaaacattaaatcgctgataatgccatccgatacaaaaatccctttacggctaagacagagacggttgttgtcgtatatttccagatttccgcagtccagatgcggatatgatgtttcctttaattggtttatttgcagatttgacttgaaaacttgtaatgtatccgcagtaatctttgttggcattttatatattacagtttttgccaaagcttgatttacatctttgattatattctcttttgcttctgcataattgttgtatccaaggaacaatgcaggaaacatcaaagagaaaaatactatgattgctgttattggtttcatatctattatttgttgtggataggatgtctcaaattgctcactgattatcagatgccaattctttctcgatttcttcaatagtaggcaaactacctcggaagtctttcggtaaggcgtgccctaattcataatcagagattccgataggcttctgaatatcacgcaaggcatattcagccttgatacggtctttgctcttgcaaagcaacaatccaatcgttcggttatctccctctcgacaaagaatatcatccacggcagaacaataaaaattcaatttgccgatatattccggcatgaactccgtatctttcaattcaatcactaaatatctgtgcaggaatgcattatacattaatatatcgatgtaataatcatcgcccgacacctctatgtgatattgccgccccatgaaggcgaatccagctcccatttctacgagaaatttttctacatgcttcaccaagccgatttccacatcacgctcattgtattggtcggtgaaagtcagcatatcgaatatatacgggtctttgagcatggacttcacatcgtttgcttccggtgctgggagggtttcagtgaagttgtttgctaacgctccgtgcttgccgtagtcgtcaagtttgatggcttcttgcagataacgtgtattccaatgcgatgtaatgctctgaatcatgtaccaataacgtgcccgaatgtccttgacctgttgtaagagaataagattatgcgtccatcccaaatgctttatggggagggtgaaattatatttttctaattgcgcaatcagtgattgcgtaattggagaaactgctcctttcaccattgtaagttcctgattatattcgttgaagaactgtatcatgcactgcatattgcgtacagaaaagccctttatctcggaataatcattcttcaaatccacagccaaccgttgcaaggttttcttgccccaaccgtctgcatcttggctttgctgtaacatttcgccaacatcccaatacatccgaagcatttcttcgttggcggcataaattatccgttgctgggcaatcagtacccgttgcttgattttgcgaagcaatgccgcatagccacggaagttatccgtcaagttatcaaccgtttgtatctttgtgttcttagccatacttttctttaattcgtttacaaagttactatatttattcagttgtgcatcaaatccttacgattataactgattacatttactcaattattatcttctcatcgaaagccctttctgctgttccttttgaagagctatttcactcagttgaaaaagtatactttagctttctacaaacattaaatcgctgataatgccatccgatacaaaaatccctttacggctaagacagagacggttgttgtcgtatatttccagatttccgcagtccagatgcggacgtgccatatcgaagcagtattgccacagttctttgccgaatttctgttctatatcattcaggggcactccccaacgggtacgaatggaagtcatgatgcattcgttatagcaggtggtccggtccaaatgctcctgttcggacaagcgttgattgttttcgatggcatgtatgtatttttccagggaagccacattccattcgcgggtatccgtattgaatgaatgtgccgaagggccacagcccaagtaaggaattcctttccagtaagatgtattgtggcgggaatacatgtccgaacggcagaaattggatatctcgtagtgctcgtagccggcactgccaagcgtatctatcagggtggagaagaatcggacgctgctttcttcgtctacttcgcggatacggtgcgcttgcagcagctcgtaaatgcgagtgccttcttcgtatgtcaggtggtaagcggagatgtgctctacgttgaggctgacggcttgttgtaaatcacgtttccagcgttcatccgtttcgccgggcagtccgtagataaggtcgatgcttatgttgttgaagcctgcatggcggcagtgctttacggcattgacggcttgtgctgcattatggcggcggtttagcagtttcagagtggaatcgtcgaaagtctgtatccccatactgatgcggttgaaaggcaaattttgcagcatggcggcataggcttcggtcaagtcgtcgggattagcttcgagggtaatctcccggcagtgttccattccatagtatttccggatggtttcaaatacttcgcggaaatcctcttcggcaagctgtgagggggttccaccaccgaagtaaatcgtttcgactggctctcccctcagatattctttccgcatctgcaactccttgcacaacgcatggatatagcggcttttcagttcgctgcgggtggtggagtagaaatcgcaatagatgcagcgtgtcttgcaaaagggaatatggatgtagatgcctgccatgagcctgtaaattggttggggtgcaaatatacgatattttctgtttgtagattgagtggttcttcatctttacttgtatttaatattaaaatggatattgaaatgcggaaggactgccgtatggaagccgttcttcttgggcttaggtcagcaatatatacattatcaatattactgtttcaatactgtttgataacttttttgtcatcacttggcatggattactctctatccctctgtggaaaggggatagagtgagtgatgacaactgtgacgacagtgatgacaatctatttgtcgtcactgttttttgcggtatattctccgtttttatatgctaattaccttataatcaatattgaaagtagtgtataatgaattgcgttaatatcggttaaaacattgcattttctttatcatagccgcaaatatggtatagtgtacacgcttttcctattatgcaataggtaaattagagcgactttcttcggcaaatgatgaaaaaagctttttgctttaagttgttattccttgttgtttttgtgattttgatagatgtataatgtagtaaacctacatatataacttcgttttccaattgcgggctctacggttgccagttgcaggctctgcggttgccagttggaaacccggcagcccccaattgcggaacgaggttttccttgatgtttcactttgtttttgtacgtttataataggattatgtactgtgtttttgcggataaacaactgagaaataattttttttgcgagttgtagaattttcttttggctgtttgttctctgtttatttctatagctatttgtacatacatatttcccatgttttctttttttgacttaaaacccggttgggttttgatttgtagtttttatctttgcagcatacaaacctgaataaataatagatatcatgaaaaaacgaattgttaccggattatttactgccctggctgtgatggcaaacgcgcagtcttttaccgaatggcagaatccggaagtgaatgctgtgaaccgtgccccgatgcacaccaattattttgcttacgaatcggaaggcgtggcacagacgggagttaaagagcactcttcccgttttatgaccttaaacggtacttggaaattcttttgggtgaaggatgcagacgcccgccccgttgatttctggaagccggggttcaatgataaaggctggtgcgatatgcctgttcccggtgtttgggagctgaatggctttggagatcctatttacgtgaacgtaggttatgcctggcgcaatcagttcaagaataatccgccgcaagtgcctgttgtggacaatcatgtcggttcataccgccgggagattgtagtgcctgctacctggaaaggtaaggacattatagctcatttcggttcggtgacttccaatatgtacctgtgggtgaacggcaagtatgtaggttacagcgaggatagcaaactggaggcagaattcgacctcacctcttacctgaaaccgggacagaagaacctgatagcttttcaggtgttccgctggtgcgacggtacatatcttgaagatcaggatttcttccgttatagcggagtgggacgcgactgctatctgtatgcccgcgataagaaacgtatcgaggatgtccgtgtcactccggatttggatgctgactacaaaaacggctctttgcgtgtggaagtcagtctgaaaggtaacggtaataccgccttggagctattggatgccgaaggcaagcaggtggcaacggcaactgtacgcggtaacggggttgctgtaatgaaccttgacaatccgcacaaatggacagcggaaactccgtatctttatacattacgtgctgctttgcaaggcagtggcgagattattcccataaaagtgggtttccgtaaaattgaactgaagaatgcgcaggtattggtaaacggcaagcctgtcctgttcaagggagccaaccgtcacgaaatggatcctgattacggttatgtcgtttcccgtgagcgtatgattcaggatattcagattatgaagcagttcaatctgaatgcggtgcgtacctgccactatcccgataataatctgtggtatgacttgtgcgatcaatacggtatttatgtggtagcggaagccaatatcgagtctcacggaatgggatatgaagaatccactcttgccaaacgtgccgattacaagaaagctcatatggagcgtaatcagcataatgtacagcgcagtttcaaccatccgagcatcattttctggtcattgggtaatgaagccggttatgggtctaactttgaagcggcttatgactgggtgaaagcggaagacccgagccgtgccgtgcaatacgaacaggccggaaagacaggaaagaccgatatattctgtccgatgtattatggatataacgattgtctgaaatattgtgaggatgattctatgaacagacctctcattcagtgtgagtatgcgcatgccatgggtaattcggaaggcggtttcaaagaatattgggatatgattcgcaaatatcccaaatatcagggtggtttcatttgggattttgtagaccagtccgttcgttggaccggtaagaacggtaagatgatttatgcctatggcggtgacttcaaccgctttgatgccagcgatgtcaatttctgtaacaatggtcttgtcagtcccgaccgcgtacccaatcctcatatgtacgaggtaggacgtatctatcagaatatctggacaactccggccgatttgcagcgtggagaaattaatgtattcaacgaaaacttcttccgtgacctttcgggctgttatctggagtgggaaatgctgaaagacggcaaggtgatgcgcagcggtcgtgtggatgacctgaatgtagctccgcagcagactgctaaagtcaaactggatttgggaactgtctgccagtgtgccgagtggttgcttaacgtgtcttataaattgaaggaacgtgaaggtctgcttccggcagggcatattgttgctaaagaccaattgacgctgaatgcctatcaggctcctgcaatggatttgaagaacacggaattgagcaacgtggaagtggctgctcccgtgatacaggagaatgactgcaactatcttattgtctccggtgaggctttccgcatggagttcaacaggcataccggttatctgaccaaatacgaagtgaacggtttggatatgattaaggaaggtgaggcgcttacgcccaacttctggcgtgctcctaccgacaatgatttcggcgctaacctgcaacgtaaatatgctgtctggaagaatccggagataaaactgacttctttcagtcagcacaccgagaacggacaagtgattgtggaagcggcttataaactgccggaagcatcggcggagttaagtctgacatatgttatcaacgacagtggtgctgttaaaatcactcaaaagatggttgccgataaaaatgccaaagtagccaacctcttccgtttcggcatgcagatgcctatgccccgcagctttgaaactgtagaatactacggccgcggtccggtggagaactatgcagaccgtaaccattgtaccgacctcggtatctatcgccagagcgtatcggagcagttctatccgtatatccgtccgcaggaaaatggcacaaagacggatatccgctggtggaagatgctggatgcagccggtaacggtatagaggcagttgctgccgctccgttctccgcatcggctttacactatacgattgaatctttggatgaaggctggagcaagcgccaggggcactctcaggaggtggaagaggcggatttgacaaacttctgcattgataaggttcaagccggtttgggatgcgaggatagttggggacgcatagcccgtcctgagtatcaggtgccttatgctgattatgaatttacgtttatcctgactccggtacatcataacatcggaatacaatgaggaaaccggccggaagtaaacgttttccgtagaggtacgttgcattcagccggactcttctgatatgcaaggcatcggactgccattccaaagtcggttatgaggctttcgggggagtccggtgctttgttctgtttacaccttaggagcgatttattttgctccgtccagatacccttttttgaacatattgacaaagagaaagaacagggaaagtagtaacgggccgaatatgacccccataaatccaaaaagggagaggccgataacaactccgaagacagtgatgagcggatgaatatcggccattttcttttgaatgacgaaacgtatcagattatcgagttgcgagatgacaagggaaccgaatatgaccagtccgattgcttggaaccagttgccgataagtgccatgtatacggctatgggaatccataccaatgccgtacctgccatgggtatgatactggcgaaacctgtaagaaagcctgaaaatagaatattgggagcatcgaatatccaatagccgagcatggctactccgccttgtattacggcaagcaaaggtatgccgatggcattggaacggacaatcatattgatttcgtgtactatctcctgtgtgttggtttcattgaaaggaagaagttcgttgacatattgctccattttctttccgcctatcagcatgaagtagaggacaaataccagtacaaacatattgacgatgaagctgctgatgcctcccattaatgtctgtccgatgcgtggaagggatgaaatgaagaatgaaaggctgtttccgcttagtacattgtatccggttctggccttgataatggaggcggcttcttcaaaaggtgcaatgactgcctgcggatcaaggttgatgttctgcaggtttactaccgccagccatactaccaatgccagaggaacgagaaagcataaaatggcttctgccgtaatgacggtggcagctatgctccgttttatctttcgcttttcggacagataaatcatctggcgcctgaccagtatatagatggtcaatgcacccaacagaccgcctaagaagggagtgatttgcctggcgaggataatccccaacccgataatgatggtaatcaatgaatatttccagtattgctcttttgtactcatagaatatgttgtttctttgaaaaagaaacattataagagccggaaatgtttttgaggaatatgcggagattgaattttatccttcgtccagccagccttttccctgacgtacgatttctgcctcgccaccggtgcagtccactactgtggaaccctctatgccacctattccaccgtcgataaccaggtcgacgatattgccgaacttctcatcaatcagttcggggtcggtgcagtattcaatgtcttcgttttcgttatgggggagtgtggcggtcatgataggggcatccagcaggcgtgccagctcccgtattatcggatggtcgggcatacggattcctacttctttccggttgcggaatatcttcggcagacggactgtgccgtttaagataaaggtgaaagcgcccggaaggttgcgcttcattaatttaaacgtgttgttgtcgaacttggcatattcgctgatgctgctcaggtcgtagcagatgatggaaaggttgttcttcttggggtcggtgtttttgagctggcagatacgttctatcgcacgttccttcagtccgtggcagccgatggcatacatggtgtcggtggggtagatgatgatgccgccgtcgttcagaatgtcgattacttgttgcaaatctgccgggttgttgttcttttcataaagtttcagaagcatgatattgtcggacttggtttaaaagtatattacaaaagtaataataagtttcttgaaatcaaatgtataaggatggattttattttgaggagcgctttttgcggagttcttccgccaatcgccattgcaaggctgcttcaacctcttttccggcttgcatcaaagcgtccccgaagagttcgtgagccccggcatgttcgggctttagggtggtggctttgtccaggtcggctatggcaccttcaatgtttccgagtttaagccgcaactttccacggttgtacacggttttgaattcggcggggcgcaagcgtacggcacggttcaggcattcttcggcttcctggtattggttttcgttgaagagggtgacgccttttcgcacccaggcatccgtgtattcgggataaagctccaaagctttgtcataattggcaagggcggcacgggcgtcgcgggcttgggtgatgcactcgttccccatggcataatattcgcgggcgtagtcttgcaggcgcttccgctgtttttccatgtcttgtttcaggcagacgttctccgctttcagccggttgatgatattcagctttttgcggataagacgttgcactacgggtttctcgatgtcataacgggaatggatggccttgaagaattcattgaggaaagtctcgaagtctccctggtcgaaggctttggctgccgctacatattgcacatctgcctgtgcctgcttcaaggcacggtcaatggcctggcggttgttgaagcgttgggcgaatcctacaatttcgggacgtacgaatacatcggcgcggctgacgggctttttcagttgtatcccttccagcgatgtgcaccggctgagtgccacgtatgcttgtccaccggcaaatacgccaccggtgaagtcgatgactacccggctgaaagtcagtccctggcttttatggacagtgatggcccatgccagtcgtacaggatattgggtgaaagttcctaattcctcttcctcaatctgttttttttcttcgttgtatttgtagcggatattccgccaggactcccgtttcacatcacattccttgccgtcgtcggtaatgatgtagagtgtttcttcaatagggtcgaagccgctgacaatgccgattgtaccgtttacccaccggcggtcgaaatcgtttttaatgaaaatgatttgagcgcccggtttgagtaccagttcctgagaggtgggaaggctgctttcgggaaagtcgcccatgatttcaccatgaaacgtaacggggtctcccggaagctcggcaagttttttgtcattgatataatccacattatcgcggcgggtggcgagggtgatgtacatatcggcttcggactgttctatctgtgtaccgtagcgggtattgagcagttgcaggtcggcagcgcctactgtattgctccgtatatggtccagtacgttgacaaataccttgtcggtctgacggtagacggtttgcagttcaatggacacgaggtctatctgtccgaatactcttgcagagaagaaataaggggtaggatagaaacggttcagtatgtcccgttcgtcccctttcactacgggttccaactggaatacatcgcccaccagcaggatttgttttccgccgaaaggctccctgaggttgcgtgagtaaacccgcaaaatacggtcgacggcatcgatgatatctgcccgtaccatggaaatctcgtcgatgataaccagctccaattcttcaaggagcttgcggtgaggtttggtgtatttaaagaattcgtggatgcgtccccgttgtaagctgaaattgggctcatcgggcagcagaggataaaacggcagtttgaagaaactgtgcagcgtgcttccccccgcattgatggcggcaattcccgtaggagccagcacaacgtgtttcttcttggtatgttcgcagatataccggagaaaggtagactttcccgtacccgctttccccgtcaggaaaacagactggcgggtgtactgtatgaggttcaaggcatcttgaaactccttgttctgagtgtcgggtacgaaggacatatgcatagctggctttcaaccctcaactttcgattattccgtattgttttagtgcattggctatgccgttgtcgtcaacgctcgtagtgacataaccggctgcggctttaacatcgtctttggcattgcccatagccactccaatgcctgcatgacgcaacatgctgatatcgtttccaccgtcgccgaaagccatcgtttcttccagacggatgccgaaatgccggattatctcgtcgatgccgcgttgtttggtatttcctttggcagtgacatctacaaatgccggatgccagcgtcccatttcgcagttgggaatggaaggcagcaggagttgttcttcttcaatatcgataaagggcgtcagttggtagtactccttgtccgaatggttgtctgtatagggtttgggtgggatggggtctgttttgagttgtctgttgaatatctctgttacgagttcgcccggctgattgacgcaaatatcgtgttcgcccaccagtatgcaggggagattgcgctcgtgacagaagcttgtcagtgcatcgacttcggctgccggtatgggacttttgtagataacggtatcgtccacaaaacaataggcgccgttcatggtgatgtagccgtctatcagtttccgttcctgcagggcggcgaggttattgatgatgatacgcggacgtccggtagaaatgaatatctgtatgcctttggctttggcggcttccagcgcttcgatggtggaaacgggaatctggtgggtcttgaagctcaccagtgtaccgtcgatgtcaaaaaacagggctttaatcatatatgtctcttttaaattggttggcaaatttactcaaaagcaaagatatttcgtacttttgcgaataattttatatactgtcgttaaactcggaaactcaattaaaatagcttgaaccttatgaagtataattttgatgaagtgattgaacgccgcggtacggactccgtaaaatgggacggcgtggagaatgtgtggggacgtaaagatttgcttcccatgtgggtggccgatatggatttccgtacgccgccttttgtgatggatgcgttgcgccgtcgtctcgaccacgaggttttgggatatacttttgcctgtgaggagtggtatacctctatttgcagttggttgcacaaacgccaccagtgggatgttacgcgtgatatgctgacgtttgttcccggaattgtacgcgggcaggcctttgcgctgcaatgctttaccaaaccgggcgacaaggtcatggtaatgacaccggtgtaccatccttttttcctggtgaccgaacgcttgggacgcgaagtggtctattctccgctcgatttgtacgacgggcattatcatattgattttgagtgtttctctaaggatatccggggctgcaggttgcttatcctttgtaatccccataatccgggcggacgtgtatggacggtcgaagagctgcgtcggatagcggatatttgtaaagagagcgggactatggttgtttccgacgagatacacgcggatcttaccttacccccttataagcatcatcctttcgccacggtgtccgaggctgccgcacagaattctcttacttttatggctcccagcaaggctttcaatatgccgggattgggcagttcgtatgccatagcggtgaatgaggatattcgtcggcgtttccgggagtttatggaagcgggcgagttctgcgaagggcatttatttgcttacatcggcgctgtagctgcctatacgcacggtgaagagtggctggaacaggtactcggatatgtacaggccaatatcgactttacggagaattatctgaaagaacatgttccaggcatcggtatgatacgcccgcaggcctcttatctcgtttttctggattgtagggcattggggctgccgcaagagaagttggcaagactgtttgcggaaaaagctcatctggccctgaatgacgggacgatgttcggcaaaccgggagaaggctttatgcggttgaatgtaggttgtccccgttcggtgctgcaaaaagcgctggaacaactgtccgcagcggttaaggaagagatggcaaagggatagggctggcagaaatacatggttgaatggcggcgttacctatttataatgactgtcgttctttaatatacctatatcaggtgattgcggcatcgggtgcgatgccgtatctttgcaacatcagatttaaagaatgaattagttagtcataattacgtaaccacttttatgaagataaaaggatccccgttttccgatgcgacatcgtgaagcggggatttgttttgtggcggatgtggcggagatacctgccggactgatgaagttccagtggcaggtcaatatgtttttctcctatggggaaacgggttttgcattctttcttccggcaggctgtgtggaagaaaggattataaagtgtctttaatatcgctcagttccaccagcttgttcacaatggcatagatggtgaggcctgcgggagaatgtatctgcaacttgcgtgcaatgttgcggcggtgggtgatgacggtatggatagacagatacagtttgtcggcaatcgccttgttggtcatgccttttacgacgcaggtaatgatttccttttcacgttggctgagcgtttcctgttcgctgtccttctcatcttcttcttcggtatggagaagacggttgatttttgtggtaatcatttcgatatcgtcacaaatggcgatgctttcgtcatactctttcagcgcgttattgtcgatgacggaacataccaatgcgatgtatttgatactgtttccgttatggtttgtcttgaaagagggcaggtcgaaccaaccgccgaaagtagggtttacgattacaatatcgggagtgtgcagatgtataaagttctgcaatgcttccggtgacgacacctcgatggggtgcgcattcagattgggaatgcgtttgagcactgccgcaagaccacttcgtacaatgaccgaagtttctgcaacaactattttcagagaaatattattgttcatctttcagccttttttctatttgcgctacggcgggaacaaacatatagtcttctacctggcaatgcgatgcaaggtcctgttcgcaattgaagatgtcgaaaaggacggcgttcagaagattgttgttctctttttccggatagtacttgatgatgatgtttttcagttccttcagcttggtgtctatctggttgtgcttgctggcgaaagtggcgatgttgtacacatcggacggtttgccttgcagcagttgctccacgtaagtgaagacggctttgttttcgtattccatgtggcggcg

SEQ ID NO: 4095 - DNA, 23058 bp, Unknown
  gut microbiota DNA sequence
tccgccaactcgcttttcctattataaaatttcatatttccatttttgttacggctgtaactgttacagcggttacaaagatataagaaattatctatatatactctattttttcatttttccaaaagatttatgcgaattaccgtatttcattcttggggtatctatttctagtatctccatattttttaccacatccattcacttttcctctaccattcctctccccacttcggaatacattctgaaagggtggcatgtcaaaattaaaattcgtttactttttgtttctttttaggcacaaaatacgcggatttcacggaaaaagaataaaaaaatctgtgccttccgtgtaatccgcgttatcctttagatttgcgtgcctaaaaaacatcaagtgtattttaacacccttctgtcattgcgtaatagtatctatttacttagaactcgcttgtaaagtggaacttgatatgcttgaaatccatctgcgccatctgcagtacgtagccgctgtctgcaaggaacacatccctgccttcacggtctttcgccatatactggtacttgcgtttcttgaacgcttccagttcggcaaggtcatcactttcaatccagcaggccttgtaaagactcaacggctcccaacggcatttggcactgtactcattttccagacggtattggattacctcgaactgcaactgccctaccgtaccgataatcttgcgtccgttaaactggttgacaaacaactgcgctacaccttcgtccatcaactggtcgatacctttggcaagctgcttctgtttcatcgggtcggcattctcgatatacttgaacatctcgggcgagaagctcggcagtccgcggaagtgaagcatctcaccctccgtcagcgtatcgccgattttgaacgtaccgttgtccggcaaaccgatgatatctcccgcccacgcctcatcgatggtagtcttgcgctgcgccataaactgcgtaggcgatgagaaacgcatggtcttgccatgacgcacatgcaggtagggcgtattacgggtgaacttaccggaacatatcttgcaaaatgcgatacatgaacggtggttcgggtcgatattggcggtaatcttaaagataaagcctgtgaatttaggctcttccggctctacttcgcgttcctccgccttcacgggacggggactgggagcaatctccacaaagcagtccagcaactcctgcacaccgaagttgttcagggcggagccgaagaacacgggggccagttcacctttcagatactcctctacctgaaattcgggatacacaccgtctatcagttccagttcgccgcgcagcttgtccgccagtgccgaaccgatctgattatccagttcttccgtatttatatctacttccaccttttccgtcaccacctgcttggaaggctggtaaagattgagattgcgttcatagatgttgtaaactcccttgaaacggggaccgctctcgataggccacgtcagcgggcggacgtggatggagagttcctcctccagctcatccagcaagtcgaacgggtcttttgcctcacggtccatcttattgatgaagataatcaccggagtgttgcgcatgcggcagacttccatcagcttgcgtgtctgtgtttccacacctttcgcaccgtccaccacgatgataacgctgtccaccgccgtcagtgtgcggtaagtatcttcggcaaagtcctggtgacccggagtatcgaggatattgattttataatcgtgatagtcgaactccattacggaagtggttacggagataccacgctgtttttcaatatccatccagtctgacgttgccgtcttctttatcttgttgctctttaccgcacccgccacctgaatctgaccgccaaacagcagcagcttttcagtcaacgatgtcttaccggcgtccggatgggcgataatcgcaaaggttcgtcttctcgctatttcttgattacttgccatatatataaggtataatattcaaataagtattattttgcttactgcgccagcctatcgatgcagacctgcaagctatcctcccaatggggaatctcgataccgaaagtctttttaatcttcgtcttatccaatacggaatactgaggacgcggagctttggccggatactcgtccgtatgcaacgggctgactttacacgaggtaatgcccgccatgcggtgaatggccaccgtaaaatcataccaggagcatactccctcgttactgaaatgataaataccagggacgatgccctgattgacagccgcaaagatggcacgtgccaaatcgttggcataagtcggcgtaccgatttggtcgaaaacaactcccaaccgctcgcgttcattacccagacgaatcatggtctttacaaaattattgccgtaaatggaatataaccatgccgtacggataaccatcgcacggctgcacttctccataacagcctgctcacctgccagttttgtagagccgtaaacggagttggggcaaggagtgacttcttccgtataaggaatatggccgattccgtcgaacacgtaatccgtagagacctgtatcatggcagcaccgcaagcctcggcggcggcagccagatagccgggagctatatggttcagtttatcgcaaagttcgggattgtcttctgccttgtccactgccgtataagcggcacagttcacaataacatccacccgattatcggtcacgaatgcacgtatggcctgttcatcacatatatccagttcctgcacatctgtaaaaaagtaagtgtgttgctgattttcagcagagagcacccgcatctcattgccaagctgaccgttggcaccggttactaatatattcatcttaacagttactatttattccctatggttatgatacctcttttatcttcaacacacaggtacgttgactattttcagttttctatttattacccgacttattaccctgcttcatgcagacattccgtcagtcattatccagtttcaactcgcctttcctctctttgtcgtaataattggcaagcagggaaagaaaactgctgatggcttctatcgccttggcagtgccctggctgatttcctttttctgcaaacgcagcagcagtatgccgtaaagcgcctcaaaacaggtctccaattcggattcttccgtttgtccgctcttttgccgcaattccacaataaaaggcaacgctttgaaatatgccgcattataaaagggatacttcgtggaagccagcaaatcggcatgcaggtccgtaaggttgcggataacgttgcggttaatctgcaaatgccctttctccgtcaccccctcggcacgcatcatatcggcaagattgccgtaccactcctccagagccgcatgttcttcggcaggataacgggagatgacattgctgcgaatcaggtctatatcgcacttgttagcacgaagcaaatcctccacttgccacatatatataaggtattcggcaatattcttctctttcagttgctgtgaaatcttcacgttgagatgatttatgatttataatttatattcttcaccaagataccgcggtccgctcccgtaactaatagagcgattcgcccatcagcgtaaacaccagtccgaatgcagataccaccatgacaatgccgccgataatacggttcaatatccaaatgccgcgtaaattgaattgcgtacggaccttgttgacaaaaaaggtaattccaaaccaccacgtcaatgctcccaaagcaatggcaagataccccgtaacggcctcaaagaccaacacgccttcacttacaaaagcaaagcgcgcaaaaaggcctacaaaaagaaatatgataagcggattggagagagtgacagcgaacgctgtgataaaattgtgaaagtaagaccccttgctggtggataccggacgaatggactgcaccggattactgcggaatgtatagataccgaatatcagcagcaggatactcccgaacagttgcagatagaagatattcttgttgacataatcgaatacgaaactcattccgtagcccgtcagcaaagcataggcaatatcactcagcgaggcgcctataccggtcacaaaaccataccaacgccctttgttcaaagtacgctgaatacacaatactcctacggggcccaacggtgcagatacgataacacctattatgaaccctttccataatatgtcaagtatggtctctatctgaatcatgcctgcaaatatcggacttttttatgagacaaccgaatagagttaacgttttttcgtcagaaaaggagtttagatacaaagtcaatcatccggcggggcggacttccctatttcactgaagttttttatttccttttctttctcccacccgacgattttctttatctttgcgccaaaagcaaaggtaaactgcatcccggcataaaaaaacagacaagttcgttttattctgcctccggtttgcactatctttgcacccaggaagaaaagagaagaagctaactgacagacaatagaatagtttcaatcacaaagtagcaaatcgtaaactcttaaataaaagtatgattctttttttcagaacaccatccaagaacgtgattgccgtagaatgcgaccacgaacttacccaggcagacagcgacaaactctgctggctttttggagaagccacccccgaaagtgaagacaacctgaaaggacatttcgtaggtccgcgccgcgagatgattactccctggagtaccaatgctgtggaaatcacccagaatatgggtctgaacggtatcacccgtatcgaagaatatttccctgtgaaagatgaaaacgcagaccacgacccgatgctgcaacgtatgtataaaggtctggaccaaaacgtatttacgaccaaccgccagccggaaccgattatccacatcgatgacctggaagcatacaacgaaaaagaaggtctggcgctctccaaagaagagatggactacctcaagaaagtggagaaagacctgggacgtccgctaaccgactccgaggtattcggttttgcgcaaatcaactccgagcactgccgtcacaaaattttcggcggcacattcatcattgacggagtggagcaggaatcttccctcttccagatgattaaaaagaccactcaggaaaatccgaacaagattatatcggcctataaagataatgttgcctttgccgaaggtccggttatcgagcagtttgccccggcagaccactccaagcccgacttcttccagataaaggacatcaagagtgttatctccctgaaagccgaaacccacaacttccctaccaccgtagagcctttcaacggtgcatctaccggtacgggcggtgaaatccgcgaccgtatgggcggcggtaaaggctcatggcctattgccggaacagccgtatacatgacttcctacccccgcacggacgaggaccgtccctgggaagagatacttccggtgcgcaaatggctgtaccagactcccgaacaaatcctgatcaaggcatccaacggcgccagcgatttcggaaacaagttcggccagccgctgatttgcggttccgtactcacctttgaacacaaagagaaagatgaggtgtacggttacgacaaagtcatcatgcttgctggcggtgtgggatacggtacacaacgcgactgcctgaaaggcgctcccgaagccggcaacaaggttgtcgtgatcggtggcgacaactaccgcatcggtttgggcggcggttccgtgtcatccgtagatacgggacgctacagcagcggcatcgagctgaatgccgtacagcgtgccaatgcagagatgcagaaacgtgcttacaacgtagtacgtgcgctttgcgaagaagacaccaacccggtggtttccatccacgaccacggttctgccggacatgtaaactgcctgtccgagctggtagaagagtgcggcggacttatcgacatgagcaagctgcctatcggcgacaagactttgtctgccaaagaaatcatagccaacgaaagtcaggagcgcatgggtctgctgattcaggaagaggccatcgaacacgtacgtaaggtagccgaacgcgaacgcgctccgatgtatgtagtcggtgaaaccaccggcgaccaccgcttcgctttccagcaagccgacggcgtacgcccgttcgaccttgccgtagaacagatgttcggctcttcacccaaaacctatatggtggacaagaccgtagaacgtcattatgaaatgccggaatacgaattgtcgcaactgcacgaataccttaccaacgtactccaactggaagccgttgcctgcaaagactggttgacaaacaaggtagaccgttccgtaacaggtaagattgcccgccagcaatgccagggcgaactccagttgccgttgagcgactgcggtgtcgtagctttggactatcgcggcgaaaaaggtatcgcaacttctttgggacatgctccgcaggcagcccttgccgacccggcagcgggttctatcctctccgtcagcgaagcgttgaccaacctgatctgggctccgcttgccgaaggtctggacagcgtgtccctgtcagccaactggatgtggccgtgccgctcgcaagagggtgaggacgcacgtctttatacggcagtaaaggcattgagcgacttctgctgcgccctgcaaatcaatgttcccacgggtaaggactctttgtccatgacgcagaaataccccgacggcagcaaagtcatcgctccgggtacggttattgtatctgcaggcggcgaggtttcagatgtgaagaaagtggtatctcccgtgcttgtcaacgatgagaaaaccacgctgtaccatatcgacttcagtttcgacaagctgaagctgggcggctccgccttcgcacagtcattgggtaaagtaggcgacgaagtaccttgcgtacaagatgccgaatacttccgtgacgctttcctggctgtacaggaattaatcaacaagggacttgttcttgccggacacgatatttcggccggcggtcttatcactactttgctcgaaatgtgcttcgccaatgtagagggcggtatggaaatcgacctcgacaagatgaaagagcaggacctcgtcaagatattgtttgccgagaacccgggtatcgttatccaggtgagcaacaagcataaggaagaagtcaagaagatactggaagatgccggtgtaggctatatcaaaatcggtaagccgaccgacgaacgtcatattctcgtaagcaaagacggcgctacctaccagttcggtgtggactacatgcgcgatgtctggtactcttcatcgtatctgctggaccgcaaacagtccatgaacgggtgcgctaagaagcgtttcgagaactacaagatgcagccgctggatttggtgttccggcctgaattcaagggtaaactttcgcaatacggcctcgacccgaaccgtcgtaccccgaccggtatccgtgccgccattatccgcgaaaagggaaccaacggcgaacgcgaaatggcctattcactctatcttgccggcttcgatgtgaaagacgtaaccatgaccgacctcatcagcggacgtgaaacgctggaagacgtaaacatggtggtttattgcggcggcttctccaactccgacgtattgggttccgccaaaggttgggcaggcgctttcctcttcaacccgaaagccaaagaggcgctcgacaagttctatgcacgcgaagacacgctgtctctcggcgtatgcaacggttgccagcttatgatggaattaggcctcatcactcccgaccacgaaaagaagggaaagatgctgcataatgattcccataaattcgaatcgacctttatcggcctgactatccctaccaaccgcagcgtaatgttcggctctttgagtggcagcaagctcggtatctgggtggcacacggagaaggaaaattctcattgccttacgatgaggacaagtacaatgtagtggcaaaatatacctacgacgaatatccgggcaatccgaacggctccgactactccgttgcggcaatagccagcaccgacggacgccacctggccatcatgcctcacctggaacgctccatcttcccgtggcagaacggctactatccgcaagaccgcgttcacagcgaccaggttaccccatggatagaggcatttgtcaacgcacgcaagtgggtggaagaaaagactgggaaataaccacgtgtaaaactgtaatgcaataatggataatgtgccaaagactctgcttttgcaggagctttggcacatttcttatatctccacaccgccttccatcctgccgctttaccactctgtatttccttttttgcatatctcaaacattttcactacttttgtgttaatattaaatccccccaactttatcaaactcaaataccaaaatcggctaatatgaaaaagcatttctttttctttcttttccttatatcatcctttctggctgccgctcagacatataactacatcggcgtagaggatggtttgagcaacaggcgggtatatgcgattcaaaaagggcctaaaggttacatgtggttcctcacgcacgacggcatcgaccgttataacggaaaggaattcaagcactataaactcatggacggcgaagatgaaatcaactccatgatgaacctcaactggctgtattcggattcgcagggaaggctatgggaaataggcaagcaaggacgcgtgttctgttatgaaagcaagcacgaccgtttccaactggtatataaattgcccaaaagcgagacggaaggcctgcacactcccgtcagctatggatttatcgatgataataatataatatggctctgcaaccaaagaaacatttacctatataacagcctgacaaaagcaaccgttgtcataaagaatgaaatcaacgaaagcattaccgacatcgagcagatagacgagacccactattttataggcacggatgtaggcgtgcattatgccgaactgaaaaacaatgtgcttgcgctaagcccttgcgagaaactggatacgctaagactgcaaatcaacgagctgttctttcataaaggcagccgcaaaatctttatcggaacctttcaaagaggtatctatgtatacgatctgaaccttcataaggcgttccacatcaaatccggcctgatagatgtcagcatcaaccgtatctgtactttcggtgaaaaagacatattgatagcgacagacggtgcaggtgtctacaagatggatgtggacacttaccggtccgaaccgtacatcgtggccgacttcaaccgatataacgccatgaacggcaatacaatctacgacatatacgtggataacgagcaacgcatctggatggcgaactatcctatcggcattaccgtacgcaacaaccggtacagcgattacaaatggataaagcattccatcggcaacaaacagtccctcatcaacgatcaggtaaacgccgttatggaagacgaagagggcgacctatggtatgccaccaacaacggcatcagcctgtatgagcatcgtacccaacaatggcattcgttcttgagcgtctacgataaggagcagaagaaccagagccatacattcatgtctctgtgcgaagtcagtcccgacattatctgggtaggcggctacagttccggcatctaccagatagataagaaaaagcgttctgtcagctttttcacgcccgccttgttcggcggcgcaacgattcgtcccgacaagtacatccgttccattaccaaagacagagacggttatatttggtcggggggatactacaacctgaaaagaatagacctgaaacataaaaacattgaatcgatacccgggctggaagttataacggacatcaaggagcgggacgaaaaatatatgtggataggtacagccaacggcttatacctactggagaaagcaaccggcaaataccggtacataacgctgccgatagagtcctcctatatatactccctgtatcaggcccccaacggactgctttatatcggcacaaacaattccggtctgctgatttacgaccctgccaggcagaactttgaacactatcataaagataactgcgcacttatctccaacaatatctatacaattctgtcagacggaaaagatgatattctcttaagtacggaatacggactgagcggtttctacctcaaagaaaaaagattccataattggaccaaagagcagggactgcattccgaccatttcaatgccaactccggaacactgcgcaagaacgggaatgccattttcggaagtaccgacggagccatagaatttccaagagacatggtattgccccgcgagtacagttcgcgcatgatattcagcgatttgcgcattttctaccaaacagtataccccaaagaaggttctcctttggttttggatatcgacgaaaccaaaagcctgaaactgaaatacagccagaatatattttcgcttcaggtatcgtccatcaattatgactatccttccctcatcctgtattcgtggaaactggaaggattctatgacggctggagccgtccgggagaggaaaatgtcatccggttcaccaatctgaatcccggtcattacaccctgcgtgtccgcgccatatccagtgaagaccggcgtatggtcttggaagagcgcagcatagatattattgtcgagcaacccatctggctcagcatatgggcattattgctgtatgcgcttatccttgttgcaattgcaagcatcgcattgcgcataatcgtattgcgcaagcaacgaaagatatccgatgacaagatccgtttctttgtcaacaccgcgcatgacatccgtactccgctgacgctcatcaaagcaccgttggaagaactctccgaccgtgagaaactaagcaaggaaggaacggacaacctcagcacggcgcttcgcaacgtcaacgccctgctacgtctcacaaccaacctcataaactttgaacgcgcggatacctattcgaacaatttctacgtatccgaatacgaactgggagcttatatgaccgacattgtcaatgttttccgttcatacgcttccgtaaagcacatcgacctgacttacgaaagcaacttccgctatctgaatgcctggctggataaggataagatggactccattttgaagaatatcatatccaatgcactgaaatacacgcccgaaggcggaagcgtgcatgtctatgcttacgaaacggaagatacctggaacgtggaagtcagtgacacggggggtatcggcattccactggacgagcagaaaaagctgttcaagatgcacttccgcggcagcaatgccatcaattccaaagtaaccggcagcggcatcggactgcttcttgtatggaaactcgtgcatatgcataaaggaaagctcaacttcaccagcaccgaaggaaaaggctcctgcatcaaagtatctttccctaaaggcgagaaacgctaccgcaaggccatacaccgtcctgctcccaccaaagagcaggaacagaacaatgaaccggaacaaatcacctctccggaaaagggcactccggacacccctgccgtcaacacgcccatagagggttacgaacatgcccaacagcaaactcaggatgccggtaaccgccagaaaatactgatagtagaggataacgacgaactgagggaatacctgcggcgtacgctggcggagaactaccatgtacaagtatgttccaacggaaaatcagcgctttgtatcgtgaaggagtatttccccgacctgattatctcggacatcatgatgcccgaaatgcggggtgatgaactgtgccagaaagtgaagaatgacattgatacctcgcacatacccgttatcctgcttacggccctcaatacggacaaaaacatcattgacgggctgcaaaccggagcggatgaatacgtcgtgaaaccgtttaacatcggaatcctgcgcgccaccattgccaatctgcttgccaaccgtgccttattgcgccacagatacggcaatctggagctgaacgatgatacccacaatacggaatgcatcaactgttctacggatttggactggaaattcattgccagcatcaagaagaatgtagaggacaacatggacaatccgagcttcacgattgatgtgctttgcaccctgctcaacatgagccgtaccagtttctacaacaagttaaaggcactgaccgaccaggcgccgggagattatgtacggttgatacgcctgaaacgtgccatgcaactgctgaaggaacaaaagtacaccatcaccgaagttgccgaaatgaccggtttcagcgatgccaaatacttccgtgaagtctttaagaaacactttaatatcagtccgagccaatatgcaaaagaagaaggaaatattggagagggcaaacaataaaccgaattacagcattacacatgatatgacgaatatatataccgaagcattttccattttctttaaaatcggagcattcaccattggcggcggctatgccatggttccattgattgaggacgaaatcgtaacgaaacgtcggtggatagccaaagaggattttatagacctgcttgccatcgcccagtcggcaccgggcatccttgcggtcaacatatccatattcataggctaccgcctgcgtggaatacggggaagcatcgttaccgccctagggacgatactaccttctttcctcattatccttgccatagccttgtttttccataacttcaaagacaatgtctacgtagagcgtatcttcaagggtatccgtccggcagttgtagcactgatagccgctccgactttcagtatggccaaatccgccaaaatcaaccgctacacgatatggattcctattgtctcggctctgcttatctggttattgggcttctcccccatctggattatcattgctgccggtataggcggatacctgttcggaaggctgcgtttcccgaaaagcaacagttaaaaattaaacaaaaccgccccacttatcgctaatcactaaccactaatcactacatcatgcttttcctccatctattctacacattctttaaaatcggcctgttcggttttggcggcggatacgccatgctgtccatgatacaaggtgaggtagtcacccgttacggctggctcacaccgcaggagtttaccgacatcgtagcaatcagccagatgactcccggtcctatcggcatcaattcggcaacctatgtaggctattccacgatagccgaacaatacggcacgagcatgggagtgcttgggtcttgcgtagccactttcgccgtagtgctgccttcgttcatcctgatgctcaccatcagcaaattctttctgaaatatcagaagcacccggcagtagaagccgtattcagcggacttcgcccggcggtagtaggactgctggcatcggctgcgctggtgctgatgaacacggagaacttcagttcgccccaggaagatatgtactctttcatcatcagtatcatcatcttccttgcagctttcatcggaacaagaaaatataaggtcaatcccatactgatgattatagtatgcggaatagcaggactgatactttattgatagttgacagttgattcctatagcttcactttcttgcttacagacttggattcgttgtgcaggcggtcgagcgccgtaaccacataacggtacttcgtcttgccatcctcataaggcaacttatagaaagtgttgcgcgtaacagccacaatgtgcgaagggtcgtcgatgtccaccttctctttcgaagcaaaacggtagacaacatactgtaccggacggttcatttcatccttaaacttcggagcggtccagaaaaggatgtaaccgtcggcagtccacaccggttttaccttgcgcaccttatccggggcttcattgtccataaagtcaaatacgggcggcaaagccggatacttatgatactcggcaaccagcgcatcgcggtatttgccggcattctccactactgcgctggcaggccattggcaactgccgccgattgtctgatatgcccgctgcaaagccatcttgcggggaagctgattgacggacggattcttcgggtcggcattctgtaccgtattcattacagactggccgataaacaaaggacggttctccgtatgctttgcccaccacttcaccaaagtttcatagtcggcagccggatgtcctatctgccaatacacttgcggtatgttataatcaatccagcctttgcgtgcccacagaagtacgtcggcatacaaatcatcataattctgcaaaccgtttgtggcgctgcccagcgggtcgctgctctgattgcggtagataccgaaaggactcacgccgaacttcacccagggtttcagtccgcggaccgtctcatgtattttctgaatgagaatattcacattactgcggcgccagtccgccttattgctgaaaccgccgccatagcgtgcaaagctggcatcatccgggaaatcctttcccttgataggatagggatagaaataatcgtccatgtgaatggcatccacatcatagcgcgacacgatgtcggttatcaccttacagatatgattgcggctttcgggaagcgcagggtcgaagtaaagctggtcgccatacgtcacgaaccactccggatgcgaattataaatatggatgggcgaaagctcgttcttcaacgaagtctttacccgatacggattaatccaggcatgaaactccatgctccgcttgtggcactcctcaatcataaactgcatagggtcccaataaggttccggggctttgccctgcacacctgttaggaaacggctccacggttcgtactgcgaagcatacaacgcatcggcttcgggacgcacctgaaaaataatggcattgatacctgcaccttgcagggagttcaactgatttatcaagatttgcttcaaccggtcggtcggtatgccacggaactgtccgtttaccgcctgaatccatgcagcacgaaattcacgtttaggatgtgcggatgtggatacgaactgtgcctgtacagccagtgaaaggcagcagaaagccagtaacaagaggagatttctcactttcattttattctttttaaatattgtgtcgcaaagataatgattatctttgcaactcaattcattttcaatcgtcttatggcaaaaaatacatctatcatcataaagggggcacgcgtcaataatctgaaaaatattgatgtggaaattccccgcaacaagctggtcgtcataaccggactgtccggttccggcaagtcctcgctcgcattcgatacactctatgccgaggggcaacggcgctatgtggaaagcctcagcagttacgcccgccagtttttgggacgtatgagtaagcccgaatgcgatttcatcaagggtatcccccctgccattgccatcgagcagaaagtaagcagccgcaatccccgttccaccgtaggcacttctaccgaaatctacgaatacctgcgcctgctctacgcccgtgtgggacggactttcagtccggtcagcggacaggaggtaaagaaacactccaccgaggacatcgtgaactgcatgctccggcaacctgagggaacacgctataccgtgctcaccccgatattgctccgcgaaggacgtaccttgcagcagcaactggaaatagacttgaagcaagggttcaaccggttggaagtgaacggagaaatggtgcgcattgacgagtatcagcctaaagacggtgacaccgtattcctattggtagaccgcatgacggtttccggcgagaaagatgccgtcagccgcctcaccgactccgccgaaaccgccatgtacgagggtgacggagcctgcctgctgcgtttctaccaaccggacggcactaccagcctgtaccgtttcagtaccaagttcgaggcggacggcatcacgtttgaagagcccaacgaccagatgttctcgttcaactcccccatcggcgcatgtccggaatgcgaaggcttcggacgtgtcgtgggcatcgacgaacatctcgtcatccccaaccgctccctttccgtatacgacggcgccgtggtgtgctggcgcggcgagaaaatgggcgaatggaaagacatggtgatacgcggtgcggagaaagccggattccccattttcactccctactaccagttgacagacgaacaacgccgcatgctgtgggacggaacccgctacttcgagggtatcaatgctttctttaaaatgttgcaggaaaaccagtacaagatacaataccgcgttatgctggcgcgttatcgcggcaaaaccctttgtcccaaatgccacggtacgaggctgaagcccgaagccggttatgtacgggtgggcggacgcagcatctccgaactggtagacctgcccattaccgaactgaaagtgttcttcgacaacctgaagctggacaagcatgatgccgacattgcccgccgcatccttatagaaatcaacaaccgcatccgcttcctgctggatgtaggtttgggatacctcaccctgaaccgcctcagcaattcgctgtccggcggtgaaagccagcgtatcaatctggcaacttccctgggaagcagtcttgtgggcagtctctacattttggacgaaccgagcatcggacttcacagccgcgacacggacaagctgatacacgtcttgcgccaactgcaacagttgggcaatacggtggtcgtggtggaacatgacgaagaaatcatccgggcagccgattatatcatcgacatcggtcccaaggccggacgtctgggcggcgaggttgtctaccagggagacatgaaggatttgcaaaaagacagcaacagctacaccgtgcgttatcttctgggcgaggaaaccattcccgtgcccgaaagccgtcgcccgtggaaccagtatattgaaatcacaggcgcccgcgagaacaatctgaaaggcgtggacgtacgctttccgctcaatgtaatgaccgtagtcaccggcgtatcgggttccggtaaaagcacactggtgcgcgatatcttcttccgcgccctcaaacgcgaactggacgaatgcaccgaccgaccgggcgagtttgcctctatcagcggagacctgcgaaatctgcgcaacgtagagtttgtagaccagaaccccatcggcaagtcctcgcgttccaaccccgtaacctacataaaggcctacgacgaaatacgcaaactttgggcagaacaacccctcgccaaacaaatgggctataccgccggccatttcagcttcaacagtgaaggcggccgttgcgaggagtgcaagggcgaaggaaccatcaccgtagagatgcagttcatggcggaccttgtgctggagtgcgaatcctgccacggcaaacgcttcaaggcagatacgctggaagtgaaattccatgatgtcaatatctacgatgtactggaaatgaccgttaaccaagccattgaattcttcaccgcacacggacagaagaaaatcgtgaagcgcctgcaaccgctgcaagatgtggggctgggatatatcaaactcggccaatcgtcctctaccctctccggcggtgagaaccagcgcgtaaaactggcctactacctcagtatggagaaagccgaccctacgctattcatcttcgacgagcctaccaccggcctgcacttccacgacatccgcaaactgttggaagcctttgatgcactgatacgccgcggccattccatcgttatcatcgagcataatatggacgtagtgaagtgtgccgaccatgttatagacctcggccccgaaggcggagacaaaggcggctatatcgtggcaaccggtacaccggaagaagtggcggcatgtgcggcaagctacacagggcagttcctgaaggaaaagttgactgctgcaaaataaatagataagaatgtatcaaaaactaacaagagaactttgaaggactgtattgtataaaacgagggtataattcaaaatacacttgataatttcttttaggcacggattacatgaatctcacagagaaagaataaagtaaatctggtaaatctgcataatccgtgcctaaaaagaaataaatggtaagtatttctctattttggtacactctctgaatatccggaaaatatcacagtgaatcacttgtgaacgcaacgtacggaaaagccgtatgcccgactgttattgcctacaggatatacagaactattactgaaatacaaaagtactccattacctcccgatgtagatgctgaccaatatccaccgttattacctgtactctgaagaacagccgtacctgaattacgactaccggcggctggataccaagcagttccgctatcgtctgttaattcatacaaacgaccggcagttcccacttgatccggcagtgcagctttccaatcaaaaggtcctatttccgaatcataagaacctgcattctttacaccactgaaatttccatcgccaaatcctgcccaagcattagtcaaagcaccataaccggaaacagtacccggcaatgaccaaccggcaggggtaggactaaagacatctaaatccgatcctgtccaaagattattatcctgcttagtccaatcaccaccgccattcttaaaatagaaagtagtaggattcattactgcatctttcagcttattttcaaagttgtcatttgctacgggagaaggaaaggaataggtttcattattcgcatcataaaccgttaacattgtattagtaccatctcctgaagcaggaaacgggtctttacgtccccattgatattgaagtccatacaacttaactgcttcttccgttgtctgaagctgtccggttattttcccgctataaacagcaccgagatttctatccataatcccccgataattaccgcttgtaaatgagataccttcatatttatgtacctctccgttttctactattccgttaattgccggtttgtaatccgttaaccaaatatgccaagaccacaaaatatcaccgttcttgaaaatctccccatcttccgtcgcactcaatgcaatcactgcattgttaccattctctacaccctctccaaaaattaatttggcaaaataattcttcatacccggtgcattatccggagatatccaagagtcatccggcatcgtgcctacgatattgctattctcgtggttcattgttttccataatgtcacaagttcccatttaccgccacgaatcaccttgtccagttcatccacgtaagcctttccgtcattcaacgatttctcaatgtaagtccaaccttttcgtacctgtgacagaggaatatagaaatcaccctcattatcctctacatccaccatatagcagttagcaggagtttgggctatgtccaccaacttctcgtttccttcattcttcacaatagacgggtcaaagagaggaatcaccttgatattggttaccgcaccgtcttccgtattgtcaccgtaaatataggtagtgacattatactgtgcattggcacggatgttcatgtcaccggcattgttaccgcccaagtatatcgtatactccaccttgcgcataatccccgagttggtagtataggtaagatctacgagcaggtaagtgagtccctcagcacttcctataacctcagccagtttggctgcattgctcttatccttgtagttggtaattccatcataactgccgcgtgcattctccggcatatacgctacgaaagtcgccatatcggtattgccgctcatactcttttcatcgttagcatcgaaacttacgaaacctttctccgcataagtcggataaggctgttgtacatccggccaaatgccgttcaatccgcccacaggcaacgccggacgattcttcttgcttggcaaagtcacttccaacggcacattatgcaaactgatgccattgaccacgacagaaggcatctctccatccgcaagcctgaaattatcagtgttcacggtaaagtttatttttgccaatgcacgagtgagtgatacattgatttgattggtcataccatccacgattccatcggtataaacaccgtacatagggatgtaaccggtacttaccaaagcatccttactctcataagtcggcttatagttcaaaaactccgtataagtagtcacgccctgcccgtttccggcttcctcttccgatatcaaagccggccagtttcccgtcatggcttttacattggcaagaaaacagatgatattctcattgccgttctccacaaaagtaccggtaaaggggtccgtagtaccttttggcagtgaaggaatcccttccaccgtcacagcctgagcaaaagacaaaccttccagttgtatcgttttcttcagtctgccctccttaaatacgagtacggtcatatctttgataccgctttccattaccgaacgggtatttacttgcgtatagtccggagcagcaaaacagattctcaaagcagtgctgccattgttcagtgcagaccgggaagtctccatatcttctgtgcacgatactgcaagacatacggccattgtcaagaaaaccatctgtttgattcttgttgtaaacttgttcatattagtattgattttaaattagatatctgttccacttacctgtcttgtaacatccgcaggatacctgccttcctcggtctgccacttcacgcctgtaaaattatcgagggtcacatacgttcctccatcattatcgaaatcctcatacttgccttcggtacttccccatgacgtagtgtcaaaaccatccacctcgattaacaaacggttttcagtaccatacgctccttctacgatccgataggcaatgctgttccagccgcctacactcaccagcacccgatttccggtatcgtaacctccctcgacggccgtccatgaagcagtatcccaacggtctatgccaagcaacagatcaatcctgccttcttccgtatcagggtctatgccgaactctacaacaaaagtataacggtagccgggattaaatgccggaagctgcacattacgggcattaagcgccacaccgccaccgtctatcaacagattgaaagtaatatccattgtattatgcccttcggaaacacttttcaatggacaaggcaatacataaccgtctccggaacgtgctacattcttatccggcttattctcatcataaggagcatttacttccacagcttcggtttgcacggtccgtactgcgtacgaagtgttgtatccgccggtctgcactacatacgccactttgcgtggagcactgcccccgacaagaggcaggttggcactcgacggcagacaataattgaacacgatgccgtctatccccaagcagacctgcctcttgttccccttcaacaacatatcgaacacctcctgttgcaaccgcgcttccactttgacagccgcacctaaatgaggcaggtttccattcctatccggttctccgtcggaaccatcgccctcaaaagtaactttcactttacggacgcctccagtttgttccgtaacaacacccgacgcacgtccggcaagtatatcctgcccgtgagtaacccccgaaataaacattccgttcaacaccccgaaactcgttcctttcgtaccgttgccaagttccaaaccttcctgcgaagaagtatttgccaatactacgacatcatagatatagccggcctccaccagcaatctgccgtcggccactaccttaccgtttactctggcaaccgtgacgcctgaaagggctgtttcctcttctcccaagcccgttgccataccttcggctacataaatcaatgccggaccggcaaaagcctccgttccgggagcatcctgacggcgggcataagcaagaatctccacgggagtaccttcattaaaagccgtacgcgtggacacggctcctcctcccgcgctgatacagagttccacctgcccggcggtattgacatctcccgccgtcccgtttccgttgtgcgaacatccgacggatatcaacaacaggaaaagcactgaagccggtcgcatccaggtcacacctttaaacttcacttttttcattccatctctattttaatacagtatttctttcccatttcgcccgattttgtcaggcataccgtctccgtcataatctttccacccctgtatgccgatgccgacaaagatatcacctgtgccatcggccgcaagtttcagttctatatcaagcttcaagccggcagaaaactcccggtctccgactgcttcatccagtaacttgccgaattcggcaacttcggtttcaatcgtcctgccgtcatccaatttcaatgtcagtacaataggagtttccgacagccccgaaacagcaggactaaagaccccgaaagaacgaaaacctatctccgctatccggttattaaaagcagcctctgccggatatatccccatggattcctggtggtaaggctctttgtcccgtgtacgggaaagataccgtccgagaacaataccgggaaaatcgcaacggacagacacaatcgccaaatccgtattgttcgtaacctgcatgccgatatcctgagtcaatgggtctgccataacggtgtatacggacaaagcgccttccaccacctctatttcacctctgaaagcgtaaacaggccccggctccgccaatcgcatattctcaccggaacgaacggttacaacactctt

SEQ ID NO: 4096 - DNA, 103701 bp, Unknown
  gut microbiota DNA sequence
gcactttatactttcctaccggaagtttgccctcgaagccgcctgacgggacagcactctccactatgggagtactaccgtctgccggataaaaatgaaattccaacgtttccgcatcaccgtgcacaatatctccccaagaagtccggatagagatacccgtatccaaaggtcttattccgtgaagttcacgttccgtacaagcatagaaagcaagcaacaagaaagaaaacgccataaagcctccatgcgattttaatataccattcatagttctcaattataaatgtctgtttatatttatccgttatttcactttaaagcgatagcccaaactgatgcttatgcccgtaaggtcaaagcgcgacttaccataacgggctgtttggtaaaactctccggcaggattaggctcatagggcatcacggtagcatgcaggtaaccgcaggaagcgctcaactccaataaccagttttgacagaaagcaaacgaccaaccggcagaaataccagtctcccaatagtgtccagtcttgttgtccgtagaacgtttcaaatcgccgttgtacctacggcggatatcaaaatcaccgatacgcccgtaaacgcctgcaaaagggccttgaaaaagcccgtcgccataaaaccaaaaacgcggttgcagggtatatgcacttacaccccaaaacctgcctgtgccatagcacccctcaaaatgactgtacaagcccgaaaccgatattgaccaccggtcggaaaagaatagctccgcctcaagattgggcatcaccgtagcatactcaaaatccggagtaaatcctgtgagagaatacagattggttttcactgcaacggaaattccgtaatgcggggcattgccttttttctcacccgcatacagataaacgggagcaaacataccggaaacgacaaacgacaggagaagcaataattgttttttcattgtcactgtttttatattcaacctaagcccgataccgaactattgtttgtttttagtttgcattatgaatatacaatactattatacgcttattctgatatcgaacccgcaccatgttcatatttgtcaatataaaagaagcgacaatctgttccgttactttttacgtaacggaacagaacgatagaaagcttttccaagtctcaaaaaggcattctatctgaagaaactgaacatttttctcgctctgcaagaagagtaatccgtatctctgtttttatattcaatggagacaaatacattattgtctaaaaagaaggagtaaaagaagaaaatcgcttcaatccagaaaattatcaaggcaaatcatattatttgctgcaaattcataaaataaacaacttattgttttatgaaaataaaattaattgcttatattgcacgcaaatacaattcccgttacgtaaaaagtaacgtatacgtataaatctgtcaatcaaacagttttactgacacgaaccgtttcaacacaccttcaaacacatacttcattgtcaatttatttgccttgtcaagcagtgaatcctcatagcgtttcagatatatctccgtggtctttatgctgctgtgccccaatccttcggaaatcacggataagggaacgccgcaatacttgctttgcgtagcccatgtatagcgcatggagtaagacgtaactttctcgctgacaccacaacgcgaagcaaggcacttcaaccgcatgttgaattgacgcagcgaactttgataagctgtgtacaaacctttcccattcaaattttccggaaggatgtccaacagataaggtgaagcaggagaaacaggggcataaagagccaagagttccgccgctcgcctgtcaactgcaatggagagtctgactcccgtcttttgtcggcgcaacacaaggcgtccgttcctatagtcggacttttgcagatgcgcaaggtctacaaaaggcatcccctgaaaacggagcatcagctccaaaaaagcacgggcacgttccaattctggtgaaagcccgcccgtgtcaccggtaaatatcgaacgcacatctttcacatcgagagcacgcttacgttcggaagctcttccggtaaacacacccgtgaacaggcacggaacgtaaggagcaatgcccgcctccactccgcggttgtacgttgcccgaagcgtatgcaggtaagtgcccaccgtatcccaggacagtccgcgcaaacgcagccattcttcgtatcttttcaacaagcccggagacaaggaatacatagttacctcccgcttctcgcaacgtatccgatttccggaacatgcacactctcccgcaatatacttctcaaaagaattagcggtgctacggtacacatgcgccgtaccgtaatgtccttccttttccaaggaagcagccacctctcttacaaataatgtcaatagtttcttcttcatatcagttgatttatatactgtatacacgacttacacgaacgcacaatccgcataaatgtttatcaatcggacccgcagcaggacttgccccgcccaaccggtgatacaatacattatatacttttccagaagagaagagacgaatgcaaggaaaacaaaaaagcagatgtaccgcaatacacctgcttatatatttcgcctgattaaaggcattggaaaacccttttagaagtagaaaccgaatcccactttcagaccgaactctgaacggtctttatttatatcccaataaacggcaggctcgatagtgaccgtacgcgacaggaagaaagcataaccgccctccatgccgaagccgaaacgggttttatcgccaccgtcccagttgtaacggttcaagtttacatcagctcccagaaatacaccaattttgttgaaatagtaacgtccgcccacacccaacgtatagacatccgttccgccgccttgccatgtagcgccggcatccagcagcaaagccacgttatcgattaaaaaagcaccgcccttgacctcaagaccgaaatgagccttatccgtttccgtattgtaggaaaaattaagcccggtaacggaagggttgacgaaccactttcctttttcaaactgcgcatgggcagccactgtgccaataagcaggcatacgattaatgcaagtcttctcatcttgttttcgtttttaagtgaataattattttcgttctattttatcttcttcacggcgcttacgctgcaactcctcttttttgcgcagcaccagccacaacgccagtacgatgacatacgaagcgattacggttacatatttctccgtattgctgatttccgtattgcgcggcaggaaatacgccgcggtggcagaaacataaataagcagggctacggtcagcccggtagatttcttgagtttcttcatcggtttaagagttttttagtctgtttgtcttttcttccatagcacgaaccataccagagctatcgccacaccggctgctcctatgccgtaggatgccggatgcgacaggccgaaaccttcgggcgctatacagatatacgttgtacagacgcaggtcatgaaaagggcaggtatcagcgtcaggaaatacaacttcctcgcacgcaccagatacactgtgacagcccatagggtaaagacggacaaggtctggttggcccatgcaaagtaacgccatatcatatcgaaaccgtccttatcgcgcaggctgtacagcaacagtccgatagcagccaaaaacatcggtatgcagatatataaacggcggcgcatcgttttttgttccatccccaggaaatctgcaacgataagccgtgccgaacggaaagcggtatcgccgctggtaatgggggctgcaatcacacccagtatagccagtacgcctccgattgttcccaaccagtctttcgtaatggcatccacaatgacggcggcattcgtctccgccattccgttttcatggaagaagcaagtagcggcggcagcccagataagggccacgatgccttcggtaatcatggctccgtagaatatggggcgtccatgacgctcgctcgtcatgcagcgtgccatcaaggggctttgcgtggcatgaaaaccgctgatagccccgcacgcgatactgacaaacataatgggaaatacaggcagcgccgaagcgttgggatgggtattctgcaatccgtcccatacttccggcaatgccggatgcttcacgtagagcataaccaaaatgcccaccgccataaacagcagcgcaatggcaaacagcggatatatcttgccgataatcttatccaccggcagcaaggtggcaagtatataatagataaagaccaccacaatccagaaaacggtgtccagcgtttccggcgtcaggctggcaagcagtccggcagggcctgccacaaacacggctcccacaagtatcatcaggacaacggtaaatccgcgcatcacctgcttggtagtcacgcccagataacggcctataatctccggcaggctctcgcccccgttgcgcaacgaaagcattcctgcaaaatagtcgtgcaccgctccggcaaaaatactaccgaacactatccacagataggatgccgaaccgaatttcgctcccatgattgcaccgaagataggtcccaggcctgcgatattcaggaactgtatcataaagattttccacgtaggcagcgggatatagtccaccccgtcggctttggtaatagcaggagtcttgcggtcgtccggtccgaatacgtgttctataaagcgtccgtagatgaaataacctgcaaccaacgccagcaggcagagcgtaaatgtaatcatggcgtgctaatgtttaatgtacagcaagtgttaataatgtattttatgtatgcaaatgtaacggtttctaactaaactacgcaattttatcaggtgatttacgtatcttcgccgtgaaatataacagaaataaagaagtaaaaaggaatttgtttcaccgcagaggagaaatcatcatttaccgaaaacaagacagcaacatgaagaaatcaagccttatactattatatatcttctgtcttcttccccttgccgcccagcggccgcccaagcacgaggtacgtgccgcatgggtcaccgccgtctacggactagactggccccgcacccgcgccaccacgcccgagagcatccgcaagcagcaggacgaactcgtagagatactggacaaactgaaagccgccaacttcaacaccgtactgtttcaaacccgtacgcggggcgatgtgctctacaaatcgtccatcgagccttataactccatcctgacaggaaaaaccgatggcaaccccggctacgacccgcttgcctttgccgtagccgaatgccacaaacgcggtatggaatgccacgcctggatggtgaccattcctttgggcaaccgcaagcatgtcgccgccctcggcaaggcatcggtcaccaaacgcaaacccgctatctgcgtaccttataaacgcgagtatttcctcaatcccggacatccgcagaccaaagaatacctgatgagcctcgtccgcgaagtcgtggaacgttacgatgtggacggcgtgcatttcgattacctgcgctaccccgaacatgccctgcgcttctccgacagctatacctataagaaatacggcaacggacgcgacctcgcgcaatggcggcgtgacaatatcacggaaatagtccgttatctctataaaggcgtcaaggcgctgaagccctgggtaaaggtaagcacctgccccgtgggtaagtaccgcgacaccgcccgctatccgtcacgcggctggaatgcgttccacaccgtctatcaggacgtacaaggctggctgggcgaaggcatacaggaccagatatatcctatgatgtacttccgcggcaacggtttctatcctttcgccctcgactggcaggaacaaagcaacggccggcagattattcccggactgggcatctacttcctcgaccccggcgaaggcaactggactgtggacgaggtggaacggcagataaacttcacccgtgcacacggcctggcgggcgaaggccactaccgcgtgaagtaccttatggacaatacgcaggggttgtatgacatacttcaagagaactactacaccgcccccgccatgcaacccgccatgccgtggatagacaatgtgccgccaaccgcccccacgcaactcaacgtcgggaagttggccgacggatactggaaaatcacctggcaagccgccactgacaacgataagcggaatgcgccgacctatgtagtctacggttccgatacgtatcccgtagataccgccaacccggaaaatatactggcgcaacgcatacagggaaccgaatacatatatgcccctatccgcccctggaacacccggaaatactttgcagttaccgccgtagaccgttgcggcaacgaaagtcccgtctgccaataggaaacacaaaggcaatgcgtttatagtcaaaaggatgcatgtaccaaaagaattcctcatttggtacgtctcgtacctgactgtggtacgacgtgtttcttaccatggtaggacgtgtaccttagtaaggtacttgacgtaccaagcggcaggtacatcaggtaccagccacttgaaatatgcatcaatagcaagaatcatatccggacatacgctctgtaacagcttttacccgtaacgggcactaacggcagatagccggaagcaagtctgccctgctccaccgtcaacggataatcgtgcacatcctgttcgtgccgtgcacgcaatgtttcattatcgggaacgtattcaacagcaaaacatcccttactgccgagagccacaaacctgtcgtaaaacaagcgggccacaacacccatattcatacgcatgtttatctccacgcaaggatgcacacgatatccgttctccttgtctgaccggcaaaccatcatatccactcccagatagccggtatacgtgttcccatagattgaggccaattccgcacgcagcgcttcgcgtatacccgtcaacttctcaagggacagacagcatgcgatactttcctctatctgtccgtccgatgcaagcagattgcccgtataggcgccatgctcattggtggagaacacggaatagcccgcaaagcgcacttcgccccgtccgtccgaatagaactcaagcgcaaaatccttcaccttattatatatgggttctgccgtaagacacccctgctctctcaaaacccgttcacaccaattggagacgggcttcgtaaacccatgcagacaccagttcagcccctttccgctacccgaccagggtactttgagcaggcaggcgtgcattgcattcaccgtgcgttcacaatccgcaatattgtttaggagcgtatgttcgccgcaggtgcattcgggataacggtccaccatgcaccgcgtcaccgccacggcctgcagacgggaagagagcagcctgtattccgcaagaagttggggagaaggcagtctgtcttcacgaactccccctttcagaaagaacctgcggatggcaggattccagccccacggcacaattcgggcttcggcataatcgggcaactcaggctcggtgaccagttgcacctgcaacccgaagagttcccgcatccgcttcaagaaatccgcattgtaagcggaaggcgccagtaccgcactgcccggagcggcataccatatcggcagcaaagccatgtcctgcgccatgcggcgggcggaagccggggctatgtagttcgcttcgttattggcaagcgcaaggtctgaatccggattgaaaagatatagttccatcgattatagttcataattattcggaactgcaaacttacagagaaaaagaacagcatacaaatatataaaacttaactatgaaataagatattttgctatctctactttgcaattctataaaaaaggcgtatatttgtcgcccgataaaccgaatttaaagcatggaagcattttaccgaacacacgcttatctggtagagcatacaaatgcccccgttcgccgcgacctcatggatgagattgactggaacgaccgtcttatcggtatcaaaggcacccgaggcgtaggcaagaccacattcctgctgcaatatgccaaagagaaattcggtaccgaccgctcctgcctctttatcaacatgaacaacttctacttctccggtcacagcctggtggacttcgcttacgaattccagcgccgcggcggaaaggtattgttgatagaccaggtgttcaagcaccccgactggagcaaggagctgcgcttgtgctacgaccgttttcccaatctgaagattgtattcaccggctcgtccgtgatgcgcctgaaagaggaaaatctggagttgcgcgacattgcgaaaagttataacctgcgcggtttctccttccgtgagtatctgaacctgcagaccgacatgaagtttcacgcctactcactggaagaaatcctgagcaaccacgaacagatagccaaaggcattctgtccaaagtacgcccgctggactattttcaggactatatgcaccacggcttctacccctttttcctcgaaaagcgcaatttctcggagaatctgctgaagacgatgaacatgatggtggaagtggacatcctgctcatcaaacaaatagagctgaaatatctgtcaaagataaaaaaattactatatttgttggcggtggacggcccgaaagcgcctaatgtgagccaattggccaacgatatacagacatccagagctacggtgatgaactacatcaagtatctggccgacgcacggcttatcaacatggtatatcccaaaggagaagaattccccaaaaagccgtcgaagataatgatgcacaattccaacctgatgtactccatctaccccgtaaaggtggaagagcaggatgtgctggaaacgttctttgtaaacaccatgtggaaagaccacaaagtgaacaaaggcgacaagaacatttcgttcatggtggacgaagtgatgcctttcaagatttgtcaggaaggcatgaggatcaagaacaatccgggagtgacgtacgcattgcacaaggcagagataggccggggcaatcagatacctctctggctgttcggcttcctgtattagatttacagacaaagagttttttttacttaataaattcaatttagttatgactaaacagaagaaattcattacttgtgatggtaaccaggctgctgcacatatctcgtatatgttctcggaagtagctgccatctaccctatcacaccctcttctacgatggctgaatacgtagacgaatgggctgccgcaggtcgtaaaaacatcttcggcgaaacagtattggtacaggaaatgcaatccgaaggcggtgctgccggcgccgttcacggttctttgcaagccggtgcgctgactacaacgtacaccgcttcacaaggtctgttgctgatgataccgaacatgtacaagattgccggtgaattcctgccttgcgtgttccacgtatccgcacgtactttggcaagccatgcgctgtgtatcttcggtgaccaccaggacgtaatgtctgcacgccagacaggtttcgccatgttggccgaaggttccgtacaggaagttatggacctggcgggtgtcgctcacctttctacgatcaagagccgcgtaccgttcgttaacttcttcgacggtttccgtacttctcacgaaatccagaagattgaaatgctggagaacgaagacctcgctccgcttatcgaccaggaagcattggctgaattccgtgcacgtgcactgaacccgatgaacccggttgcccgcggtatggccgaaaaccccgaccacttcttccaacaccgcgaatcttgcaacaactactacgaagctgttcccgctatcgtagaggaatacatgaacgagatttccaaaatcacaggccgcaagtacggtttgttcgattactacggtgcagaagatgcagaacgcgtaatcatcgctatgggttctgtaacggaagctgcccgtgaagccatcgactacctcgttgccaacggcgaaaaggttggtttggttgccgttcacttgtatcgtccgttctctgccaagcacttcctggctgccgttcccaagactgccaagaagattgccgtactcgaccgtacgaaggaaccgggtgctaacggcgaaccgttgtacctcgatgtaaaagactgcttctacggcacggaaaacgctccggttatcgtaggcggccgttacggtctgggttccaaggataccactcctgcacaaatcatcgcagtttacaagaacctggctatgccgatgccgaagaaccacttcactatcggtattgtggacgacgttactttcacttctcttcctcaggaagaagaaatcgcattgggcggcgaaagcatgttcgaggctaagttctacggtttgggagccgacggtacagtaggcgccaacaagaactcggttaagattatcggtgacaacaccgacaagcactgccaggcttacttctcttacgactccaagaaatcaggcggtttcacttgctctcacctgcgcttcggtgacactccgatccgttctacatacttggtaaacactccgaactttgtggcttgccacgttcaggcttacctgcacatgtacgacgtaacccgcggtctgcgcaagaacggttcattcttgctgaacaccatctgggaaggtgaagagctggctaagaacctgcctaacagagtaaagaaatactttgcacagaacaatatctccgtttactacatcaacgcaactcagattgcacaggaaatcggtttgggcaaccgtaccaacaccattctccagtctgcattcttccgtatcacaggtgtaattcctgtagaacaggctgttgagcagatgaaaaaattcatcgtcaagtcttacggcaagaagggtgaagacgtagtaaacaagaactacgcagccgtagaccgtggcggcgaatacaagactttggctatcgacccggcatgggctaacctgcctgatgatgccaaagctgaaaacaacgaccccgcattcatcaacgaagtggttcgtcctatcaatgcacaggacggtgacttgctgaaagtatctgcattcaagggtatcgaagacggtacttgggaacaaggtacggctaagtacgaaaaacgcggtgtggcagctttcgttcccgaatggaatcctgaaaactgtatccagtgtaacaagtgtgcttacgtttgtcctcacgcttctatccgtccgttcgtactcgacgctgaagagcagaagggcgctgagttcgctcaactgaaagcagtgggtaaggcattcgaaggcatgacattccgtatgcaggtagacgttctcgactgtctgggttgcggtaactgtgccgacatctgtccgggcaacccgaagaagggtggcaaggctcttaccatgaagcatcttgaaagccaactggctgaagctgccaactggacttactgcgtggaaaacgtgaagagcaaacaacacttggttgacatcaaggctaacgtgaagaactctcagtttgcaactccgctgttcgagttctcaggcgcttgctccggttgcggtgaaactccgtatgtgaaactgatttcccagttgttcggtgaccgcgaaatggttgccaacgctaccggatgttcttctatctattcaggttccgttccttctactccttatacaaagaacgaaaagggtcacggtcctgcttgggctaactcactgttcgaggacttctgcgaattcggtctgggtatggagctcgctaacgaaaagatgcgcgcacgtatcgtgaagactatggaagaagctatcgcagcagaaggtactccggctgaatacaaggaagtattccaggcttggattgaaaacatgtacgatgcagacaagactaaggaactggctgaaaagatcattcctatggtagaagctgccaaggacaaatgcgattgctgcaagaccatcgccggtctgtctcaatacctggttaaacgcagccagtggatcatcggtggtgacggtgcttcttacgacatcggctacggcggtctcgaccacgtaatcgccagcggcaaggacgttaacatcctcgttctggatactgaggtttactccaacacaggcggtcagtcttccaaggctactccggtaggcgctatcgccaagtttgctgccgccggtaagcgtgtacgcaagaaagacctcggtctgatggctactacttacggttatgtatatgttgctcaaatcgctatgggtgccgaccaggctcagactttgaaggctatccgcgaagcagaggcatatcccggtccgtcactcatcatcgcttacgctccgtgtatcaaccacggtttgaaggctggtatgggtaagagccaggcagaagaagagaaagctgttaagtgcggttactggcacttgtggcgttacaacccggctctggaagctgaaggcaagaatccgttcacgctggatagcaaagaaccggattggtcgggcttccaggacttcttgaaaggtgaggttcgttacgcatccgtaatgaaacaatatccgcaggaagccgaagagctgttcaaggctgctgaggaaaacgctaaatggcgttacaacagctacaagcgtctgtccaaagaaaactggggcgctgaagttgccgaataatttcaagaattgaaattatacttacatagagactgctccgcaagccggatgcagtctctattcgtttataaaggaaagaatgaatatattgtgattggtttattatccggataagctaaggatgttttatcctttccgtttcagaaaatccgtggggctctcaccgaactgctccttatagcatttcgtgaaataagacggtgacgagaaacctacctcataggcaatctcggccacagtcatatcggaagcggcaagcaaggaagcggctttcttcaaacgcatccggcgcagcagttcattgggggaatagtttgtaagcgacttcagtttacggtaaagctgtacacggctcatccccatatcacggcccaaatcctcaacattcagttccggatctttcatcttctcccccaccagagtcttgaagcgggtaacgaagtccttgtcaagttcgctgacagattctttctctatcgactggttatcaccgaaaaactgtttcagctgtttgtggttggctataagatttctgatgcgcgaaagcagcagttgcgaattgaaaggcttggatatgtaagaatccgctccgccgtcatagccttgaatacgctgttcgtcgagcgagcaggcagtaagcaggataaccggaatatggcaagtctgcaattcccctttcagacgacggcagcactctatcccgtccatgccgggcatcatgacatcggaaacaatcacatcaggcacgtatttcatggcaagacgaatgcctgttgccccatccgacgcatccagcacacggaattccttaacaagcaaagacttcacataatggcgaatatcggcattatcatcaatgacaagcacaatcgggcaatctccttccagagcctcatcccctgcctggatttccgcatccaccaacgtagacgaaatctctttctcatcggcagccaatgccggtacggaaggatgatactgcgatgtatcccgcttcggaagaataacggtgaaagtagttcctttctcattgctgtgcgccatgatattgccgccatgcatttccacaaaagcacgcaccagggcaagaccgatacctgtaccggcctgatgtccgtctacctgataaaagcgttcaaaaatggcctctacatcagtggtagaaatatagctgcccgaattgaataccgacaaacggaaatggttgtcttccgcttcgaggcgtaccacaatctttccattctcctgcgtgtacttcaccgcattggaaagaagattgaagtagatacgttccatttttccggcatccgccagcatgcgatagtctactccggaagccggttcaaagctgaaagcgatatgcttcttaagcagagccatacgaaacgaatcattccaccctttgaagctctccagcaagtcgaacggttcaagatggagttccatgcgtccgttctcgaccttgcggaaatcgagaatctgattgacgaggcgcagaagtatatgtacattcttcttcatcagctccagcaattgatgtgactgtccactgatagaacggtcggcaagaagttgctccacagggtcggcaatcagggtcaacggtgtacggaaatcatgggaaacgttggtaaagaacaccagcttggcatgcgtggcagcctccagctcgcgcgacagttgttccaactggtttttctgctgttccagttggtcgcgttgctgctccaattgctctttccggcgggaaagttcacggttcagccggttctttgtacgcaaggaaagataaacggcaaccagcaatcccacaaccagcagaagtaccagcagactgccatacagaacaacctgctgcgtggcatagcgtgccaggtatcggctgattttcccgttcagggtttcaatcttctcatcgagtgaactgatatgggcagtctgcatcttcatgatgggcgcattatcacggtccaccaccgaagtgctcagaatcgtttcgcggggaaagtcccgcttattcagaatatccaccgcaatctgcatcacacggtctccgcctgtgggatagataaatgtcgcatccaattcgcccgaaagcacttgctccaccccatagccttcgccggggatggcgtctgtgccgacaaagcgcatgcccttctcccttttccggcgcatggcggctgcataggcgccggcagccatacggtcgttttgagcatagaccacatcaatttccggaaagcgggcgagcaaagtatccattctctcttccgcccgcgaacgcaaccaagccccatcttcctttgccagcagacggatgtccgggcaagcggatatgacgctcataaatccttcatggcggtctatggcaggagtagaacccgccagtcccgcaatttccaccaccgtacctttcccatgaagcatattggacacatacctgcctatcgccttgcctatttcgtaattgtccgcaccgacataagcggtgtacttttcggaaaggattctgcggtctaccacaataacgggaataccccggtcgtaggcttcttctacaaccggggttatgggttcggcttcattgggagcgactatcaataaatccactcccgcctctataaagtgccggatatcctccgcctgcctggcattatcatctttcacagtacgtatctccacttctacgccatcgtagaaaagagcttcacgcaacatctcgttattcatctggtgacgccactcgtcatcgctgcattgcgacactccgatacggaaacgtacttcatgccgggaacaggaagtcaccatgccgccgcataccgacagaacaaacagtaacaggtaaatatatcgtctcatcttctttcgctggtttaagtgattgcagatgagcaaagataagaaaaattatattctgtctttcaatatttgcggtaattccggcatcgccccgctctgcgtacatacataagcggaaacttccactgccagcttatgagcctcctgcaccggtttgccgctaagaatagccgaagtaaaggcggcggtaaacgaatcgcctgcgcctaccgtatcggcaacgggcactctcggagtttcctggaaagatacaactcccggagtaaacacatagctgccgttcgtgccgcaagtaagaataagcattttcaaattgtatttggcaagaagaatccagcacttatcctgcaagtctatacccggatagccgaatatacggctgattgtcaccagttcttcatcatttatttttaacacgttgcaacggcgcatggagtcacaaagaatctctttggtataaaatccctgacgcaggttgatatcgaatatcttcaactgttccgcaccatcgggcatggtatcgagaaaacggtttatcgtaatgcggctggcctcattgcgctgcgccaaagagccgaaacatacggcgcgcgtgttcagggccaaacgtttcaactcgtccgtaaaaggtatattgtcccatgcaaccccttcctttatttcataacaaggcacccccaccgcatcaagcgtcacctgcaccgtacctgtaggataaggtacacgctcaatctgtgtacgcaagcctttctgcgcaaaaacatccagtatttcgtcaccgtcggcatcaatgcctactgcactgactacacgactgtcaaaaccgaattgtgatacatgataggcaaagtttgccggagcaccgccgattttctttccttcgggcaggcaatcccaaagcgcctcacccattcctactacaatctgattcatggtaattaattttatagttttacatattatcatcgttaaaagaacggaaaaggtcagcgtttgattttcatcatatagaaaaacaaatacagtacccccaccgtcattacagctaccgcaccgctttgaccgatagcatcacttgccacacccatagcaagcgggaatatcgtaccgccaaacaaacccataatcatcagtccgctaacctcgttcttcttctgcggcattgccagcaacgcctgcgagaaaataatcgggaagatattcgaattgccgaaaccaatcagagcgatacacacatatatcattgtcatctcatgaaaaacgaacagccctaccattgccaccaacatacataacacactgattccgaagaaagttcgagcagacagtttctgcaaaataaaggctccgagaaagcaacctgccgtacggaaaataaaataaagacttgttgcgaatccggcatcggcaagcgacatgcccaaacgttccatcaatatcttgggtgcagtggtatttgtacctacatcgatacccacatggcacatgatgcccaagaaacaaagcagtatgaacggctttcccaacaaagcaagacattcgccgaaagtagaaggacgcccttcttccttttcctcatgaatagatgtagtgcccagccacaggatagcgacaaccgctatcaccatataaatgggaaacagcactcgccagcccatccccaacgaagggatagcctgtgtagccccccacatggctatataaggagcgaggaaagaagcgatagcctttacaaactgtccgaaagtcagcgagcttgccaaccgctcgccactgacgacattggagagcagcggattgagcgatgtctgcatcagcgcattgccgatacccaatagcgaaaacgaaatcagcatcagcgcatatccgtctccaaaaactggaagcaacaaggatgcaaaagtcacggccaaactgagaagcaccgtttttttgcgtccgatgcggttcatcagcatacccgtgggcacggagaagataaggaaccagaagaatacaagagaggggaatatatttgcctgggaatcggtcaggttcaaatcagctttcacatagttggaagcgatacctacaaggtctacaaaccccatggcgaagaagcaaagcatcatgggaagcagctttgcaagcgaattactattattgttcataagatatcgaaatttagttgttaacttttaaagtatttactgtcaggttgttgactttgcaacgccctttatctacagcaatggaaatagtagtgtaaggatgctgcggaaatacaaggtttgtcatggcaaaacgtccgtcaccctcgaaagcttcgatgctgcaacggtctataaacagacgcagacgttgcttggcttctgccggacacggagctactgttatggcaggaaagtccttattgaaatccgtaagtccgcttgcagtacggtccatgctgaatgtggagttcctcaagtcgtaagtcattacagtctgttcatccttatcattggacaacgtaatgtatactttatcggccgagcggggagccagttcgagattaatctcacagataccgctgttttcgaccggcagtttccgggataccttctttgttccggcggaaaaagcgccgtatttcaatgctttgcccgtacgcaatgcgtttacttccagtgcaggcgttgcggccagataaagttcgccgtcactgccttcgtacaattcaatgtcgcgcggcaatgtgttggcactacggaactgtttggtaggcacgttgttggcatattgccaattgctcatccaggcaataacagtatgccgcttttcgggcgtattactccaggatacggcagcataatggtcttttccgtaatccatccacttggttacttcgggcttggtatcgcaagtaaaggttttcccgtcaaaatcgcctacaaaatactgtgccgcactgcctccgaaaggaccgccgggattgatattgcaaatcagcacccatttggtacggtctgttccacgcacgggcaattccatgaggtccggacattcccatacaccctcctgcgctccatatccatgtccgaaactgctctcctttgtccagttctttaaatcgggagaggaatatatccacatttccttttccagtgcagccgccaaaacaagaatccatttgccgctcttttcgtgccagaacatattcgggtcgcggcactccttatcggcggcaatgataggatttttttcataaacatggaaagtcattccgttgtccagactgtatgcaaggctctgtatctgactggcaccggctgaagtatagatggcaatgatggcatcctttccgaaacctgccgtattatccttatcaaccacactgctaccgctgaacacagcgcccaatccgttgggttgtatggctaccggatgatgctgccagcttatcaaatccttgctggatgaatgtccccagttcatattgccccacatggagccataaggattatactgataatacagatgatattctccatctttataaaacataccgttggggtcgttcatccaaccatagacaggagtgtgatgatataacggacggaacacttcccggttggcatcatcaaacgtatcggaaagtttcaggtcgttccagcaggcatcgtccatagcatcgcgcacattcgagcgactgttaccggtatgcacgtccataaccacagccttacctcgatacggttccagtaagaacggcacaatgtagtccaccttgttcactgccaaacgcacttgaaaagacttttccaccttattattcaccaatacattaacagttgcttccggagccgtttcctccaccggcaacaaaagatatttctgtggttgttttacttgaatcaagctgtgattggcaccaaggtagtgaattttcagtccgttgctaccttgggcatgaatcattccaacagttagcattatagtagccacactaatcaatttcttcacattcatagtactgtatttttatgatattaaaattaagttatttaccctatgcacgttgcaaagataggcactcatgtatcaagtgcctatcagaattgtttcaaaatctcccaatattgaaacatgacacggattatttgtataaattattgctccacttgaaggttcggcttaaggacgttatgcacactccattctttgagtgaggcaagtttgtataccaaagtcacacctatgcataataagtgttctcgtctccatcttgtgtcgaggctatacaaatactcgcagaacccctgtaaatacagtgagcagttttctcttcaaatatcattgattttaatatttcttccacattagtagaagtcaatcttacttgcaacttaaactacataatttattcttgacaattaaaaaaataaaattaaactagcacgaactcttataatactgaagaaacagaatagaggctttatgaaaaagactattctattccagccaaataagtaatggtgtttttagttaacaattctatttgatcttgatacatgtttgcacctccattttgattccactcataagccgctaaacctatagctatgcaagtacctttgcattcatcggtgggatgaaattctaccatacctgcgcagcaccaatccgtaacgtgtccccaggtggccaatacggtagcctggttctcctgttggaaagcatcaacaggattgcctgcatcaggatagatagcaggataattgaatccattcaagtcccacatacaattgtgatcttcgcgtattccaggacctatcaaagcgaaagtaggatgtgagaaagcgtcgcaagcaggcatacctgcaaaagccggatgagtcgtatgattttgttccatgcctatgttagcatttatactccaaatatcagatcctgaactcccctctccattaccaaatatattcggattacgctccgtacgtcccaatggaacaatatactgggtggcatgattggtcagcaacagtttaccaccagcattataataagatttcagagcataaactacattttcagaaagaattacgtcaggtaactgctgccaacccacagctaaaccgactcggtcaatatgcaaccagataatttcaaactgagccaaatcggtagttgtaacttcatctggagtcagaaccacaccgttaacaaattctttcttaaaccaattatatgacgctttttcatcatcatcttcaatcatatctgcatcttcagcaactacaatgtaagcagctttggtgtaatttttttcttcttgtttataattgattttagtctcatcttcaacgcaatttagcacttctgtatcttcgcttacgtaaaacacacacgcacttgtttggttatcaatgctacagtcggcaaaacgattatttcttccttcaggtactaccacggtaataggattctgtatactggaagcccattcgcattgaatctgattactcacaaaatgatttgcatctccttttaaacgaatggcaccataatcagcctccttaccgcgtaactggtcattgtcattcagcacgagtttaaataagttttttgaaaattggttatgagaaccgtttacttccattacaccaacataagcactttccaatgtgttttctgtaacgttaattcggttacaagcatttaattgcagtgcacaatctcctccctgcagcagttggttatgagcaaagagcaaatttgtttcattagataggttacaggacgtaccgctttcacctgaagaaaaagaactatcggatatagtattctgtattccgcctaacataacaagtccgttattcactttggagactctgcagttggtaataaccatggcatctgccccatttgtttgaatgcctgtttcaaaattttcaatcgtcagattggtcaaacggattctgtcattatcatgtttcacgtgtatgcctaccccttgcctttcgttctctttacccgtaatcagcaaattctcaatttctactccgctgatacggtttcgatgcccatccacatctgctattggggcaaattgaatggcacattccatattgtttaccaggagctttgcctttttatcctgaattgaagcactatttccgttttcttctcctcttagcgtaacaaaattacgggtcaacagtattggactgtccaaacggtaggtgccttccggaaagaataatacgcctccttcggcaggcatgtcttttatcaatttgttaatcaagtccgaacaatcggtgcttccatctgaagctagtccgtattgagtaacattgattattttctgatctgcacattcgccacacagtgcgtaagtatcatccgaattacaagcacttgcagcaagtacccataatcctaccgtaaatatatgattaagttttatcttcatatctattaaattttaatacattgcaacttattttcatcagcaggtttcagtcttgctgttctatttttattttgtccttaggcacacagttcaaaactttcatctgatcattaactaataaaacttgattgctattagtgttttcaatcaggcaattctctatcaagttattttttccttccgtagctctgacagttactccattttccacaatccattcacaagtcagagtattttgtatgaaatgattttcttcaccggcaatgcatacgacaccatattcagcacctcgatccaacaactgattagcaactgcatctgccatccagaaaatattattctctactttgttccgatttccactcatattcagaatacctatgtagtagcttttgaaattattattggaaatttttgcatcatcgcattcatcaagcaccagattgctgctaccgtccggatacacctgattcttttcaaaaaccaaattcttttcttttgcaaacatgcaagtaatacctttgggctgagctcctaattggcaattcttcacactgttttgttcaccgccttgcaatttgatactgctttccatctcacacacccaacaatctgatatctgcatacgggtagcttttctaatgtcgaatcctaatttcagattgatacctattacatttttgatgctacaatctgtatttgttgattcaaacaatatccctgtaccatgattctctgttccccctgaaataagtatattcttaatagccagtttactaacatctgaatttcccaatttgatagcagcatctgccttgcgaagaatcagtttgcttcctccacctggtcccaataacgattcatctttcacatcaatgttacttcggaatccaggattcagccctttgatggtcacgttgtctttatttatcacaatcggttcatccaacacaaagtctccttccggtattacaataattcctccttctgctggcagggaagcaatcatctggttgattatcgtagaacagtctgtcttcccatcacccacagctcctgccagagtgatgtcaccttctaattggtcgtgtacaccataacacaatgtctggttttcatcgttgtcgcatgcaatcatgatcagactgcacatagcgagcaaatattttcttattttcatgatattcttattttaatgtttaaaaatcaccatatccaggattctgcacataagttccttccgaaaaattatattgtgctaaaggtataggcaggtattcatctttgccagctgtaaaatgtgctcctttataataaacacggtcgttttgttctttttgtatataactattcatatagtctgcggcaacaccccaccgcaccaaatcgaagaaacgttcgccctccattgcggtttccaggcgtgcttcaaatctcacagccttgcgagcatatacttggtcccacccttgtgcaggatattccttgataaaatagtcggcagcattttgatcgggattttcaaagtctttcacataggagctgttcattgcacgacgacggatacggttgataatttctctggcttcttccagcccggaagcctcacctaattcaaccagtgcttcggctttccataacagcacatgtgcataacgaataatctgccagttcataccagatgctccccatggccagcctacaaacatgtcgctactttcgggtgacacataaaaacgcttggtacaattaaatccataatctccattgttacgtacccagctcgccttacaaggactatccggataggttttccaggtgatactcggtcgtcctgttataaagtccaaacgagggtctacggttgactcaatctgtgtcagctcttctcctgtccaaactccataattctcctcattaaaactgtcgaataatggtaaaccgttttcatcggtcttgaaagcattaatcagattttggctgggaagaaagaatccgtctccactgtaaggaccgagaggtgcattcaacagattactccagttaatattaccagctccctcagttccatcattcatggtgtattgcacggcaaataccgattcctttccgttttcataagccaacaagtctaattgttggaaatcttccaacaaatcatattgtccatccagacgattacaaagctctaccacttcacgtaacaaatctttatctatagaaacaacctgattacgttcatcctgcttataagcttgatacagcctcacttttgcggcataggcgtaagcgatgtactggttgattcttcctatttctgattgacgaggtggaagaatcttagctgcctccagcaaatccgttgctatcttatcaagtatttcctcacgagagaattggttgttaggaatatttttatatgtttcctgatctatcgtttcatccagataaggtatttgtttgaacaagcggcacaattcaaaatagaaatgcgcacgaattactttcatttcggcttttctcacagtcagttccggcatgtccgcttccgacatggtattcaaaatgcgcaatgcttcgttagcacgttgtaaacagcaatataattgataccatttgctgtcagcatttccccaagtggcatctattacaaaagtttccatctgattaatatcgccaccatcagtgatgctgctaccacctttataagcattgtctgaacgtacttcaccataggtccagttggtcatcggtacccacatcatatcccggtttgggccttgcagagctgaataagcagaagttattaaaagctcaattccttctttagaattcagtaaatcttcattcaaagctccttggggttttaaatccaaaaaactactttcattacaaccggtagtcatggcagccatcatgccggctgcaagcatatatttaagtttcatatatttcttatttaaatagttaaaaaccaacagataatccaaatgtaaaagttcgtggtagcggatagcgatatcctaatccttctgggtctgctcctgtgtaattggttaaggtaaacacattctgtgcctgtaggtacatgcgcagatttgagatgtgtagtttcttcaataccttgtcagagaatgtataccccagtgtggcggttttcagttttatatatgaaccatcttctatgaagaaatccgaatcgcgtgtttcgttattgttatctactacggtcagtgccggaatgctgcattcatatactccagtcttttcatatacttcccaggcatgcatggcttttaataaatcggtagaatggttacctgtccatccctgaaagagatctgtatagaatttggaattgttccaggcatcgcgtatcattccattaaagaaaaggcttaaatcaaatcctttccacgatgcgctcaaattcagaccagctattactttgggttggtcgctccccatccagtctcggtctgcggtgttaattttgccatctccattgagatctttgtagcggatacgtcccacaccaggttcgcccacctgtacatcgtatttactaagatattcataaacttcctccttggtgcggaagattccgtctgttttataggccatccaagaaccataagactgtccgataatagtcttgctgataccgtctccgccaccccaagtgtatttgacttcctccggcaggtcagtaatctcattgtggtaataagatacgttgaaagctacctcataattgaagtcattgattttgtcgtgccaagttatagtagcttctacgccattattgtccatactggctgcattataccatttgtatcctccttccccgatagcagcaatataaggcttttggataagcatatctttggttttctttttaaagtaatccatagtgactcctaagcggttgtccaaaaaagctgcatctataccgatattgaactgttcggtttgctcccatttcaaattattattccctgacatggtcttaatcacacctggtgataaagtttttccgtcaccggaaaaattatacgatcctgtgttcatgtctacataatacaaactgtaggtcgcgctattgtcaatcatgtcgtttccgttaatgccccatgaagcacgaagtttcaagtcgctaagccaattggaagtagtttccatgaaattttcacgtgaaattctccaaccggcagaaaccgagggaaatatggcagaattgtttccattaccaaatctggaagaagcatctctacgaagggttccagacaccaagtacttctcatcgtatgcataatttacttttccgaagtaagacaccatagcatacgaacttgaattgttactcacatcctttccgtccgtaacagcatccaaatagcgataatccaaatcctcaataatcagtccacgaccgtatccttgtacatgttcgccattttcttttttggcttccattcctatcagtgcattgatggaatgttttccaaaatcttttgcgtaattaatagtgttcgcccatacccattgcaaactattatcctctcttactgtaagttcgttagtttctacttttcggctaccttcttgccatttgggtacaaaggtggaattaaatccattggagtaattcaaaccgaatgaagattttaataccaaagctttgatgggctcgatttccaagtaagcattgccgaagatacgccagtttttatggcgattgtttgcttccatatcagttaagcggacagcattggccttatcacccaaaatatccacatatccgcctgcgtaaccgccattctcatcatacactgggatagcgggatgctgggcgatgacaagttcttcaataccttccggagtttgatgctgagtccagtaatttacagcgatactttcccccacccttactttatcatttaaaaagcggaaatttgaacttaaccgcgagttgatacgttcgtaatccgtattgcggcataaaccatcttgattcatgtaatttagggtcaatgctacattgccatccttgaaacctttggaaagtgataggttgtaattttgcataagtgccgtatcaaagatctcttttgcccaatctgtgtttcctgaacggatttttatgccatcttgatcgtaatagaattcttggagttcgggagtttcaccgttaccatatactatactattaggatgcgtaccatatgtattcttatatgcctgccaatatacctctccccattcataggcatctaacatatctatgtttgatgtaaatgtctgtgcggtcaatgacatgtcgaaatttactttcacatcgccttctttagcacgcttagtggtaatgataatcacaccgttggcggcctgagcgccatagatggctgcagaagcagcatctttcagcacttgaatggattccacatcattagaagaaagaattgtggctatattatcacgggtttgtacaccgtcaatcacataaaggggagaggaattgttgatggtagtaacaccgcgaagcagtgtactggtgttccctcctcccggagtaccatctgtagtgatattcatacctgcaacccttccttgtaatcctgtaagaatatttcctgttggaatgtctgccacatctttcattttgactacagcaaccgacccggtcagactagctttcttttcagacatataacctgtcactaccacttcattcaacatttgtgaatcttccatcatctcgatacgaacggtgggttgtgcttttaccgttacagcttgaaaaccgatataagaaacagataattcggaaccctgtgaaacggtcagtgagaaattaccgtcaatgtctgtaatggttccgttattttcggagcctacttctattacggaagctccaatgacagaaagacctgtggatttctccactactgtaccttttacagagatctgttgtgcatgcaacgtaatccctataaacagtgccactaatatagtgcacgtcttaaaacagatgtttttcatcatacataatattttaaagttaaaattatatttagatacgaatcttagccatacagcttctgattttctccgtggcaaatataaaaccaacataaatattttatcataacatttgttgcaaaagatataatgaatgatacatcgcagaagagcattagcgcataaacaactataatacaataacataacagtaaatcagaaaaaaaataaaactattttttaatatgtccttaactcaagtttcacaaatatgtgaaacgaattgagtaagaagtcatcagcgaaaacaaaaataaactttatccatcagcgaaattaaattagcatataaaattgatttcaacaagtctgctttgggtaacgaagccacgttttgacacggatagcatggtaatgatagattaaaactaaagtaagagaattttcatactctccaactcataaattataagttagactgttcctgttttgacctttttcttttggataaatcgccttatagaagaaataacgaacaaagagacatcaaccatataatttatcagccaaaagcgcaatgccattatccgccactatcaccccattccaatatagtatgtacaatagataaccgtacttcgaacaattttatccttttctgttcttaaaattcactatctttgacacccaaagaaaactataaaaaacataccatgaagaaattaattgtagctaccttgttattaggcagtggcacattactgtctgcacaaaaaactgcaaaaataccggcatactataaaccggcaaaaagcgaaatgtaccataaaggctggatagacttcaacaaaaacggtatcaaagatatatatgaagaccctgccgcaacactcgatgcccgcattgaaaacctcttgcagcagatgacactcgaagaaaaaacctgccagatggttaccctctacggctacaaacgcgtactgaaagatgctcttcccacccccgaatggaaacagatgctctggaaagacggtatcggagccattgacgaacatctgaacggcttccagcaatggggattgccaccctcggacaatgaaaacgtctggcctgcctcgcgtcatgcctgggcactgaacgaaatacaacgcttctttgttgaagatacccgcctcggaatccccgtggatttcactaatgagggcatccgtggcgtggaaagttataaagccaccaatttccccacccaactgggattaggacacacgtggaaccgcgaacttatccgccaagtaggacttatcaccggacgggaagcccgcatgctgggctataccaacgtctacgcccccatcctcgatgtaggccgcgaccagcgttggggacgctatgaggaagtctacggcgaatccccctatcttgttgccgagctgggtatcgaaatggtacgcggactgcaacataatcaccaagtagccgccactgccaaacactttgctgcatacagcaacaataagggagcacgtgaaggcatggcgcgcgttgatccgcaaatgccgccgcgcgaagtggaaaacatacacatctaccctttcaaacgggtaatccgtgaagcagggctattgggcgtgatgagttcctataacgactacgacggcattcccatccagggaagctattattggctgactacccgactccgcaaggaaatgggtttccggggatatgtggtatcggacagcgatgccgtagaatatctctataccaagcataacaccgccaaagacatgaaagaagccgtacgccaaagcgtggaagcaggcctcaacgtacgttgtacattccgctcgcccgactcattcgtacttccgctacgcgaactcgtaaaggaaggcggactgagtgaagaagttatcaatgaccgtgtgcgtgacatccttcgggtaaagttccttatcggtctgttcgatgctccctatcaaacagaccttgccggagctgacgatgaagtggagaaggaagccaatgaagccgttgccctacaggcatcccgcgaatccatcgtattgctgaaaaatacagataatacactgccgctgaatatcgataagataaagaagattgccgtctgtggtccgaatgccgatgaagaaggttatgctctgacacattacggaccactcgccgtagaggttactactgtcctcgaaggaatccgcgagaaagcacagggtaaggccgaagtgctttataccaaaggttgcaaccttgtagatgcccattggcctgaaagcgaaatcatggaatacccgcttacccctgacgaacaaaccgaaatagaccgtgccgcagccaatgcccgtcaggctgatgtagcagtagtagtactgggtggtggccaacgtacctgcggtgagaacaaatcgcgcacaagcctggaattaccgggacaccagttgaaattgctgcaagccgtacaagccacgggcaagcctgttatactgatattgattaacggtcgtccgctatccgtaaactgggcggacaagtttgtccctgccattcttgaagcctggtatccgggctctaaaggcggtacggcagtagccgacattctcttcggcgattacaatcccggaggcaaactgacagttacttttcctaaaacagtaggacaaatcccgttcaacttcccctacaaaccggcttcacagatagacggcggtaaaaatccgggaccggacggcaatatgtcacgcattaatggtgcactgtatcctttcggctacggtttgagctatactacttttgagtattccgacctcgaaatcactcccaaagtaatcacacccaaccaaaaagccactgtacgactgaaagtaacgaataccggcaaacgtgccggtgacgaagtggtacaactctacacgcgcgatattctaagcagtgtcaccacctacgaaaagaatcttgccggttttgaacgtatccacctgaagccgggagagagcaaagaaatagttttcactcttgaccgcaagcatcttgaattgttgaatgccgatatgaaatggacagtggaaccgggcgagttcgccatcatggcgggtgcgtcctccgaagacatccggctgaatggtatacttactgtagaagattaccaagctcgcctgcaagcacttgaaagtcaaaatcccgtcagtcccgtaacagcaagtaccgatatggaaaacgccccaaatgtgcttgataaacaaaagaatacggtctggcagggtaacaaaggagattatataacctttgccctaaagaacggaagcaaaataaacgaagttgctatcgctttcaagcgagacaacggacttccggcagagttcgagatacagctttcaggcggaggcggtcagttccttactgtctattcgggtactgtcagccaatacggcgaacttatctcctatccgttcaaaggaaccacggccagtgacttgcgcatcttactgaatgatgaccgtgtaggaatagctgaagttgtactgaaagaataaggacatgcagcattcctattttatggtctgactgaaagttaatctttcgtaaatgaatatccaagaacaaagaacttcgttaactttgttatttaaaattcatagttataaaccgatagagaaatatgaagaaaaaaatgatatgggtggccggcattctaatagctacaagtgcctatgcccaaacagatgtcagcaccggtattatgcgcggtaaagactacggagtaacttatctcctgcctaaaaccgaaatagaaattgtagtacaggctaccaaacatacatacatgcccggagagttctgtaaatatgccgaccgctacttacgcatgaacaatgtatctgccgatccgaatatctattggaccatcgacaaagtacaaacacacgtggcgggagtacccgataaagataatgtatacttcgttaagttgaaagataagactgtagccccactaatggaacttaccgaagacggcattgtccgttccatcaacataccgcttaacagccatacgataccggcaaccaaaataaccgctgccgcacaagaaatcatagatccgcgtaaattccttacggaagaaatactcatggcaagttccagagctaaaatggcggagttggtagccaaggaaatctataacatccgtgaaagcaaaaatgcccttctccgtggtgaagccgacaatatgccgcaggatggcgcccaactcaaaatcatgctcgacaacctcaacttacaggaacgtgctatgacggagatgttctccggaaccttgaaagaagaacctcagacgtttacaatccgcctgactcccaaagaaatgaacaatgaagtagctttccgcttctccaaacgattgggcatagtggcaaacgatgatttggcaggcgaaccgtattatatctccataaccgatttgaagactcccgccattccggaagaagacagtaagaaaaaagtagacggagttgcttacaacgttccgggacgcgcccatgttatattaacaggcaacaacaagaagatattcgatggtgaactgcccgttacacaatttggtactatagaatatcttgcacctgtactattcaataaaaattctactataaaagttttgttcgatacagctaccggtggattaatcaaggtagacagagaaagcaattaggaaattgagagtcgagagttgaaagcaggtctgcattgtaataccagatggtaactttcaactctcgactttcaactgaatgaatccatctttctgcaactgcataatgtaagtagtgacacgagaaggatagttatcttcattttggaaatggtcggtaagcagagagattatctcttgtacggttcggtttccatctatcaaacgccatacggcagtaccgtgttcttccagcttcacatgaatatcggccgacatactcttcggcaacaaaaaacgtctcatccagtcgtacttaaaccgaggaaaggaaagtatcgcgtactccccttcccattcggttgtaatatgtccgcactgaacgggaacagtatccaataggtttacttttccttttgtatctgacattaccgttatcaagctttgatattaggttcttccaaaccaagacctttcttcttgtcaacaactttaagaataaatcccagtaccaaagcagcaacgccaagacaagccagcattacaagcggtgcggtgtaatcatacgaaacggcagcctcttccggagtaatcacaccgttctttaaatcagcaacaagctgcgtattggttttatcaagtacctttccgattagaagcgggaagagccaaagaccaatattctgcacccagaaaataagcgcgtaagcactgcctataatcttggcatcaaccaatttaggaacactgggccataaagaagcaggaaccagtgaaaaacttgcaccaagtaccaatatagtaagataagctatcacaacaccacctaccgcattatctctgaactcaggaagaacaaacgcgaaagtaagatggcaaagaaccagtaacatggaacctatcatcagcatcgaagctgccttacctttatggtcaacatagttgccaagtatcggtgttatacctacagcaagcaaagggaagactgcaaatactgtttcggcactctgacgcatataacccatataacagaagacagtgagcaatactccggcaagggtaagcaagccatacttcatacttgccttcttcataaaattacttgcaaaagaagcacccgcaacgacaagcataatgcagtactgaagaattgtcaccgtattagtagcccagaaagagtcggtgggtacttccttgaataccaaattacattgcagcatatttacggcatatttctggaacgggaatatagcagaataataaagtacacaaagaagcgctaccaaccagaatccgccactggacaaaatagtaccgagatcgctgatcttgaacggatcgtctttctcctcagcctcacccgtctgctcgtcaagtttcttatccatgaagaagtagacaataaacataataagtgcgataagcaatagcacaacaccaaatgccactgaacgggaaacatcaataacaccccctaatttagcaaataccggagagaaaatcatgcaagtggcaactcccaaacgggcaagcgccatttcagaccccatagcaagcgccatttcacggcctttgaaccacttaacgataccgcgagacaccgtaatacccgccatctcgacaccgcaaccgaaaatcatgaaacctattgccgcaaatttagctgatgccggcatacctctatagaatggagagatacccaactcatcgaaaccgggaatataattcaggttgttggtaaaccaagtttgaagtccacttccctgaaaagcgtctgtcaccgcataccaattgatggtagctccgacaagcatcacagcaccggaaagaattgcagtaaaacgtacacccattttatcgaggataatacctgcgaaaataaggaaaaatacgaatacattaaggaatgtctcagacccctgcattgtaccgaatgctgtagaatcccagccacgcgtggactgcatcaagtctttaataggtgaaagtatgtccataaaaatatatgaacagaacatagcaaatgctaaaagcagcaataccaaccaacgcatacctgccgaatcgcgtagcgtctggtgaattttgtcagtagttgtcattataatattataatatggtttataatttcaaatgaatcttatctggctacaaaaataaccaaatataaaagactataaataaaaacaggcagaattgtacaacataaattgtacaactccacctgtcaagaaattacagttatttctcaaaattaatttccagccggttctgcagcatccgtagcagcaggagctgttgttgcaggagctgcttcagccggttgctcagctttcggagcagctgtacctacgggcatattgtacgggttcgtcttctcttcttgctgtgcctgttccaaaatcacatcaccgcctttgtgagaagcagaagggataacgtaagcggaagcaacactcatcaccaccaaaaacacagcgagactccatgttgccttttccagaaagtcagtagtcttgcgtacacccatgatttgattggatgatgagaaacccgaagccagaccaccgcctttggaattctgaatcaacacaatgaaacacatcaatatggatgcgatcaccattaagataactaataataaatacattttgttattttgatttagcgttaataatcaatttctccaaaaatctgatttggtctgcaaagtaagcatttttttttggataattcaaacttaattttttaataatttcaagtgctttatcatatctgtgctgtttaatatagattttagccaaagtttctgtaaaacagctatcatccacatcttcctgacgaatctgtccatcatcattttcatcgtcttcggaagtagaatattcgttttttgaaagggaagcggagaaagtctctttttgctcggaaatcacttccttatcttcaagagatgcctccttttcttccggagatacgagaactttctcaggacataccgatctttcaaatacagatgattccgacgactcgctcttacgtataaatccatctatcagttcgtgtccgcgcagtttagggacttccttcccaccggttggttcagaatcattctgtccgtcatcctgcaacagataagttgtgtaatccattgcataatccaattctgtaacctgcgaatgctcttcgggaactgttgccagaaaagcatctatcaaagagagtgtacggtctacattaggttcttcttccggcactttggaagaaagtaaaggtgacttttgtgatttcaacctatagcggtcaccttctatcaaataaaacaatacacgtctgtctgccacatacagaacagccttacgcagctctgctccgaatgtgacatcgtgcagcaaatatagattcttaagatacagcagccgaagcgactgaaaatagggataacggaccagcagagtacgaagctcgtacaaagtatccttgttcaacatttcaggatgctgtatccattgttgcaaataggcagaagtcattcctcaattaccagttagctacggttgaattaaatatttgttctgtgatatcctttatcattttacttatcagatcatcctgcacatcagtcagcagcaaggaggaatcataagtctggaaagcggaaaactgttgttcaaaatcttcctcatgattggtattgtttacataacgcacgtttacggtcatagtcagcttcactttagaagaatagccatcagctgctacagcttcattgtattggttataacccgttatctcaccgtctatttccagatcgccgttggcattcaccaattgcaaacgtgtttgctggataaacatatccttaagtttctggttaaactccgtagtcatgggagcatacacgtactcggcacgattaggaaattcggcaattgtaatagtcttcactttgctgtaatcaatagaacttatcggagcaagtcccatagagatgcggcaggaaactaccacgcacaccaaacctgctaacgccgatatcaacgttattttcttaatccaatccatattcttttatctttctgtatagcgtacgctccgatatattcaaatctttagccgcacttttgcgctttccgtgatgcttttcaagtgccttgcgtatcatttctttttccacttcatccaatgagagagattcttcaacatactcttccgtgtcttgaatatcctcatctacttcctgagctgatttcacggaagggtgtattatagtaggcactccggcagcaggtactgaagctactaccgctggagcagatgcataataagcagtaggtgtcgcaccctgatttcccatagttgcccgttcggtcataatttcgtgtaccagttttttcaattcggtgacatcctggcgcatgtcaaaaagcacctgatacagtatttcgcgttcgctttcaaaacttttactttcattctttacaccaaacaaggcaggcaggcgctgcacattgctctgttcgggcaggtaattcttcaaaatagaagcgttgatttcacgattggtttcaataatggaaatctgttccgttatattcttcaactgacgcacattaccgggccatggatatgtcagcagcacttgtttggcatcatcagtcagctgaatggcaggcatacgatacttttcggcaaagtctgatgcaaacttgcggaacagtaacacaacatcctctccacgttcgcgtaaagccggcaccggaataggcaccgtattaagacggtagtataaatcttcgcggaaacgcccgtcagcaattgcttgtgtaagattcacattggtagcagcaacaatacgtacattcgttttttcaactttagacgaaccgactttaataaactcacctgtctcaagcacccgaagcaaacgagcttgtgtaggcataggaagctcccccacctcatcaagaaaaatggtaccgccgtcagcctcgccaaaataccctttacgttcgccgatagcaccagtaaaagcgcctttttcatggccgaacagttccgaatcaatcgttccttcggggatagccccgcagtttacagcgatatattgtccgtgctttctgcggctgtattgatggataatctgcggaaaactctccttacccacaccactctctccggtaatcagcaccgacaaatcagtaggagctacctgaatggcgatatcaatagcacgcatcaatgcctcgttattgccaataataccaaaacgcagttttacttgttgtatttctgctttcgtcatactacaaatcctcttctgtactatcaagtttcagcttatcgctgtcgtcacgtctttcgtaatattgtttcctcaggggattggcatgtgcttcctgctcgcgcatacggttacggaacacatcgattgccacatagacagcctgccggaaagaatcttcggaagcgatcccttttcctgcaatatcataagccgtgccatgcgccggtgaagtacgcactaccggaagaccggccgtatagtttacaccttcatccatagccaaagatttaaaaggagcaagtccctgatcgtgatacattgctagtataccgtcaaaatgagtaaagttaccggaacccataaagccgtcagccggataagggccataacacaatatgcctttccccgccaattctttaatggcagggatgattacttcctgctcttccgtacccaataagccttcatcaccggcatgtggattcagggaaagtacagcaatacgcggtgctccgataccaaagtcctgcttcaacgcacggttaaaaacgagcagtttctcctgtatcaactctttcgttatagtcgatgctatctcccgtacaggaatgtgtcctgtcactaatgccacccgtaaatcatctttcatcagaatcatcaaagcttttccgccatcacccaacttctcttcgatatactccgtatgtccgggaaaagagaattcttccgactgaatagtgtgcttattgataggagccgtaacaataacatcaatcagccccgctttgtattcttcaattgccttctccaaagcgccaagagcagctttaccagcctccggatcaggtttggaaaactcaacttttacttcatcgtccgtacagttcactacactcagacgattggggacagcttccgatgccgagttcacaatactgaaattagtcggcaagtccaatgacttgcggtgataagcagctactttgggtgaaccgtaaataatcggggtacataactccaacatcatcggatccgaaaatgttttcaaaatcacttcatacccaactccgtttatgtctccctgagttataccgactcttattttattatcttccatccttatttttctgttttagtagaatctttttttgttactgccaaaggcatctcatttccttcctgtttgcttccgggcaatttaagcgtatacaatgacgcttccatctgacgtaccagattacgtttcatcttatcgggtgaatacacaaatatctcggatacgataatgcgctgattaactttatccaaacggacatgagatacatacggaccacccataaaatcgcctttcacatgccacaagccacgagcttccaatgcatattcgtcctgtacattgataggacgtacgtctgtcatcaatgaatcggtttccatatacataccctcccttgcaccaggaatattaatcttcatcacagagtcacgcttatgcacgaaatactctttcgtaaatgtatccttgtcggtataaggataggaatagataacaaaattttgatcacctgtagcagcattcgtacctgcccaaaagaagttttctccctgcttagtcgccgtcagttcacccggaacccatacgtcacaatcgaacatactctttactttcgtagaaacatagtcactgtgtttgttttccagcactgcaatctggcggttcatttcagcacgggtaaagaaatccacaattacttgcctgttctcctcgacaaacttctcaaaagaggcttcatccggtgcctgaatagtcaggatagattgaggtgcagcatatacattcttcgcatatttgaacttaggctgtgtatacagatctttgttcacctcaacaatgataatattgcggatcaacttcaatgtagagtcatagtttgccggagaagtatacataatacggaatgaacgttccgactggggaagcccaggtacgtcagaatcaagtacatcatagagagcacgaccggcaggacgctcccacaacccttggtcaatcactaccaaaatttcatacgcccgaccactggatgtcggagtaaacacacccttcttgccattaccacatgctgaaaacaatgcagttatcagggccatactcaaataaaacaggtgtttcttcatacatttatatgttttagttattacaaaactacgaaaaaggcgtataagcttggcgtcaaagttaataatttatattaattcttctttattctcttcctgtttagcagtcgaaagcataccgcatgcggcaaatatatcctcaccgcgcgaagcacgaatcgtagtaaacagtccatgcgatgtcagataatcacggaatgctgtcattgtctccatatcagcaccttccagattaactcccggaatagcatgaaaacgaatcaaattgatacggcagtccagcccccgcaataatttcaacaactccttggcatacaacaaagaatcattcactcctttaaaaacaatatactcgaaagatagtctgcgctgtttactaaaatcatagtttcttaacaaatctacaatctcagtaatggaaaaagccttttcggcaggcatcagttcacgtcgttgcaaaggcacgggcgagtgcaggctgactgccaaatgacagtctgattcttcaatgaaacgctgcaaccccttacgaagcccgacagaagagagtgtaatccgcttcggactccaaccgtatccataggatgatgtcattacttccagcgccttcaaaacttcatcaaggttatccaacggttctcccatacccatcatcaccacattggtcagtttatcccgttcgggcaaagaatttatctgattaataatctgattagcggtcagattggcggtgaaaccctgcttacctgtcatacagaacttacagttcatcttacatcccacctgggaagatacacacaacgtagccctatcttcatccggaatgtaaacggcttcaacataatgtccctctccggcacggtaaagatacttcacggtaccgtctaccgaccgcatggcatccactggtacttcacatcctacttcgtatatctctttcaacagagcccgatgtcttaacgacaagtttgtcatttcgtctatggaagctactttcttgtcatatagccacgcagcaatctgcttggccgcaaatcctggcagccccagattctttacgaccgtctgaagctcggttaatgtaaggcctaaaagaggttgtttcattctaactgtatatttacgataaaagatagtttatttactgataaattatcctttgcaaaggtaggaataaagttgcacaaatgaaaaaagccgttcgacatttatcgaacggcttccccaagtatataaaattattctacttttatattattagaaatacagataacggctatctttcacattggcattcaagtataaatcattcatgaactgatttgctatacgtgcatgcataccttccaatgtagcttcttccgtttcctggttataagtttcattcagtttttccttagcataaggttgaagaacaaatacaccaccattacccttgataggtgcgctcaacttgtttaattcagcaattgaagcatatgcccctaccaaaggttcgctactacgcaatgccgggacataggccggagcagcgaaagtaacatgctttacggagtcactcactgcatttgccatattcttatattggtcaaaagtcgttgcaccggcagctttcatatcagccatgattttctctgctttcttatcacgaagaatttcgcttctcaactgttcttgtaccatagacaacggacggtaaccttcaggaatgatattcgtaacagccaccaccatcatatggtcactttcgccacattcatacagacctgaaacctcacctgcttttgctgcaaatgcccatctcaaagcttctttcgtacctttcacacctccgatagcgtgctccgaactgtacaagtcagttctatccagcagtctgtaccctgcatcttctgcattggcaaccaatttgtccaaagtattgttagctgcaatgaactgactgaagtcattgtatgccttgctataagtttccttgctgaattcaaccggacgcttgataacggctactttatatttatctttcacagcttttttattcatcacttgcaagataacgtttgcctgtcccaaagcgaggttagccaactcattctgacccaaagtagtgatggctgcaatatacttcaaattatcaccgtccacttgagcaccttcatagttggcagaagaaatccatgttgcctcacctgtctgaccgtacttcttggcaatttcggcaaagtctgcaccgcctttaatggctgtgtagatactgtcagccaaagtcttggtcttggcagcatcttctgcaaccacttgaatctgacgatattgaatggagtcaggcatagcagcagaggccagtttcttgaaagaattgattgtattgtccgatgcattatagtaaggaccatatacaccacctacctttacagaatccaaacgggcaacaacgtcagcaggcagcgccttgtctgtatagaataagtcaacatattgctgagtagaaccggttgagcgaatgaagtttgaataatcggaaggattctcagccagctgcgcagtatattcctccacttctttctgaatatcggctttgtcttccggacttgcagtaacctgcacatcaatatacttgatgttacgggtttccacatattgtctgaattgctcttttttcttgttataagcatctttcagttcggattccttaataacaattgtagaatctacaatagaggaataaggaacggctgccaacaacaagtcagactggtctacacgtgcattgaaagcatcttccgcttcaacaggattagagaacagagacttcgtaatcaaagcctgatatttctcctgcaaacgagcctgtataagtgacttctccacaaaactccaaaagttatacatggaattgtaatactccgcatattgagccggcatctgagccttgttcatcttagagtaatccaccaagaatttcttcaacatatctttgtcgaaagcaccggtctgcgggttacggaacggagtctgctgcaacatcggatgtacaccggcatcaatgatagcctggagttccgctttagaaacagtcaaacccaacttttcagcttcgttctcaatcagtttattgtttacgtatgctctccagacttcatccttaatctgattggtttgttcatcgctcaacgcgttcaagccgctggagaatttcactacttccgtatattcctctaccaatgcctgaaaatcctgagcggaaattgtttccccgttcacttctcctacatcttgtgactggtgcggctgaagtactttccacgcgtctcccgcgatgaaggcaaacagcgccagaccaataacaatcaccaataagggccctttagaccgaatgttttgtaatgttgccattttagttaatatgaattatttgtttattattattttctattcaatgttctttttagcgcacgaagatacaaaaaatgctaatacgcatctatttattctttaaaaatttacgctgaaacgaaattattccgtgactttcaaccgtaccaattctattttagtggctgtcaccttaattatcttaaactgatatttgtcaacggctatcacttcatgcagtttcgggaaactttgataacggttcagaatcagtccgcctatcgtaagatattcatccgattcgggcagttcaagattgaacgtttcatttaccttctctatttcaagacgtgcggacagcacatattcatgttcgccaatttgtttacagatgtaggaagtgttgtcgtgctcgtcctcaatatccccgaatatttcttcaaccaaatcttccagtgaaacaataccggatgtacctccaaattcatctaccacaacagcaattgtttttttctgttgcataaaaagtttcatcaatttatgtgccgccatcgtttcgggcacaatgggtacttccttgacattatttctccagtccgccggatttctgaacatttcagacgaatgaatatagccgattacgttatctatattcccatcgtacacaataattttggagatacccgactccacaaacacgttcttcaagtcttcgagcgaggccgtcacatccactgccaccacttccgtacggggaacaatacaatcgcgtatttttatattagaaaaatcaagtgcattctgaaagattttcacttccgcatccaactcttcctcattagctgcattctctatacccgactgcacgaaataatccaaatcgactttgccgaatgccttatcggacgcttccttatttatcctcatgccaaataagcgcaaaaagagataagacagtccggaagcaaactttgatatgggaaacagaataacatagcagacaaacaaaggtatagcaaataccctcaataccagattcgggttaatcttgaacagcgtcttcggaagaaactcgcccgttacaagaataacaagagtggatatgatagtctgcaccagcaccattacaaaatgattatcaatcatacccgccagcagattcacctcgataatctgtgccataaggataccataaataaccagcgcgatattatttcccaccagcatggtggaaataaaattattcggattgcggaagaaacaagaaaggatgcttgacgtaatccccggtttccgctccatctcaaaacggagtttgtctacggaaacaaaagcaatctccatccccgaaaaaaaagcggagaaagccatggttatcaataagtaaattatagtgctcatcatattatttgatgctgtctgttttcaacgtatcagaaggggtgacactgtcctcatccacataaaagataccttccgtcttgaaaaaacggtattttgtcaattgctcatttgattcaaaaccaatggcataaattatctggtcgggttgttctatacgcacccgctgatcggaatagacacgttttttattctgatcccaatacagcaactccgtatcgaatttttctcctttcaggttctgtatgtgtacatttcctatcagcttccacaactcttttttattatagtaataagccgtatcggccttgatactggcttcagtatggaacaaagaatcgaatttttccagatatatacctttttcaaacgcccaataaggtggtttcttacggtcgtaaatcaaccactccgccgtattgacccgataacgggtaatacccgaatcggaaatcagcgttgttacccctttagtatccataaccggcaacgaatcacgttcggtaatggcagctcccatctcttttttacgtccggaacaggaagaaaataaaagaagcataaccatcaccctcagggcaatggttatgctcatatttttatgtccgacaacgttaggttgtagcgacatattcttatctaatggttgtagactcacctatccagccgccaatcgtaatacggtcaccggctttgtaacccaacataaagaggtcttttgcctgcggagtatgacgtgcataggttgcaatcagttcattaaccttatctgtaacactcggatctacggctttagcacgttgaagtttatcaataactacatagtaagtacatctgttcaatgcaggctcatcactccagttgggatttgaaccgtacatttgagccagcagaatatagggttcgccatagttttcattaaagctgattgctttctgggcataagttcttgcctgagacagtttcttagcctgccacaaagctgcagcggtagcataagccatttcagatttctttgcattatcggtttccatgcccaatgcttcatcgaaatacttcaccgcagtgtcataatcaccttttttatagtacatatatgctacacctacagctgcatcagcagtcggattaacacgatacaaataatcggaagctttgaagtatgcctcacattcattacacttcatcatcttcagaatagtgatggtcttcttcaggaaagcagagtctgccttattttcttcaactttcggaccgtagatattctgcaatgattcacaatcagctacaccgctgttaacgaacatagctaccaaattatccttgattgtttgcaaaacagcttttttctttgcattatcctctgctgcaatagcatcatcggcgtattgcgaagcattgatataatcctggaagaattgatctgtatgattagtatctgcctttactttctgcatggacacatcaacaaaatagtgcaatacagcaccatcagactcacccttagcggtttctgctgattctttcagccaggcataagcctgattcaaatcaggagcaggtgcatattgcagataatccacagcttttgtgcctaatgcagacgcaacactcggtacacccttcatctttgaagcaaattcaggaatatacttcattttctgatcatgcacagccatcagttcatcaaacaatttcttatactctgctgaattacgatccttaatctgactcatcaaacctgtaagaatcttctgcgcatcggtataagtgtaatatctcagtgtcggacaatctttcagaactgccatacaaggagcgtaagcatccttgaagtttttcgctcttactgcctcatgcgagatactactattggcattacaatcactttgtgcgaaagtgctggttactccacccgaaaggagcaaaacagcgacaagcgttttaattttcattgtatttaaattttagttgttatattgtctattttcaccattcagcattaatcaactttccgcttgaagaaccaacgttcattgaaagttactccaacacagatacgcaacgtattttcattcaggaatgcggctgtcttgccttcggttcttacatactgggccgaaaggcttaacacagaacgcgtacgcggaatgggaagtccgaaaccggcagtcaccccatattcgtcagcggcacgcataccgtttattttataataaggttgggaatagtaagctcccaaacgatattttacatgtgccaagtagctccttcccatagggtttggaagaaattcagcgcctacagcaatcttggtacggttacagaaagcatttttctcattcatataagtaactgagctccatttttgaaaagtaaagtcagcccctaccgtcaaacgcttgtcatacacatagctgaaaccaacacccaaactcatcggactaccgaaagcggcaaccgtatctctgttattcacagtagttcccgttttctcatttcccaatctatcctctacatatgaatcgttgttcaaatcatgtcccggcgagaatactatacctaatgtagcttcatgtttctttccgaatacctgcgtatactgtgctccgatatccaacttatagctttgtatagatgtacctgttatcgtagtcagcggcaaagtagacgaatttcccggaaatgttatggctcttgtgtgcgttatatctccccaaaaatatgagatattagcaccgacagaaagatttttcaagactttaaaccctgctcccaaatatagctgatgtaatccaccgtctccataatattgcaacgcgctggattgggaaggataatccgtatcttccttgtattccgccatgctataccctacattcgagtaaggcaacaatcccagactcatagcagcccatttacccaaacgaaattgcattgtaatatagtcaaaactggagtttttggcattttgctttatcgtaccgttactgaagttcgtattttgcagggaaataccgccgtcaaaaataaaagtaagcgaatcgatcgccgtataggatgccggattagcgaaattcacctgatatttatcccgtaatccgtatgcaataccacccatggctttgctattacctgaaccctggtccgccaattgtccgtatccgtatcgtgtatagggagaattcgtattattttgagcgattgccgctccggacaacatcataagcaagaacaccaagagtgtttgtctatatcctatcattattatagtttaaaattctatttaatcctttcaatactaaaaatctgtctgcaaagatgatactttttaagtttgtatcaaaagaaaaatcatcgccgcccgttaaaaaaaccaaaagttcaggatatttatgtttcatcaccgttatgtaacccgaaatttcatattccatacctttcagcactccttcgcgcattgccgtatcggtatcgctgcccaacggcaggcgccgtccctcccgaagcaccagcggaagccttcctgtgaactcatggagcgccctaaagcgcatctgcacgcccggcgaaatatttccgccatgataacgtccggcggcatctataaattcataagtaatgcaagtcccggcatctataaccagaatatccttgccgggaaactgttcgtatgcacccaccacagccgccatccggtcatatcccaaagtttcgggcgtttcgtaaagattctccaccggaagcaatgttttttcatttagccacaacaatgaaacgggtaaacttttcagttgtgccaacacccgttcattcaaatcgataacggtagccacgattgccttctcgacagcatatttcgcacatatatccgacagacattcaagcgtttgattagaatcatagagtatttctacaatatccttatctttaaacaccgctatctttgcaacggtattacctatatcgataataagattcattctgcatatatttaaagcggcgcaaagatagcacttttttcctttgttctacatgcataaaagaaaaaggttctcctatgacaattgctgttttaagatttaaagtctatctttgtaacgaattacaagatacactcttgattaaatcaatgataataaaaaagacaaatgaagttatctccatcggttttccgttcacttatttttcttttcttcagcctgtccgtcgtcactatgcaggcacaagaaccaaaaagagttattccggactctatacgtatcagtctgttgacatgtgcctcgggagaagaaatatattcccttttcggacatacggctatacggtacgaaaactatacccgcggcattgacgcagtattcaattacggcatatttaacttcaatgctcccaacttcatccttcgttttgccttgggtgaaacggactaccaattgggagtaaccgattatgaacgctttgccgcagaatattattacctggaacgcgatgtctggcagcaagagctgaatctcactgtacaagagaaagaaaagttgattatgttacttgaagagaattaccgccccgaaaaccggatatatcgttataacttcttttacgacaactgtgccacacgtccgcgcgatttaatagaaaaatccattgacggtacgctgcaatacgcagatgacatgacagacactgattccggcatttctttccgagacctgctgcacaaatacagcaaggggcatccctggtcgcgtttcggcatggacttatgtatgggcagccaagccgacagaaccatcaaccgcagactgatgatgtttgtacctttctatgtacaagagtacttcaaccaagcccgcattgtaaacaaagaaggagaagcacgccctttggtactgaatgaagagaaaataatagtaaccggcaacgaagaagcggaacagtcttccgatggcttcacccctatgcagaccgccctgctccttcttatactgaccgcagccgccaccatctacggcatacgccggaagaaaacgctttggggaatcgattttgcgctgttctttgccgccggaacggcgggatgtatattggcattccttgccttgttctcccaacatcctgccgtcagtcccaattatctgctgtttgtgttccatccgcttcatcttttctgcctgccttgtatgctgaacagagtgcgaaaaaggaaaagaagccgttatatgctggcgaactttattgttttaacactttttatattgctttggctcgtaataccgcaaagatttccgttagcagtgttacctttggcactttgtttgctgatacgttctgcaagcaacctaattctcacatacgataagaaataatgaagaaaggactgataacttccatactcgcactgacattcggcagcctgcaagcccagccactgccgccatctccgaaactggtggtgacgttgacaatagaccaactgcgtacagactacatggaagcattctcgtcattgtatggagaaaaggggtttaaacggctgttaagggaagggaaagtattccgccaggctgactattctttcaatgtcaccgaccgcgcttctgccattgccgctctctacacgggtaccacaccgtccatgaacggcatcatagccgaacgttggtttgaccccaaaaccctgcgtccgaagaattgtgtagacgactccgctttcatgggtaactataccgaccagaacaccgcccctacccaactgttgacttccacttttgccgacgaacttaaaatagccactaaaaacgccgcactggtatatgccattgccccctttcgcgatgctgccgtcctttcggccggacatagcggtaacggcgcattctggctgaatcaccaaaccggcaaatggtgcggcacaacctattacggcgagtatccctggtggctgagccaatacaacgacgggcaatcacccgacttccgcatcaaggagatggagtggaatcctcttcaccccatcacaagctatacattcctgcccgaatggcgcaccatccctttcaagtatagatttgaaacagaaaaggacaacaagtaccgccggttgataaccagcccgctcatcaacgatgaagtgaaccgtgtgacagaggatttgctggataaaagcaatatcggcaaggacgacatcactgatttgcttgcaatcacttattatgcaggcaactacaatcaccgtagcacgcaagagtgtgccatggaaatgcaagacacctacgcccgcttagaccaaagcatcgcccgcttgctggatatgctggaaagcaaagtaggcctgcaaaacgtactgttatgcatcgcgtccacaggatatgccgacccggacggagcagacataggcatctaccgtattcccggaggagaattccatctgaaccgttgcgccactttgctgaacatgtatctgatggctacttacggtgaaggacaatatgtagaaggcttttataatcaacagatatatctcaatcataaattaatagaggagaagcagttgaatcttgccgaaatacaacaaaagtcggcagaatttctggtgcagttcagcggagttaacaaagtatattccgcctaccaactactgctgggttcctgggctccgcagatggagcacatacgcaacgggttccaccgccaccgctccggcgacttgattatcgaagtcttgccgggctggaccgttatgcaggaaaacagcaatgacaaccgcgtagtacgcgctgccaccatagccactcccctcattcttcttggcaaaggaataaagccggaaattatccgcatgccggttgccatagaccgcgttgctcccaccctatcgagtgcgatgcgcatccgcgcccccaatgcgtgcacagccgcaccgctcaattaaggaacaaactccgcattctccgtggcaagtccttaaaataatcagtgcaactttacattatctattgcaaaatcagtaactttgcacgccatataaactttagtaaataataataaaaacaaatacataatgggatttaatgaatttttaagctcgattttcggaaataaggctacccgtgacatgaaggaaataaagccgtgggtagacaaagtaaaagccgcttatccggaaatagccgcattggacaatgatgccctgcgtgccaaaaccgaagaactgaaggcatacatccgtaactcggcagcggaacaacgctccaaagtggaagaactgaaagcaagcgttgaaaacacggaactggaagaacgcgaagaactctttgctcaaatagacaaactggaaaaagagatactggatatttacgaaaaagcattggacgaggtgctgcccgctgctttttccatcgtaaaggaaaccgccaagcgtttttccgaaaatgaagaaatcacggtaaccgctacggagttcgaccgccatctggctgctaccaaagatttcgtacgtattgaaggcgataaggccatctaccagaaccactgggtagccggtggcaatgatacggtatggaacatggtacactacgacgtacagttgttcggcggtgtggtactgcacaaaggcaagattgcggaaatggcaaccggtgaaggtaagactttggtggctactctgcccgtattcctcaatgcactgaccggaaacggcgtacacgtagtaaccgtgaacgactatctggcaaagcgtgactccgaatggatgggtcctctttatatgttccacggtttgagcgtggattgcatcgacaagcaccagcccaactccgacgcacgccgccaggcttatctcgcagatatcaccttcggtacgaacaacgaattcggtttcgactatctgcgcgataacatggctatcagcccgaaagacctggtacaacgccagcacaattacgccatcgtcgatgaggtagactccgtattgattgacgacgcccgtactccgctgattatctccggtccggtacccaaaggcgacgaccagctcttcgagcaactccgtccgcaggtagaacgcctggtagaagcacagaagaaacttgccacgcaataccttgccgacgccaagcgcctgatagcttcaaacgacaagaaagaacaggaagaaggattccttgccctgtaccgcagccacaagtgcttgccgaagaacaaggcattgattaagttcctcagcgagcagggtatcaaagccggtatgctcaaaaccgaggaaatctacatggagcagaacaacaagcgtatgcacgaggttaccgacccgctgtatttcgtaatcgatgaaaagttgaacagcgtagacctcaccgacaagggtgtagacttaattagcggtaactccgccgaccctacgttcttcgtacttcccgacatcaccgcccagctctccgaactggaaaatgaaaaagacctgacggatgaggaacgccttgccaagaaagacgcccttatgaccaacttcgccatcaagagcgagcgtgtacataccatcaaccaactgttgaaagcttacaccatgttcgagaaagacgacgaatacgtggttatcgacggtcaggtgaagattgtggacgaacagaccggacgtatcatggaaggccgccgctactccgacggcttgcatcaggccatcgaagccaaagaaggcgtgaaagtggaagccgccacacagacctttgcaacgattacgctgcaaaattacttccgtatgtatcacaagctgtccggtatgaccggtactgccgaaacggaagcaggcgaactttgggacatctacaaactggatgtagtcgttatcccgaccaaccgccccattgcccgcaacgatatgaacgaccgcgtttacaagaccaaacgcgaaaaatataaagccgttatcgaagagattgagaaaatggtggcagctggacgtcctgtcctggtgggtactacttccgttgaaatctccgaaatgctgagcaagatgctgactatgcgccatatcgagcacagcgtactgaatgcgaagctgcaccagaaggaagccgacatcgtagccaaagccggtttgagttgcgccgtaaccattgccactaatatggcgggtcgtggtacggacatcaagctgagcccggaagtaaaagctgcgggcggtcttgccattatcggtacggagcgtcacgaatcgcgccgtgtagaccgccagttgcgtggtcgtgccggacgtcaaggtgaccccggttcatccgtattcttcgtctctttggaagacgacctgatgcgtctgttctcttccgaccgtattgccggcgttatggacaagctcggtttcaaggaaggcgaaatgattgagcacagcatgatttccaagtctatcgaacgtgcacagaagaaagtggaagaaaacaacttcggtatccgtaaacgcctgctggaatacgacgatgtgatgaacaaacagcgtaccgtagtctacaccaaacgccgccacgctttgatgggcgaacgtatcggcatggacattgtgaacatgatttgggaccgttgtgtcaatgcgatcgaagctcctacctatgaagactgcaagatggatcttctccagacacttgccatggaaactccgttcacggaagaggagttccgtaacgagaaaaaggagaaacttgccgataaggctttcgatgctgccatggaacttttcaaacgcaaaaccgaacgtatggcacaaatcgcttatccggttatcaagcaggtatacgagaatcaaggacacatgtacgaaaacatcctgattcccattacagacggcaagcgcatgtataacatctcctgcaacctgaaagccgcttatgaaagcgaatgcaaggaagtagtgaaagcgtttgagaagtctatcctgctgcatgtcatcgatgaagcatggaaagagaacctgcgcgaactggatgacttgaaacactctgtacagaatgccagctacgaacagaaagacccgctgttaatttacaagctggagtctgtaaacctgttcgatacaatggtagacaagataaacaatcagacagtttccatcctgatgcgcggacaaatcccggtacaggaaccgcaggaagttcgtcaggcagctcccgaacaacgtcaggatttaagcaagtatcgcgagcaaaagcaagacctgaccgacccaaaccagcaagccgccgcccagcaagatacgcgcgaacagcagaaacgcgaacctatccgcgtagaaaagacggtgggacgtaacgacccttgtccgtgcggaagcggtaaaaagtacaagaactgtcacggaaagaatgcataaaatagcaattagtggttagtgattaagggttcattgagtaccaatcttaaccactagccactaaccactaatcgctaatcactataataagagcctcgaacggttaaaaactgttcgaggcttttatttattcaagtaaaagattacttttgtttttcagaactaagaataaaagactatgactaaatactcttattacctgttactgtcttgtttgatgtttttggcgggttgccaaaccgtcgaaccgcttgccatagattatatgttaccggcggatgtaagtttcccaccgagtttgaaacgggtagccattgtcaataacatgcctgaagttccggacaacaagcctattcttgccaaagagaagaaaaaagacgattttgagatagccagcaaaacagattattacaacggcaatgccgctattgccacggaatcccttgccgaagcccttgcccacgagaactacttcaacgaagtggttatctgcgattcggccttacgtgcccacgatgtcactcctcgcgaaggagcgctgtcacaagaagaaacaaaccggttggtgcatgacttggacgtagatttcctcatcgcattggaaaacgtacagatacgctctgtccgcaaaataaagtacatgcgcgactggggcatttattacggcacggtagatgcccggatatatcctactgtcaggatttacctgcccaaccgcagtacccctatggctacaatcaacgctaacgacagcattttctgggaagaaaccggaaacggtccctttgtacaaagcaacctcatcagtgaagaagaactgataaaacaagcttctgattttgccggaaccataccggtaaaaaaactgctgccgtattggaaaaccgccaaccgctatctgttctgcggcggttccgtaaacatgcgcgatgccgccgtatatgctcgggacaagcaatggaacacagccatcgggctatggaagcaaacctacgccacccaaaaaggaaagaaaaagatgcaggcagcctataaccttgctgtcggctatgaaatgcaggacagtattgccgccgctctcgactgggcgttgaaagcgcaagccgaagcacgtatcgtagacggcgtggataaaaaaggtttgactcaccttggcaaagcggatatcccctactacgtccttacaacactttacgccaccgaattaaaggaacggaaagaaggcttatcgcgcctaaatatgcaaatgcagcgatttaataatgatttttagtcaaatactgtaaatgtaattgttttttttatacctttgaacatccattaagtaaagaaaagcaattatgaaactcagtcaaccggcattatctcttctcgaagaaactatcaaacaggcaatcggcaagtacgcttgcggttgtgagcagacagtcgttacggatatccatctgcaagccaaccaaagttcgggcgaattttccatattcgatgatgatgacaaagaactcgccagtaccaccatagaagaatggatgacatacgaaggcgatgatttctacgaaaacatggaacgcatcctgagcaatctgctctgcaacctcaagaaccggggtgcttttgacaagctgaccatcatgaagcctttctctttcgtattggtagatgacgacaaggaaaccatagccgaactcttgttgctggacgatgacaccctgctggtaaacgaagagctgctgaagggattggatgaggagttggatgctttcctaaaagacttactggagaaataacgaatcatatacgaatcgtacaacgtacataaaaaaggtccggactttattgagtccggacctttcttttatatcggagatactgtcttacgctttcttcaaagcggcaatactttctctcagtgagctgatgatactctccgcgtcctcctgtttcttgcgttccatttcgataacggcagcaggagcattattcacgaacttctcgttactcagtttcttcagaacgccttgcaggaagccttccttatgcttcaattcagcttccatacgggctatttcggcttccacatcaatcatgttgcccaaaggaacggcaaattccgttgtgcctaccatgaaagcggcagcgccgtcggccttagcctcaactgcggttacggcagaaaggttgcacatcttgataatgacagcatcgaaagcagccaccgggttttcaccgacaacctgtaattccaacggttctttttgggcgatgttcttctgcaaacggatagaacgtacattactgataacctctttcaccacctcgaactgctgtacaaaagcctcgtccacttccgtcgacatggagatagggcttaccataaggctttctccatccttacggtcgacgatgtgctgccacaactcttcggtgatgaacggcatgaacgggtgcagcagatgcaacagattatcgaagaaaccgatagtcgtatcgtacaccttcttgttgatgggctgtccgtaagcaggcttaatcatctccagataccaggaagagaactcatcccagaagagcttgtacaccgccatcaatgcttcgctcaaacgatacttgccgaacaggtctgccaattcggcagccacggcattctgtttggactcgaaccagcgcatagccagttcggcagcttccggcacaggcacttcctcactcacttcccagcccttaaccaggcggaaagcattccatatcttattgttgaagttacgtccctgttcgcaaagcgcatcgtcaaaaaggatgtcgttgccggcaggagccgaaagcatcatacccatacgcacaccatcggcaccgtagcggtctatcaggtcaagcgggtcgggtgaattgccgagcgatttggacatcttgcgtcccagcttgtcgcggacaatacccgtaaagtaaacgttcttgaacggcatcttaccttcgtattcataccctgccataatcatgcgcgccacccagaagaagataatatccggccccgttaccaggtcgctggtaggataataatagttgatttcttcgttgcccggattcaggataccgtcgaacagggagataggccacaaccaggaagaaaaccaggtgtcgagacaatcctcgtcctgacgcaaatcctctattttaagggcaggatttccggtcttttcctgtgccagcttcaaggcctcttcgggagtggctgccaccacatatccgccttccggcaggaagtaagcgggaatgcggtgtccccaccacaactggcggctgatacaccaatccttgatgttctccagccagttcttataggtatttttatatttggcagggtagaatttcaagtcatcattcatcaccgggggcagagccatatcggcaaagtgctgcatcttgaggaaccactgcatggagagcttcggctcgattgccacattggtacgttcggagaaaccgaccttattggtataggcttccaccttttccagcaacccggcaccctgcaggtctttctcaatctgctcgcgtacatcgaagcggtccattcctacgtacagtccggctgcttcgctcagcgtaccgttgtcgttgaagatgtcgatggcaggcaggttgtatttctcgcccagcatatagtcgttgacgtcgtgtgcaggagttaccttcagacagcccgtaccgaactccacgtctacataatcatcctggataacaggaataacgcggttcaccagcggcacaatcactttcttgcctttcagccattggttcttcgggtcggcagggttgatacacatcgccgtatcacccatgattgtttcgggacgcgtagtggctaccacggcataacgcttgccggcggcgtcacgatgaacgacttcgccttcggctcccgtctcacctgacatatcatcatcggcaacgtaatatctcagatagtacagtttgctatgttcctccttgtagatgacttcctcgtcgctaagggcggtgagagccttcgggtcccagttcaccatacgcacgccacgataaatcagtcccttgttgtaaaggtctacgaatactttgagcacgctttcgctgcgtttctcgtccatggtaaaggcagtacggtcccagtcgcaggaagcacccagcttacggagctgtttcaggatgatgccgccgtgctcgtccgtccattcccaggcatgcttcaggaattcgtcgcgggtaaggtctgttttcttgatgccctgcgcggcaagcttgttcacaaccttggcttcggtggcaatggaagcatggtccgtacccggaacccagcaggcgttcttgccttccatacgggcacggcgtacaaggatatcttggatggtattattaagcatgtgtcccatgtggagcacaccggtgacgttagggggcggaatgacgatggtgtagggctcacgaccatcgggtttagaactgaataatttgtggtctaaccaatactggtaccactttccctctacgtcagcgggattgtacttacttgctaattccatgtttctaaaatctatattttgttataatgggcgcaaaattaataaattaatagctttatccggcaaaagcaatgaaaagaattacatacctttgctttacaaatgataattttatacggagttgccgtaacaagcacccggtgccgcttcggcttcggctaccgaaaccggaagtttccacgcaaggaaacaggagtatacacgcagggaaacgacagtgtctacgtaaggaaacagcagtttccacgtaaggaaaccggagtatccaccgcgtgaaactcccgttcccacagggagaaacaacagcaccgaaggcaggaaaccggcacgggctccaaaaagaagaatagaatgaagcgtagcataacaatagcaggagtgagattcagaggcaagtcattacttttgatattttttttgttgctcgtattgtgcgtgcagacagtacccggtttgggagatgcctacgccatgtacgtataccctcccatcgcccgggtactttcgtccttctcccggcttgtgcctttcgccatcggcgacctgttcattgcgctaagtatcgccggcgtacttctctaccctgtttacgcacactgcatccgcaaacagaaatggaaccgtatcctgcagaaagatgtaaaatatcttctatgggtgtacgtatggttctatctggcatggggactgaattactcgcaaaaaaacttttacgagcggacgcgcattccttacaccgcctatactcctgataattttcggagttttacagacagctacatcgagaatctgaacagctcttacaccgatattacgtcggtcgaaaaagagctggtctgccgtgaaagcgtacgggtatataatcaaatcggtgactccttaggcgttcaccgccccttccatcaaacaccccgcgcaaagacgatgctattcaccccactgatttccatggtaggcgtcaccggcagcatgggacctttcttctgcgagttcaccctgaacggcgacttgctcccctcgcaatatccggctacttacgcccacgagcttgcccacttattgggtatcaccagcgaggcggaagccaatttctacgcctatcaggtatgtacacgctcgcaagtgcaggccatccgcttcagcggttacctttccgtactgccgcatgtcctgaacaacgcccgccggctcatggctgaagaggaatacgcgcagctcttccggcgcatacgtccggagattatcggactggcaaagaagaacagcgagtactggatgaagaaatacaatcctgtaatcggccgcattcaggaccggatatacgacttatacctgaaaggaaacaagatagaaagcggacggaaaaactactcggaagtggtaggtctgctgatttcgtatgaggaatggaagaaaaacagtatctttgcgtcaataatgtttaattaaaaaataactcatgcaacatacaagaaaggaacagatggaagccttcggccgcttcctcgacatactcgacgaactgcgtgtgaaatgtccctgggacaagaagcagaccaacgaaagcctgcgtcccaataccattgaagagacttatgaactatgcgatgccctgatgcgcgacgataagcaggatatttgcaaagaactgggagacgtgctgctccacgtggctttctatgccaagataggttcggaaaccggcgatttcgacataaaggatgtatgcgaccgcttatgtgaaaagcttatcttccgccatccccacgtattcggtgatgtgaaagcggagactgccggacaggtatccgaaaactgggaacagttgaaactcaaggaaaaagggggcaacaaaacggtgttgagcggtgtgcccgccgccctgccctcgctcatcaaggcataccgcattcaggacaaagcccgcaacgtgggtttcgactgggaagaacgggaacaggtgtgggataaagtaaaagaagaaatcggagaattccaagccgaagtggcccgcatggacaagcagaaagcagaagaggaattcggtgacgtaatgttcagccttatcaatgccgcacgcctgtataaaataaatccggacaatgcactggagcataccaaccagaagtttatccgccgcttcaactatgtggaagcacatagcatcaaggaaggcagaaacctgcacgacatgacgctggaagaaatggataaattatgggaagaagccaaagcattggaaaagaaaggaaactgaaattcacttactatctgtttcttttcaggcacggaattacatggatttcacggaaaaagataaaataaatccgtgtaattccgcgtccgaaagaaatcatcaagtgtatttggacacactctccttttaaaggaacagttacaacctgtaactgttcagaacagtcattttagttttgacgcacccgcacaattttcaatccggacatatatcctttttcatttcttgcccgactggggtttcgacgccttatctttgttgtcattatgccgcatccctttcagcaattcccggtgaaaacgcatctcggctttctgcaccagataaagtttcttggcagacaatatcttcttgaacttcgcaaaataagtcttgtccaaacggtcggcagcgatacgggcatcgtacacgccttccataatcacatcatattgggcttcggtggtcttttcgtcctttccctgacgaatcagactccacgccttgtcattctgctcttttttcttgtcctgcaattcaaaataaagaggaaagaacctggctgcctcttccttggtcaatccggctttttctgtgatatatgctttttgtctggcacggaactcagcaggcgacaaacgttggttgcatccgtccgctgcccgcaatacgggtgccagactgcacatcattactaataaaacaatcagctttttcatttcttttttcaatcggttaaagttctctacggcttattcggcatcggaatcggccagatatacatacaatgagtagtcgtcaagcatggagttatccaccgccatgttgatatattccatttcggtttccgtttcgtcggcagccatgcggtcggttgcagccggcgtacggtcagaggaagccacgcggataatcaatgccgcacctacaaacatagctgccatataggcccagggtttcactctctcccacatcgtaggctctttctgttcgaaggcaagtttctccttttcgggcagacggttcatcagctccgaagtgaaattctcaaaatatccttcgggaacacggaaagcattctccgtccctactttcttgagtatgttgtcttcttctttcataagctcttctcctttctgtttggttagactttttttcacgttaaaggtttaatcttcttctcccaatatcttctctattttttttacggcatggtggtaggacgctttcaaagcccccaccgaagtaccgaaaatatcggacatctgctcgtatttcatttcctggtagtacttcaggttgaacaccatgcgttgcttttcgggcaaggtgagcaacgctttctgcaaggccatctgagctttgtcgcccgaaaagtaaggatcgctctccagcttctgaagggtgtcggcttcgggagcgtccaacgacacggtgctcgccgcccgctgtttgttcaggaaagtaaggcattcgttcagggcgatgcggtagagccaggtggagagtttggcctctgcccggaaataatcgatattgagccatgccttgacgaaggtattctgaagcaagtcgttggcatcctcatgcgaaagcaccatgcgccggatttgccagtataactgctcgctgtattgcgccacaatcatctcaaatccccgcttctgcgtactctcttcctgaagaagcgccagcacttcgcgttcgttataagaagggttcatatagtctattcacatttatatcttttctctacgcaaagatagaaaattaaaaacgaaaagccatccgcaagaggcaaaaagcccggcaggcacaaaagcatattgccgattcgtttgtttaatgctcctcttagacttggcggcagatacattctgccagatggtcgttgacaaagcctgctgcctgcaaatgcgcgtagcaaatcgtgctcccgaagaacttgaatccccgttttttcatgtccttgctcatggcatcggattggggcgatgatacaggaatatcgctcaatgagtgaacggtattcacgataggcttcccgtcggggaagaatgaaagggtgtagttataaaagctgccgaactccttctgcacggcaaggaacagccttgcgttcgtaatggtcgatttgattttcagacggttccgcacaataccctcaaactgcatcagacgctcaacgtcctcatcagtcatttgcgccacttgtccggcatcgaagttgcaaaaggctttacggtatccctcgcgctttttgaggattgtgatccagctcagtccggcttgggaactctccaatacaagaaactcaaacagcgtcctgtcatcggtcaccaatcttccccactcctcatcgtggtacttcacatacagttcatccgttccgcaccagccgcaacgtccgtttattatatcttgcatacttataatatttatacgtcagcaaagatagcaaaattccgattcacaccgatatacaaagcgtttctttggccaactgcgtgtccggaaagacagcgcgcgcctcatccagcaatacctgctcatcgtcataacgggcggagaaatgacctatcaacagcttcttcacttccgcatcgcgggctatccgtgcggcttgcgaagcggtggtatggaacgtttctttggcacgcggggcggcatcttcggcaaaagtggcctcatggaaaagcaaatccactccttttatctgttccgttatggaaggaagataaatcgtatccgaacaataggcataacgccgcggggcagccgagggacgggtgagacgggcattgggtatcacctctccttccggcgtaacgtaatccgcaccgttcttgatacggttcagctcgtacaccggcacttgatagaagtctatcatgtcgcgcaggatatgattgaggcgcggcttctcggcaaacagaaaaccgcagcaaggcatgcgatgccgcaaaggaatggttgtcaccgtaagcgaccgatcttcataaatcaaggcggcttctttcgtctcgaacgcgtggaagaagattttataggtcatctgatgattgaagaatgcaagcatcggcgtaagaagttcttccaaacctttgggagagtgtatatgcaggtcggccgtacgccccaaaagattaagcgtggatatcagtcccagtagcccgaaacagtggtcgccgtgcaggtgggagatgaagatacggttcaaacgcgagaatttgaggcgtgactttcggaattgcaactgtgcgccttctccacagtctatcataaaaagcttgtcacgtaagttcactacctgcgaagtaggaaaatggcgggtggtgggcaatgccgaaccggagccgagaatatgtagttcgaatttctccatgatggtgcaaagataagggtaatcatcacagattgcacagattatgggtaagaaattaagagcctgcctaaaaagaaagggcacttgtgtttgccacaagcacccttaccttatttatatggagaagtaattacttctttccggcttccatttgctctttcaaagcagccagagcgtcgatgtcgcccaaagttgtagaagcagcctggttttggatagaagcaggagcttcttctctcttaccggaagacttcttggcagctttcttttctgctctttcttcagccttggctacatcttcgaagatgcggctgtgagacaggatgatacgcttagcgtccttgttgaactcgataactttgaattcgagcttctcgtccaactgagcctgtgagccgtcttccttaacgaggtgtttcggagtagcgaaaccttctacgccataaggcagagcaacaactgcacccttgtccagcatttcgatgatagtaccttcgtgtacagaacctactgtgaatacagtttcaaatacatcccaaggattctcttcgagttgcttgtgaccgaggctcaaacgacggttttccttgtcgatttccaatacctgtacatcgatgtccgcaccgatttgagtgaattctgaaggatgtttaaccttcttagtccaagacaggtcagagatgtgaatcaagccgtcaacaccttcttcgatttctacgaatacaccgaagttagtgaagttgcgaacttttgcagtgtgcttggaaccgataggatatttctcttcgatagtttcccaaggatcagctttcagctgcttgataccgagagacatcttacgttcttcgcggtccagagtcagaactacagcctcaacttcgtcacctaccttcatgaaatcctgtgcagaacgcaagtgttgtgaccaagacatttcggatacgtgaatcagaccttcaacacccggagcgatttcgatgaatgcaccgtagtcggccataacgacaactttacccttcacgtggtcacctaccttcaagttaggatcgagagcatcccaaggatgcggagtcagctgcttcaagccgagagcgatacgcttcttctcatcatcgaagtcgaggataacgacgttgagcttctggtcgagttcaaccacttctttcggatcgctgacgcggccccaagagaggtctgtgatgtgaatcaaaccgtctacgccacccaggtcgatgaatacaccgtaggatgtgatattcttaacggtaccttcgagaacttgtcctttttcgagtttaccgatgatttctttcttctgttgttccagttcagcctcgataagagccttgtgagatacaacgacattcttgaattcctgattgattttaacaaccttgaattccatagtcttgccaacgaatacatcgtagtcgcggataggcttaacgtcgatttgagaacccggcaagaatgcttcgataccgaatacgtcgacaatcataccacccttagtgcggcacttgatgtaacccttgataatttcttcattttccaaagcagcgttaacgcgatcccaagaacgggtagcacgagctttgcggtgagacagaaccagctgtcccttcttgtcttcctggttttcgatgtacacttctaccgtatcacctactttcaggtcgggattgtagcggaattcattcaaaggaatgataccgtctgatttgtaaccgatgttcacaactacttcacgcttgttcattgcgattacggttccgtcaactacctcgcggtcgttaactttgttcagcgtgttgtcatacgccttttccaagtcttcgtgacttacgtttgttacggtttcaccgttttcgtaagcatcccagttgaagtcctcaatgggagcaacattttttaaattttccattaataaataaattgtttaactcgttaattaagtgagactttatgttgactcatattaaatcgggcgcaaagataggagtattttcttgaatgacaaaaagttctttctgaaaatatccggtctttatgcccgatttctaaagatttacaccttattatatggtagaattctccttgacatatgccaaagccgcccctatggccgtgcggtattccgcatagggcgggatatggaaacgcacatgataaatgctttccatcttcggaaacacttcccggcattgcggcaactgggtaagattacctatcagcacaaagtcctttaccggactgttcagggcggaaagcacagccgcaccgccgatagtctggagcacggtataaatgatgccgcaggcaatgtcttccggtgaggcgttactgtcggcctttccgaacaatgaagcggtagcggatacgggcaggtcgggcaatgcgttgttacagatatcgccgatttgcagattgacgcgggtcacatcgccttttgccgccaaaccggcaacctgatgaatgtcgtgtgttttgagcaacagccgcgaaagtccctgtaaggttccgccaccgatacccataccgccgatatgctgtatttcatccccgttgattcttacaaaggaggtgcctgttcccatgctgacaactatcagccggtcgatgtccgtggcatggcgcgccccgagtccgttggctatgaactcatccgtcttgcgggtgggaagtccgtaaagcgggctgtccacaaacgcactgcccacaccggtcagcatcacctgctccacatcggacaaatggattccgttatcatagatatacttgccgaacgctccgaacagggaagttaccggatcggctgccgttatgaacatcggagactgtatcttgcctttattgagtcctacgattttagtagtgcttccacctacgtctatgcctattacaattcccatagtcttaaaattttggcacaaagataaagtataaattcttataatatgcctttcggacctacctattgaacaactcaaacgtaaacttaacccctacttcctggtacttccagtttgcaaagcctgtaaaaacgccgaaatcgaagatgtgcgtaccgatgccatacccaagctcaagataaggattcaggtggggaaccaccagagcgttcagatacaaccgttcattcaatacgtattgagtatatttcttcaagtggcggagcagcaggaaaggagcctcgtacgtaaaatgcccgcggatgtacttacgggacgagttataccaacgcccgtcgagcaactggaacactccgccgatttcatcattccagcctacgggaagattggaacgggccagattggcgaaatccacaaaataaagctctttctgattcgtaaaagcaccccagccgaagcggtagtaaatgtcacgcatcaatcccaacgggatgttgtgctggaagtccacttcaatacgttcgtactttccggtgctatgcatgacaccgctgataccgcgctcccagtctacggaaacggtgggatatttggaatgaaggttgattttacggtcaccgctcatataataatactgaccgggagtccacgtcaggcgtacacggggtgcaaagctgttataactgtggcggaactttttcagaaccgaagggtcgaatcccggatagacggatgacacacccgcagacatcacattcggagcatcggggtagacaagaacgaatttagaacgctccacttcggtacgcctgtgtaaggaaagccccacatccagagtcagaccgttgacaatttcccagctgtggcgtatgtgcaaatacaagtccttaaaatagtccaggtgaatctggtcgaaatcaaagatactgtcgggaatagctttcaaatcgtccagcacatcgctgctgtagatacggttaccgttacccacgctgacatgcagggcggcacgcttgcggggccaatagtcgaaatcggaattgaccgaccagtaaaactccttccgtttgaagttgtaacctaacttgggaacgatacgcaacagacggtcgcccttaaacagccggttgtatttaaattcctgacggtaagagaaaccgttgctcttgctgtaactcagcagcaaagggtttataagaggcgaacagcgcacactccccattttggcaaggtctaccgtatacttgcttaccagcgcatcgcctatctgcccccagaactccagccgcttgttcttgggctttttcttatagagaagcgtgtcacggcgcaagaagaagtcctcatacagctttttctcatgcgaagtcagcggaataggacgcagcttattgaagtgggcggtatcacgccggtaagcattggtatccgtcagcagagtataagattccgacaggtcatatttgctttttgtcctgttccgcacaacagccgggtctttctgactaatctccttatagtcgagtaccgccgtatagctgccgtcgatgacattgcccagcagacgaaatgtggcatcgatgttgaaatgcacaggcaaaaactcattagcgctccccacctgtcccattcttaccagattattaaaacgcagcatctcggaacgcccggaaaaacgaatctcgcgcacactccacacattgtcgctgaccaccatgtatccccccacgagctgaaaactcttgctcttcggcataaaacggatacggaactcacggttgtgcgcttcacccattatggaatctatataataggtatagaatttctttgcattggaagccagcggagagagcagcttatcatacagcaaggtggaagagtagatattgatgtggaagtattcaagcaaacggccgtccagttcccaaagttcggaagaagtgcccacactggctttcactttctggtcgtaaatatcgggagcggtataatgcagttcgctgtatgtctccatcatatactcccggacccctttcttcatacggaacatggaagggataaagcggagcaggtgatttttcttgcttatgtttgcccagcctttgatataaagttccgccttgtactcatcgacaacgcgctcgtaaaaaggcgcaaagaagataaccttgtccataatggaatccgcataagcccgttgtcccgcatacgattggggaacagccgtagcacccgccttctgcaaacttgcacacaagaaacagattcctatccatatgcatataatatgtttcaaccgcaatatcttcttatgagggaacaaatatagaaaaaaagtaataacttccacctttattccattttcattttcagaggacgatatttctccaaaaaacattattttcaagagcaccccttattttttaggggtatatcttcaaaaaacatataaaaaatcaagattaccccctgaaaagtagggggtaattcagaaaaaacatataattttgcgcccaacaaccaataaaagaagagactaatatgtcaaaaatgagattttttgctttgcaagagctcgccaatcgccgccctcttgaagtcatcactccttcaaacaagttgtccgattattacggcagccatgttttcgaccgtaaaaagatgcaggaatacctgcccaaagaagcctacaaagctgtaacagacgccattgaaaaaggaactcccatcaacagggaaatggccgatttaatagcaaacggcatgaaaagctgggcaaaatccctgaacgttacccactacacccactggttccaacctctgacagacggtacagccgaaaagcatgacggcttcatcgaattcggagaagacggagatgtcattgaacgcttttccggaaagctgcttatccaacaggaaccggatgcttcttctttccccaacggtggtatccgcaacacattcgaggcacgcggatatacggcatgggatgtttcttcaccggcttttgtcgtagacaccacgctctgtatcccaacaatcttcatctcctacacaggcgaggcgctggactataagacacctctgctcaaggctcttgcagctgtggacaaagccgcaacggatgtctgccagcttttcgacaagaacatagcacgcgtatatacgaacttgggctgggaacaggaatatttcctcgtcgacctggcgctctataacgcacgtcccgacctatgcctgacaggacgtacactcatggggcactcttctgccaaagaccagcagttggaagaccattatttcggctctatcccgccacgtgtcactgcctttatgaaagaattggaaatagagtgccacaaactgggcattcccgtcaagacgcgccacaacgaagttgcccccaaccagtttgaactggcccccatcttcgagaacgccaatcttgccaacgaccacaaccagctggttatggatttgatgaaacgcatcgcacgcaaacacaactttgccgtgctgttgcatgaaaagccatacagcggcgtgaacggctcgggcaagcataacaactggtcgctctgcaccgatacgggaataaacctttttgctccgggaaaaaatccgaaaggcaacatgctgtttctcacattccttgtgaatgtactgatgatggtatacaaaaaccaggacttgctccgcgcttccattgcaagtgccggaaacagctaccgcttaggcgccaatgaggctccccctgccattttatccatattcctgggcaagcagttatcttccatcctcgatgagatagcccgtcaggtaagcaacagtaagatgacagccgaggaaaagactacgctaaagttaggtatcggacgtatccctgaaattctattggacacgacagaccgcaaccgcacctctcctttcgctttcacgggaaaccgttttgagttccgcgccgccggttcatcagccaactgtgctgcggcaatgattgccatcaatgcggcaatggccaaccaactgaacgaattcaaagtatccattgagaagctcatggaagagggtgtcggcaaggacgaagctattttccgcattctgaaagaaacaatcatcgcctcggaacccatccgttttgaaggagacggctattccgaacaatggaaacaggaagctgccaaacgcggactgaccaatatctgccatgtgccggaagccttgatgcgttatatggacaaccaggcacgttccgtactcatcggcgaacgcatcttcaacgaaacggagctggcctgccgtcttgaagtggaactggaaaagtacacaatgaaagtacagattgaaagccgcgttttaggtgatcttgccatcaaccatatcgtaccgactgccgttatctaccagaaccgtttgctggaaaacctacgtggactgcgcgaaactttcactccggaagagtatgaaatactcagcgctgaccgcaaggaactgatacgtgaaatctcccaccgcgtaacagccatcaaaatgcaggtacgtgaaatgacggaagcccgcaaggttgccaaccacatggacaattacaaagacaaggcctttgcatacgaagaaacagtacgcccctacctggaaagcatccgcgagcatatcgacaatcttgaaatggaaatagatgatgagatatggccgttgccgaagtacagggaactgctgttcaccaaatgataaatgaacggctttactgataaaccgacttcaaattatgaatgatgaacctgccgcattgtcatgccaaacggtaattcatcattcataatttaaaattccttccccctttccttgcacttttttgatacaaatgtgtcatttttaattttttctttttacatttgtgctgtacaacacagttttgcagcatttatggtaaaaataaatttatccgatattaatgttccgaagttgattcccgatatatggtcacctctgaatgaagaacagcgagagtttcttgccaaccattttacgcttcagaattataagaagaacgagattatccattgtgaaggcgagacacctacttgcctgatgtgtctgctgaatggaaaagtcaaaatctataaagacggtgtgggcggaagaagccagattatccgtatgatcaagcccactgagtatttcggatatcgcccttattttgccaaagcagattatgtaaccgctgcctgtgcatttgaaccgtcattggtctgcctgatacctatgactgccataatgacattactatcgcaaaacaatgaactggcgatgttctttatcagacgattgtccattgacctcggtattgccgacgaacgtacggtgaacctcacccaaaagcatatccgcggccgtctggcagaatcgcttattttcctcaaagaaagctatggcctggaagaagacggttctactttaagtatctacctgtcccgtgaagatttagccaacctttccaatatgacaacatccaatgctatccgcaccctctcacaatttgctgcggaacgcctgattaccattgacggaagaaaaatcaaaattatcgacgaggaaaaactgaagaagataagcaagataggataaacttctaaaattaaaaattgagaataaaaaaatagggctgcgcgatacaagtgttgtataacaaacaccgcgcagccctatttttttattctcaattcccaatttttaatttaacaagaatctttccgcctcaatcgctgccatacatcctgtagctgccgctgtgatggcctgacggtaatgagggtcggcaacatctcccgctgcaaacactccgggaacctttgtacggggagtaccgggttctgtcagtatatagcccgtttcgtcggtgtccacatacggtttgaaaatatcggaattaggcttatggccgatagccaggaaaaagccgtcgatagccaggtcataacgctgttcgtccgcttcacccatacgcttcaccaagtgtacgccttccacaccgttatctccatataatcctaccgcattgtgttcaaacaaaacttcaattttctcattctccattacacgcttctgcataatcttggaagcacgcaagaacggtttacgcacaatcaggtacactttgcttgccagacccgccagataagaggcttcctcacaagccgtatcgccgccgccaactaccgctacgaccttcttccgatagaagaaaccgtcacaggtagcacaggcgctgacacccatgccggcatatttcttctcgtcttccagtcctaaatacttggcagcagcaccggtagcaataataacggtttgcgcttcaatgaccttttcttcatcaatggttatcttatagggagacttactcaaatcggcagccgtagccacgccgaaacgcaagtccgcaccgaagcgttcagcctgtttgcgcaaatcctccatcatctgcgtaccgctgatgccttccggataaccgggaaaattctcgatatcggtggtggtagtcaactgtccgccgggttgaagcccctcataaagcaccggagaaagattggcacgtgcagcatagatagctgcggtatatccggcaggaccggaacctataattaaacactttactttttctgcttccatattattcttttttattagtaacgtttatcatcttaaatcaaccaattcagctgtaggatatgctttcctgtcaaacacaaaaaggctgtcatcatagttcttgcccgtctgataggaatttatgaacactactgccgcatctttgctgccccgctgaaccatactcagttttaacgggcggaacgaacctttttctatatacaggataatacattgcatatcctgactgcgtttggtagcgttcatcaccactttatacgccgtatcatccgaagcattgccggttttagccactttcagcttataatcctgcttataaagcgacaaccacgaataaggattgatgctctgcaactcttcgggagtgggttcggaaacattaacctcatcgctcgaagcaagataactccactgtgtgcgtccgtcgaaccatgtcgtcactccttccgtctccagcagaaatttatcgcctttcaaacggatggaaccgttcgtattcccttcaggcgcacggacagagaaagtgattttgaccccaccttccctgcggaaagcatctgccgcacggtcaagtatatctctggcatccggttgctgtgcaaccatagggatagtcaggaaaagcatccagactgtgaataaaagactgttgattttcatgtacttcaaacgttgatttgttacaaattgttcaaacgcgtttccaagtccgttatatccacgcagaacacctcacgcgctttactgccttgcgccggacctacaatcccggctttctccaactggtccataatacgccccgcacggttataaccgatggcaaatttacgctggataagcgaagtggaaccttgctgctgatacactatcagccgggcggcatcttcaaacagcgggtcaagacgtcccatatccacatcgcccaaatcgccgtttgcattttcatccacatactcaggcaggtagaatgcagtgggatacccctgctgacgggctatgaacttcgttatctccgccacttccggcgtatcgataaacgcgcactgcacacgaaccgggtccgcaccttgcaggaacagcatatcgccgcgaccgatcaactggttggctcccggccggtcgagaatggtacgggaatccaccatagccgacacccggaaagcgatacgtgccgggaagttggccttaatcgtacccgtaatgatattcgtcgtaggacgctgggtagcgataatcatgtgtatacctacggcacgcgccaactgggcgatacgggcaataggcagttccacatccttaccggctgtcataatcaaatcgccgaactcatcaatcaccaccacgatatacggcatgaacttatgtcccttttccggattcaggcggcggttgataaacttctcgttgtattctttgatattacgcacatgcgcagctttcagcaggtcgtaacgggtgtccatttcgatacagatagagttcaaagtctgtacaaccttggtaacatccgttataatggcatcctcaccgtcgggcagcttggcaaggaaatgatgttctatcaccgaatagatgctgaactccactttcttcgggtccaccagcacaaacttcagttccgcaggatgcttcttatagagcagggaagtaatgatggcattcaacccgacagacttaccctgaccggtagcacccgccacgagcacgtggggcattttacacaaatccaccataaagacctcattggtaatggtcttacccaatgcaataggcaggtcgtacgtagactcctgaaacttcttactgccgatgatgctctggcccgagacaatcttcggattggaattaggcacttcaataccgattgttccctttcccggtatcggagcaatgatacggatgcccagcgcggaaaggctgagtgcgatatcatcttccagaccgcgtatcttggagatacggacaccctgttccggcgtaatctcatacagcgtcaccgtagggcccaccgtagctttaatggtactgatttcgataccgaagctgcgcagcgtattgataatcttatccttattggcattctgttctgccatatcgatggtcggttcggcattgtcataatgcttcatcaggtcaatggtcggataatgatagttttccaagtcaagacaagggttatacggctctatttccggaccgcgatactcttcatcctccactgtctccacctcaaagacaggacctttttcctcttgccgtcccgatgccggaatagtggaaacggtatcggacggcggagtctcaatcgtcataagcacttcgtcttcttctttttctttggcaagtgaagctttatgcgttgcggcatctcccaagtcgagcattatctcatgagcatcctcatccttctcttcttttccggcttcttccggagccttcgtttcttcttctcttcccgcatcagaagccgtttccgccattaccggcgatttcttcccctttacagtccaggaatctgtaaactcttccggagcttcaccggatttgcgttccgccttttctttatgtttcaggaaactgagactgaaaagttttctcaaccagataacggtacgtgcactcagataaataaggaagcatatagcagtaaccagcagtatcatccacaaccccggcactcccacttgagacaccagccagttgctgacattatatccgtgcatgccgcccagatagaggaaagagtccttatattggtccacaaacacgaacccgaagaatatcgaaaaccaaatcagcagcagggagcatcctatgaaccacttccacaaacgtaccacgcggacacgcatcagctttaatccggctacagccagaaacaccaagatgaaaaaggaagagatgccgaagcaatcgtttatcaaataactggcaagctgcgccccacgcgaaccggcatagttcttcacgccgttatgcgtggaaatcagttcctgcgcattacccgaatctataatgctctggtctgccgcccccgtaaagaagaaagacgaaaaggccagcagcagataaaccgaaaagattaccagtatcagaccggcaacaaaatgaacggtttcattctttaagacagcagctgcctttccgaaaaaagagatagagtgttccgtatctttggttgtattttttttgaccataatgtattctgctaatatccgtacaatgacgcaaaagtaacaaaaaaaagcttatgcagtaatgctttcaaacctttttcgtacctttgcgtttcaaatcaagaagatatgaaaaaagaaagtcaagtgatattcgaccgcaatgtcgtggaattcgtaaccgtagctgccgagttctgcaagtttctggaacagacggaaaccatgaagcgttccgtcttcgtcgatacatccttaaagatacttcccctgctttatctcaaggcatccatgcttcccaaatgcgaaacgataggcgatgaagccctcgaaacattcgtaacagaggaaacttacgaaatactccgcatgaacctggccggtattcttgccgaaaaggacgattacctggatgtatttgtatcggatatgaagtacagcgaccagcccatcaccaaaaacatttccgaggatctggccgacatctaccaggacatcagagactttatcttcgtattccagctgggactcaacgagacgatgaacgattcactcgccgcctgccaggaacacttcgccctatactggggccaaaagctggtgaacaccctgcgtgccctgcacgatgtgaagtacaaccaaccggatgaggaagaggaaaacgaggaagcggaggaagatgaataaactttaagctatgattatcagaagaagtataaataaagaagaagtaaaggacatgccgaaagccgtcttccccggacagatacacgttgtccagactcctcaagaggcagagcgtgctgtggcttatctgaaaaaatgctccatactgggtatcgacagcgaaacgcgtccgtcattcaccaaagggcagtcgcataaggtggctttattgcagatttcgtcggaagagcattgtttccttttccgcctcaatctcaccggactcacccttccggttatcacgttgctcgaaacccccgccgtaaccaaagtcggcctctccctgcgcgacgacttcatgatgctgcacaaacgtgctccgtttgaacagcgcggctgcatcgagttgcaggaatatgtccgcacgttcggcattcaggacagaagccttcaaaagatatatgccatccttttcggagaaaagatttcaaagagccagcgcctgtccaactgggaagccgatgtgctgacaccgtcccaacaacaatacgcagctaccgacgcatgggcctgcctgaacatatacaaccggctgcaggagctgaagcgtaccggtgattttgaactggcaatcgaagaaagttgccacacaaccacattataacgttaccacatcttaattataattatgtataaagtatatctaaagccaggtaaggaagaatcattaaaacgttttcacccctgggtgttttcaggtgccatcgcacatttcgacggagagccggaggaaggggaagttgttgaaatctatacatccaagaaagagttcatagccaaaggacatttccaaatcggcagcattgccgtccgtgtactcagcttctgccgggacgaggctatcgatgccggcttctggaaacgtaaactcagcatagcttacgatatgcggcgcagcatcggtatagccggaaatcccaccaacaatacttaccgtctggtacacggcgagggcgacaacctgccggggctcgtgattgacatctatgcccgcacagccgtgatgcaggcacattccgccggtatgcacctcgaccgcatggcgatagccgatgcactgaccgaggtgatgggcgaccaaatagacaatatatactataaatccgagacgacacttcccttcaaagccgacctctatcctgaaaacggtttcctgaaagggggaagcgcagataacatcgccatggaatacggtctgaaattccatatcgactggctgaaaggccagaaaaccggtttctttgtagaccagcgcgagaaccgttcactgctggaacgctatgccaacggccgcagtgtgctgaacatgttctgctataccggcggtttttcggtttacgccatgcgcggcaatgccacactggtacattccgtagacagctcggccaaagccatcgacctgaccaacaagaatatcgaattgaactttcccggcgacaaccgtcatgcagcctatgcagaggatgcctttaaataccttgaccgcatgggcgaccaatacgaccttatcattctggacccgccggcatttgccaagcaccgcgatgccctgcgcaacgccctgcaaggctatcggaaactcaacgtcaaagctttcgagaaaatcaaaccgggaggcatacttttcacattctcctgttcgcaggccgtcagcaaagagaatttccgcactgccgtattcaccgccgctgccatgtccggccgcagcgtgcgcatcctgcaccagttgacgcagcccgccgaccacccggtaagcatctatcaccccgaaggcgaatacctaaaaggacttgtgctatacgtggaataagcaggaaccggcttctgtacgggaaggacagaaaaagcccttcatgtactaaacattgttaatatactaaagaaaacaagcaaaacattatgttttataacataaatccctttatctttgcaccgtgtttttcatggtattagatttaaggttaataaagattggctgtctgggatagatagccttcttttttttatacctcccgccttccctttttttgatgctttatacatcgccttttccgataatttgtctacatttgcgttttattaattagttcaacttcgaaagacacgttaatttatagaaagcattatgagcatcaagattcgcttaatcattatgaatttcctacagtttgccgtgtggggagcatacctcacatcaatgggcagttacctggtaaacgtaggcctgcacgagcacatcggtatgttttacgccatgcagggaatcgtatcgttgtttatgcctgccgttctcggcatcattgccgaccgctggataccggcacaaaagctgttaagcttcagtcacttcaccgcagccctgttcatggccgcagccggatactacggcatgacgaaaggtgcggaggtagatttcggtaccctgttcacactttactcgttaagcgttgctttctatatgcctacattggcattgtcgaactccgtggcctacaccgcactcgacaaagccggactggataccatcaggacattccctcccatacgtattttcggcacaatcggattcatctgctccatgtgggtggtggacctgctcggactgcaaaataattacgggcagttctttgcctgcgccatcatcggagtagcgtatggcgtatatgcgctgaccctgccggaatgccccaccagcaagggcgacaatgccaaatcattggtagaggcactgggcttacgcgcctttacgctattcaagcagaagaaaatggctgttttcttcattttctccatgctgctgggcgtttccttgcagattaccaacggatttgccaatccctacatcagcagtttcggcagtattcccgaatatgccggcactttcggagtgcaacatgccaacatcctgatttcgctgtcgcaaatatccgaaacactctgcatcctgctgatacctttcttcctgaaacgcttcggcatcaagcaggtgatgctgattgccatgctggcatgggtattgcgcttcgggcttttcggcatgggcaatcccggaagcggcgtatggatgtttgtactttccatgattgtgtacggtgtggcattcgatttcttcaacatatccggttcgctgtttgttgacagagagaccgaccggggcatccgttccagcgcacagggactgttcgttatcatgacaaacggtttcggtgctactatcggcacactgggtgcacaggcggtagtgaatcactttgtagatttcaacagcaatgtcccgcagatagcacaatggcaatcggcatggtacgtatttgcaatctacgcactgaccgtagcagtggtgtttgccatcgtattcaagtacaaacaccatccggaagatttaaagtaactacagccgatgaacaaaaaaaagattgagctgcaagtattgaatatctcaaacagccaggcacaggccggcgcttatgccatggtgctgggcgagataaacggcatgcggcaactgccggttatcataggcagtgccgaggcacaatccatgatgattgaaatgagaggcatcgttcctccccggccgctgacgcatacgctgtttgcctcagttctcaaggtactgggggcaaccctgttgcgcgtgcttatttacaaagtggacaacggtgttttctattcttacctctatatgaaaacggaagagaccatcctgcgcatcgacgcacgtaccagcgatgccgtggccctcgccttgcgcatggatgcccccattttcatatacgatgatattttagaagccgaatgcctgaaaacagagcacagcatcactcccacccaacagacggatgatgccgccgcagatgccgctacacagaaaaagaccctgaaacaattaaaggaagcccttcaaaacgccatagacgcagaagactacgaacgggctgcacaactaagggatattatcaaccagcataagaaaccataaacaatcatgcacgtattctacacccccgacatacaatcgcaagccgaactgcccgaagaagaagccgctcacgcagtccgcgtactgcggctgcaaacaggcgacgaggtaacactgaccgacggcaaaggcaacttctaccgtgcggaaatcagtaccgccacaaccaaacgttgccttgtcaacatacttgaaaccatcccccaagcgcctttatggagcggacacctgcacattgcaatggctcccaccaagaatatggaccgcacggaatggtttgcagagaaagccaccgaaataggctttgacgaactgactttcctgaactgccgtttttccgaacgtaaagtaatcaaaacggagcgcattgccaagatactggtatccgccatcaagcagtcgctgaaagcacgcctgccccgcctgaacggaatgaccgacttcaaccggttcatcagccagcctttcgaaggccgtaaattcatcgcgcattgttacgaaggagaaaaacctttactgaaagacgttgtccgtaaaggagaagacgcgctggtgcttatcggaccggaaggcgacttcagcgaagaagaggtgaaacaggccattgaaaacggatttgagcccatcagcctcggccgttcccgactgcgcactgaaacggcggcactcgtagcctgccacatattgaatctacaaaaccaataatacgatatgagaaagagtatttccttctatttgctgccggttttattaacagtgctatgcctgagctcatgcagcgaaaccgggcaaaaaacagaatacacgcatgtaatccccgccaatgccacagaagtggcggcactcgacctaaaaagcatcgtcgataaagctggattgaatacctcagacagccgggccaccttgcagaagttcctggggctgctccttgaaggcgggagcgccaacctgaaacaagaagcggaaactcttctgaaagaccctgccgaaagcggaatagactggaacgccccgctctacgtattcgaagcccctacgctgcacaacacggcaatcaccctgaaaattgccgatttaaagaagtttgaagccatgctccggctgcttgcccaggaacagttgtgcaccgctccggtcgaggccggcggttaccggagcgttgaaataaaagacgcaggagtactgcttgcctacaacgacggcactctgctgggagtttacggcggcagtacggaacagttgcagaagctgcaacccgccatcaccgccctcatgcaacaacctgccgacaaaagcatccgcaccggcaaatacttcaccccgatgatgcagcaaaaaggagacatacgcctgctggcaactcccgatgccctccccatggacgttcgcggtgtactgacctggccgcacggcacgcaactgttgggttatgtcctgtttgaaaacggacgtatatacgctaccctgcaaaacgccgatttcaaaggaaataccaaagaaagcaaccagcctttccaccctcaaaattcgcgggagttgcaacaggccatgctgaacatgatgcacggacgagccttcaacatttcattgaccagcaacgaattgcttactttaagcaacctgcgggtgcttatggaatatgctccgaacgaaccggaagtcaacatcctctatcaactgattatgaaaatagaagagctgaacctgcggggagacaagaaccggaccaactttacggtcgttctgaacgaaaagaacgagaatgccctgaaacagcttaccgactttgccaagttgttcattgggatgtaaccggcagccggcattcagcgattcatattcagcacgcaatgcgtaatttgtaaatcataagtaatggaccacattcatttacagcataccctgccccaggtctttgccgcccgtgacaccgtcatttcacaggtgtggcatcaggacatcgtgttcgacaaaggaaagcgctatctgatagaggcttcctccggcaccggaaaatcctccctgtgcagctatatctacgggtatcggcgcgactaccagggcatcatcagtttcgacggacgtaacatccgctcattctccgtcggcgaatggacagatgtaaggaaacattcgctcagcatccttttccaggaactgcgtatcttccccgagctgaccgctcttgagaacgtcttgttaaagaaccgcctgaccaaccataagaagaaaaaagaaattctcgcccttttcgaagcaaccggcattcccgacaaaaccgacgaaagagccggcaagctttccttcgggcagcagcaacgcgtcgcttttatccgcagcctttgccagccgttcgactttatcttcctggacgaacccatcagccacctggacaacgacaacagtgccataatgagccggttgctcatggaagaggcgggcaagcagggagcaggcattattgtcacatccatcgggaagcacctggagctcgaatacgatgaaaccttccgcctataacgcataaaccattatccgcaccatgaacagacttgtttggaaacttctccgccaacatatcagtataggccagttgaccggctttttcctcgccaacctcttcggcatgctgattgtattactgagcatacaattctaccgggatgtactccccgttttcacgcagggagacagcttcatgaaaaagaattatatcatcgccacaaagaaaatcagcgcactcggcagttttaccggaagaagcaacaccttctcccccaaggaaatcgaagagatgaaagaacagtctttcaccgaaagcgtgggcgcctttaccccttccttgtttaaagtatccgcaggcttaggcatgcaggaagccggaatacatctttccaccgaaatgtttttcgagtccgtacccgacgaatatgtagatgtcagcctggataactggcattttgacgagtccgcccaagtcattcccatcatcattccccgcaattacctgaatctgtacaacttcggatttgcacaaagccgtaacctgccgaaactctccgaaggcctcatgagcctgatacagatggacatcatgctacgaggcaacggacgtgcagagcagttcaaaggtaagattgtagggttctccaaccgcctgaatacaattcttgttccccaagcattcatggactgggcaaaccaacgtttcgcccccggcaaagaagcccggccttcccgcctcatcatcgaggtaaagaatcctgccgacacaaccatcagcgactatttccaacagcagcactatgaacccgaaggcgacggactggatgccggaaaaacgacgcatttcctgcgcctcatcaccggtatcgtcatgggagtaggattattcatcagcattttatccttttatatcctgatgttaagcatcttcctgctgttgcaaaagaataccgtaaaattggaaaacctgcttctgataggctatagccccaatcgtgtggcgcttccctacaatatcctgacctgcggcttgaatctggcggtactgatattgtctgtcggcggagtggcatgggtgcgcaattactatacggaaattatcggcacgctctttccacaactggagacggggacactgctcccatgctggacagcaggttgcctgctatgcctcgcagtatcttctttgaatattgtaatgatacgcagaaaaatcatgagtatttggaaaggaagataagcggaccggtgacttatattgcaggtgcagctatctctcaggctccacaaagtacgcatcaaagcagactgaaagcaagcaatcccctcttgttttgagatttatccctcgtgtccacccctgaaacaaccgggaataatcagaaaacaaaccgttgaaaaccccgctttccctcatggattttatgcctttataaggtgtaaaacttcgttttgcagttgcgggccgaagagcctgcatatgcgggcccgacagcccgcaaccggcaaccgccgggcctgcaactgcaaaacggggttttaccataagcataacggtattttgcagggcccggacaaacaaaaacaacgaagcaaagcgctgtttatcttccggctttccccgaacagcccgtggagaatatccgaatttacacgcaagaattacagcggaattacgggacttatgcagaacaatacgctggacgacctcaatccgccgatggagaaaggtattttaacaatattggaataagggaggcacaaggcagatgtaaaagctgttaatcaacgcattacggaataaaaagcaacggaatgtaccccaaaagcggtgatgaccgatgtttggtcgtcacggttataaggtgtcttacaaccgtacaactaccatataatcaactaattgaagtcaaaagtgacgagtgatgacaaatgtaccattatttgccggttgagcttgagttattttacgcttacattgctaatgaattcatttgtcactgcctctttcaaatcgcgcatcttctctccattgatagtgacattctcaaacgtcacattcctcaccatgccgtcccggcttaacccttgaatgagcgaacggttctcgccgactcccgtataagtgatattacggaatacaaccccctcgatactactgccgggctgcctgtcgtacttgggattgaaacggactttcacatagaaaagacgaccttcctgaatgttctctacacggatgtcctcgaacaagacattacgtacccggtttctatcaccgcaatctaccgtcatgcatccctgatacatcgggtcgtcttcatcgtgttccagaatatccacattacggaaaataagattctcgataacctcgcctgttgaagaatccggatcgccatgcccacctacattgataggatgcgcaacgtccgcccacaggacggagttttgtacggtaatatcgcttgaacctccccaccagttccagcgatggttatagagcgcaatacaatcatcgctcgtacggagaaaaacattatcgacaaggaccttgcggcagcacatcatgtcaatgccgtcactccagcttctgcaactaaaggatttcaggttacggataactatatccgaagaaccgccgccgaacaccgtgtagtgttccgggttcaccaccgtaattccatcgaccaatacattttcggaatcggttatttcaatgccgcggacagggtggtctaatattccacgaccgatgatacggacattttccgcattatcaaccagtaatttggctttcagcaccgcacccggcgccagataaacagtagtattgcttggcacgcgtatctgattgttgggcaagtctttcggacggtgcacaccgggaccgaagaacataacgcctttcgcttccccggaataaacctccttctccataggattggcaaaaagatgtaaattgtgcaggcggtcgccattgaactccaccgagaggtaccggggcttatctaaggagaaaaagattgtgttttgcacttgccgaaaggctatctcattgttcaagggacgtatggtaacctcacgcaccgtaccattattcttttttaccatgacttccacgggactgcccatatcaaactgtaccatggaagcgtcttgcggcttgtccaaatcgacctgcaccttgtattcaaacacatcctgccactccccaccgggcatacggacacgcaccgtataatcatcattgtgtggcagccccgtatgcaacccttccggataagttttcaactgtgcctggacagtcatgccgagacatgcccacacaagcaatataacccataccttttgtcccatcacccggctcctcctacaatttggttttcttcgtcacacctttctttatcttgtacgtctttccgcctaatgttaccgtacaagtgccggatgccgtgtaataccatccgtccgcttctttttcgagcaacacattcaccggaacatcggctttgaccgaagccgaaggagtttgcaacagcgtaccgttccctaaaaagagagtacagttctctccctgccggtttccccacagagcgtaggtggcagaggctttcatgccgttacccatcaagcaaggatgagttgcaccgtccgaagacagaatataatccgtacgcccgtttttctgttttacgcaaatccctacatggctgcccggctgcttactctccacctccggaaaagtaacggaagaaatctgctcggtttcctttaccgtcgaaggttcgtaaacggctacaaaaggccggttccatgcctcacccttctgacgggcaacaaacgtaagggtgggttgttccttaatattgtaaggcatgcccggcgtacggctcagaccttcggtcatagggctgagagcggaaaacaccgtgcggtctttttcacctttcatccacatattcatccgaatatcatccttatcgggcattctgattgtaaagacagcttttacatctttaccggtacgggcgcatttcttgtcgaacagataagaataggctcccagatgcgcaccggcaaaagccagttcttcggtaggctgcaggtgcaggtccgtaccgtcggcagcagccaaggtcatctcctgtcccagattatgatagaaataatcgtgcatcttgtctccgccgcgttctttgcggctacggaaaatatctacatagtagcctgtttcgggaccagtggtaacgatactcatcatgcgtgtctggtctgcacggctttccggttcacggaaataaacatcgctgtacgtaacggaagggaatttatcctttgccgccgcagctgcggaagatgccggaaaacaggacagcaaatcgaaggaatgattgctcttcatcaccggataactggaaatgccgtctacacataccgtattgtggctgggaaactgtgagtaatattcggcataatccaatccgctgtacaggtataaaccgataccggcatcagggcctaacacataccccttgccgtaaagctccatcgaaatgccattggcatgcatgtgattgccctcgctggcgttcagggaaatcatcaaactatggcgcgggtgcataccgttgcgctgtaccagccacgacacgtttggtgcgtaaaataaaggagatacataatcctctatcttgcctgcccggatatccggcttcagtgtcaaaggcttgtcgtcaaaaaaagaattgatagacacacgtacattttttttagccgcagctttcccggcatcaggatcaagacatttcagcaaagcagtaaaatatttctcttgctcctcttttccattgacttgagcgttctcaatcatccggacaacaggcgtggtattcagataattcggatgggtatctccgaaaccgcatatcatccggttggggaacaaatactgcggagtggctgccacagctttgggaagtaccggcagttccttcgtcaagtcacaatgcaggttacggtcgaagaggcttgtaaagttggcatagtcattcatcaccacaccactgtaaccgggacattccgcccaaatacccgtatgaggatcatatccgtagtcggcaagttttttcaggctccattggcggatgccggattggttgagtacataatcgatataataaccgcgccctttgccgtcggcgtaatgagcatcatcttcgagtatcatgccgatgtccattacataacgcgcctgcatcagattccaattgttatgggggactccgttggctatgatattatccgcccatttcttgaaagctccggcatagatactcatcttatcggcataatgaaccgccaaatacccgtacaggaagtcataaaggggaacaatatcataaagtatatcttcatggattacctcaaacgaactcataccgaccagtgtctgctggtgaccgtggtttaaatcgacagggacattgcggtaatagataccttgcatataggtatcgaaaacaccggctgccaggcgggcataccgttcttcatcggtcagccaataaaggaaagccgcatcacgggcaattcccataatctcgcggttcaggctttcgatgttacgccccgtcttggcgggatgcactttttccaaaggacggccgggaagagagttgttatggaaagtgacattaccgtctttatcatcgtcatagggaatgacatccgccaatttgggacgtccgtgagtggcgaatgtgccacgcgtaccggtgtaacgcaccgtaggaacgggagctttcgctccgcctgcatgatcgaaactttcaccttttatatatacatcggtggcatgggaattccaatacatggcaagacgcgacaaaagccagtccggctgcgcctcggtcaggcgggtataggaatccgcctttgctttcagtttatcgaacacctcttttgcccatggttcattctctattaaatcacgtgtgacctgctttccgccggcattcgtcagataacggggatgcgtctgagaaagttgcagggtacggacatcgatttgcgcttgcaatgctgtaaccgccgatagcagtaaaagtaatatggcttttctcatctttcaattcgttttgaaaaggaatacgcacaacctgcctcgcacactcaatagtcaagaactttttagcatcctttctgctttcaaactgatatttatttatgttgattcatatactctttcggcgacattccatatttttcgcggaaagaactggaaaaatgcgacaggttggtatatcccgtggcataagcaatctccgatatagtaagcttttggtcttgcgccaataaagtcgcagcttgctgtaaacgaatattcttgatgaagtcccgggcagaaagattcgtcagttccttcagcttacgatgtacatgtacccggctcaatccgacctcggaagcaagcatctcaacgttcagtgcagggtcatccagatgttcattcaccactttcataatcttgtccatcaatatctcgtcactggacttcattgtaattttttccattttatcctcttgctgttgagccccgctgaatttgttacgcagcagtttgcgattggctatcaggttggcaatagtctttttcaacaattccgtgttgaaaggtttcaccatataagcatcggcaccggtttccatcccttccaaagtatcttccggtttggacttggctgtcaacaagattacaggaacatgatttacattagtgttctgctttattttacgacacaaagtcagtccgtccatttcgggcatcataacatcggagataaccaaatcgggcgcatcacgcaaaatcgaatcatacgcttccttaccgttgctgcaagtctccactttgtattcatccgataattccgatttcagataagacttgatttcatcctcatcctccacaaccaatacccgtaaacgtgtctttgccttcatattggttttagattccccctcttcttcagcagccaactcttccagtttcgctaaaacaggcttttcaacagtgtgaaacatcactgtttcttcatctactgcttccaactcatcagtgcgcaaatgtgctgatcccaatggtatacgtagaatgaaacgactaccggaagtatcttccctgtttcgggcaaaaatctcaccatgatgtaactgcactaataaatgagacaagtgcaaaccgataccggtcccgaaattagactttgttacgtcattatctatttgatagaaacgttcgaaaatacgctctattttatccctgtcaatgccgataccgctatccgttatcacaatctcaaaatattcgcgtaatgcatcccgacgtgtaatatcccgacctgttgacaagcggacctgtacctcacccccttccggagtatacttaaaggcattggaaaaaatattcatcagcaccttatcaaagttattaaggtctatccacacttttaattgaggcatctcgtgctcaaaagtaaaacggatatttttcttacgagccatatactcaaatgtctgcatcaaatcatcaataaaacctaccatatccgtttcgcggaatttcataaacatctgccctttatccaacttacggatatccattaactgattgatcaaacgaagaatacgttgcgcattgcgataaatcatcaaatacgttttatgcagctcgttatcttttttatccgccaacagtttctccaacgggttgatgataagcgtcatcggcgtacgtatctcgtgggatatgttgataaagaattgcagctttgcttcattcaactgttcggcatgttcccgtttcattatttcacggcgatggcgcatacgtgacagaatatagttgataatgcccaataccaacagtccggctaaagcagtgtaaatgcaatatgcccaccaggtctgataccagggaggagtgatcaaaatctttacagtacgcgtttccgaataattgccataattgagagcacgcacttggaaagtatatttgccgggcggcaaattattataagtgacacgattctctcccggttcggtattaagccactgggaacctaattcatcgattttgtattgataagaaatttgctcgggattattgtactgcaatgtagagaaaacgatgctgaatgtattatctttataagacaaccggaaatttttagcatcctgtaccgaagtagagattaccggcttcccccctgaaagagtattcttatgtacaggcttattgaatatataaaaatcagtaatccataccttagcttcttttgaagtattgcctatgttttccggaagaaaagacgtaataccattaacaccaccgaaatatatctttccgttcctattcttgtagaaagcaccatgagtaaattcattgccctgcagcccatctcccgaatagtaattaataaagcgattatcgtttatatcgtaccggctgatccccatataggtgctaatccatatgtcatgccgggaatcctcactcaacccgcaaatcacattactaggcaaaccgtctgccattgtaaacctttccagcctatccgtttttttatcaaaacaatataacccatcggtcgtaccagcccaaatcttacccgaaaaatcctcttggataacatagcctacacaaccggaaatcaatgtattaacctttttataattaataaaactctccgtcgacggattaaaacaacttactcctttataatgtcccaaccatatcagtccttcgctgtcacaatatatataattcacccaatcattagcaagttcattcctttttaaatcattggtttcatctttagaagattcataatgctttaaatctccagtcttcaagttatatcgataaaagccggaacctaatgtcccgatatataaatttttctgtttgtcttcggttattgccaatacactttcatcatcaataagcaaaagatattcatagtcccctgttctccgattgaatttagcaaccccacgtgtataggaaccgaaccagagatttttgtctgtatcctcataaatacacattatcgtaccagctacagaacgaacagaattccccggttgataatgcctcagccttttcccttctgcatccagttcgtatacaccctcattgtctgcgccgatccataaatggtcattactatcttgaaaaatagacatgatacatccttgtccgataggattataataaatggacttgtgtccataatactcaaaaggattttcttgtttcggtatcaaaactatccctttctgaaataatcccagccataggttatcatccttatcttccaagattgtatggatcttaccatccgaaaaattcattggagccgaattaatggtatagtcttccaactgtccctttacagaattatatattttcagcccctgcccgtcagtgccaaccaataaccggttatccaccaaagacatacaactaacagacaaagattcattccccatatagggaacaagagtaaagttgttctcttttctgttataacgtaatagccctttctttttggtacctacaaaaagatttccctgcttatcctctattatggtagcaatattgttatcaacaagaaccggttctttgaagacgcgcacttctttcgttgcaggcatataacaaatcagtccatttccataagttcctatccaaatattataataggagtcttcataaaaacaagattggaaattgtaattcgactgtttcagaagatcatctacagaaacagcctgtgtctgccgctcatccaaacgaaacatgccttgaccggtagttgtcatccaaatttccccattatgcaattcctgcatctgtgttatgtgcgaaaacacccgcttaccggcacggaacattggaatttccaaaaaggtatctgtctcacgatcgtacttcattaacccgtcaatacagcctaccagcaaattgcaacggctatcctcaaacaatgtacgtacatagttacttttgatagaagaagagtctgccgaaacatgccgataattggtaaaacgtaagccgtcaaacttatttaatccatactcagtggcaacccaaacaaagccttgctgatcctgaaatatctgatttatcaagctactggacaatcccatgtctgtggtatatactttcccagtctgtgcctcaactccttgaaccatacaacacaaacatattataagtatcttccaaacgcattttttcatagtttctctttttattagatacaaaagtgcgacaaagataaacaaaaagcaatttattccgatacttatatagtttttgtgattaaaaactttgcttattcataaaatgcaagaaaacaatttagttatttttctatatataacatccctgcattacatcttttcatcaatgtaacatatacaaaaaacaatgtaacactaataaaagcccatgttacaaaaaacaaagcaaaggtatcattcataaccaaccgttcgctaaataattcatatttttgtatacgccagaagctgggaatacgttcttcacttcattgctaaccaacagagaatcaaaacaaatgtttaacataaaaaagatagtatatgataacataaaaagaaccttaataagtctatactttaatttaacatttttatttaattaaaaccttgttttttatgaaatgcacaacttattattttaggcccctggggctattattgttactctgcctgatacctctgtgcagtattgctcagaatatcacggtaaagggtattgtgaaagataacttaggcgaatcggttattggcgccaacgtaacagaaaaaggaacaaccaatggtatgataaccgacttggacggaaacttctcgttgactgtacaaaaaaatgcaacgttagtaatttcctatatcggatatgtcacacaagagattgctatcaaaggaaacactaatctcaacattatattaaaagaagactccaaagcattggaggaagtagtcgttatcggttacggtacagcaagaaaatcagatgtaacggggtctatcgcatcagtaggtggtgataaactgcaagaaatgccttctacgaatattacgtacgccttgcaaaatcgtgtagccggcgtagatatgacgcagacatcttcacagcctggtgctaccatgcaaatccgtattcgtggtactcgttcactgactgcttctaatgacccgttagtagtgttggatggtattcctttcatgggaaacctgtctgatattaatcccggtgacattaaaagcatggatattctaaaagatgcttcttccactgccatttatggttcacgtggtgctaatggtgttattttaatcactacgaacagaggagcccaaggtacacctgccaaatttacatataacggttatgtaggtgcaaaatccgtattctctaaatatcctatgatggacggacccaaatatgctgaaatgcgtaaatatgccggtaaatttgaaaactccttagatgaatcagacgatatgaacacggactggcaagaccttctataccgtacaggcatggtaaacagccatgatgtcagtgtagctggcggtacaaacaatggaagttatagttttggtgcagcctattacaaggatcagggcgttattcctacacaaaattacacccgctattcattacgcggttcatttgaccaaggtgtaggtaaatacttccgcttcggattaactaccaatagcaactataatgtaacaaaaggttctaatattgacttatatagcgtacttaacaacactccacttgtcaatccgtacaatgaagacgggagtctgaagagaacagtgaagctcaacagccaggatgaaaattttgttgtgacacgtgatgttgtggaaaatttggaagatagctggttaaatgaaaagaaaggttttggtacctacaacaacctttttgctgaagtacaatgcccatgggtaaaaggtttaaaatatcgtgtcaatttgggcttgaactaccgttctactaaaggtggtgtcttcaccggtgaaggtataaatagctcaacagccgatactccatctactgcatctttagaacatacagaaacgactaactgggcaatagagaatctaataacttacgaccgtacatttggcaagcatcaactgaacatagtaggtatgtattctgcagaggaaactgtttataccaaatcgcatattgctgcacgtgatattcctgcagaatatttgcaatactataatttaggtcgtgcagaaggtactatcaccgttaatccagacaattgggactaccaaaaaagtggtttgatgtcttggatgggacgtgccatgtacacttacgataaccgttatatgctgatggcaactgttcgtgccgatgcatcttcccgcttggcaaaaggccatcaatggcatacatacccggctgtatctgcaggttggaatattggtcaagaatcatttatggatgaccttgaatggttggacatccttaaagtacgtgtaggatacggacaaacttccaatcaagccgtagccccatattccacatggggaaaattatccacacgcccttataacttcggacctactggctatgccacaggttactatgtatctgcattgccgaattatgacttaggatgggaatattcttctacatggaactttggtttggatttcacattgcttggcggccgtttatcgggaacatttgaatattacattcagaaaacatccgatttgctgcaaagtgttaatcttccttcaacttcaggtgtaagcagctatgtaggtaacgtaggaaaaaccgaaaacaaaggtgtagaattcacattaaacggaacaattcttgacaaccacaacggatggacttgggatgcaagtataaatatatcagcaaatcgcaataaactgacagaattagcatccggagctgagcgtgatgaagccaacaactggtttgttggtcatcctattgatgctatttatgactatgaaaaaataggtctatggcaagaaggtgacccctatcttgatattttggaaccaggtggaaacgttggtatgattaaagtaaaatataccggtgaatataatgaagatggcacccctgttcgtcaaatcggaccagacgaccgccaaattatcagtatggaaccaaagtttacaggaggtttcagcacacgcgttgcctataaagggtttgacttgaatgtcatcacagcgtttaaatgcggaggcaagcttatcagtaccttacatcactctaacggttatctgaacatgttgactggacgtagaggccaggtagatgtggactattggacagaggaaaacaccaatgccaaatacccgaaaccgggtggtatccaaagtggtgataatcccaaatatggtagtacattaggatattttgacgcttcttactggaaagtccgcaacatttctttaggttacaaatttgacgaacagaaatggctgaaaaacttcggtattcaaagcttacgtgcctatgtatcaatacagaacccgtttgtaatatgttctccattccataaagagacaggtctggatccggaaaccaactcttacggtaatgagaatgtggcagtaacaagtggcattcaaaagcgtttcttgactgtgggaaccaatgccccttccacacgtaattatttatttggcattaacttgacattctaattaaactttgaaagcatgaaaccaacatttattaatataagagttctgggaactacggcattagccttgctctttgcaacttcttgctcagatatcctggatgaacaaccacgtagtatttatgaaccaactttctttcaaactgaaaaaggtgtagaaggcggtataacttccatgtatgcacacttacgttatatttacggacaagcatactattacaattcatgtttgacaggaacagatgaagcaacttatgcccaatccgccgatggaaacttcaaagatgccgacttatcaggtgtggggagtttgacagcaagcagcagtcgttcggatgtactgtggggaacagctttctctaatatcaacacagctaatggtgtccttgaaaatggttctaaagtaggtgtttccgaggctcttctcgccgaagcacacttcttccgcggtatggactattttttattagtacagactttcggcggtgtgccattggatttgggtgccggtgaattaaaattcaacgtatcaacatcacgcacttctgtacgtaacaccgttcccgaagtatacactaaagccgtttttcccgatttaaaaacagctatcaccaatctgcctgataaccctcgtgtaacaggtggagttactaaaactgtagcacgtttatacttgtcaaaagcatatctgacgtatggttggtggttggaaaatcccaataatatccccacatatccggaatgcgaccgcacagatcccgatggacatgatgctgcatggtattatcaacaagcgtatgatattgcaactgaagcaattgacaatcctggtccatatggcttgatggaaagtttctaccaagttaatgccggtccatacgatcgtaacaaagaaattctgttatatgcagatcacacgcaagaagatgaatattacaatggtggtagcttgagttacggtagtggtggtgcccctgataattttgccggttggatgatgaactggaattacacggacattcaagctaaagacaaagatggcaatactatttcacccgtaattcgtgttgcagaacaagcctatggtcgtccatggactcgtatggcccctcctcatggtgtattcacaaagacgtttaaagataagaccaaagattcccgttacgatggaacatttacaaccgtttaccgcggtaattggtctacaaatggaaaagattggacaaccgtttcaggagctaacggaattgcagtagctgaaggagaacctttattgaccttccttccggaagatgaccctaacattcaatatccagatggtgcaggaaacagtaatactggcgcaggagttataacaggacgtggtgattatgtaatgggtcccagtgcaatcagccgccgcgtataccccggtctttggaagcttggtccctatcgtacagataacggcactggtccaggccagccaaatgccggtagtacacgcccgtacaatattgccaagttctccgagctttaccttattgcagcagaagcggcagtaaagggagcaacaaccaagcctgataagagtgcacgtgaattagttaatgttttacgcgatcgtgctggaaaatggacattcaataatgcagaaaacaaagaaatggacgtggattatggttctcaattaacagctgaaactccggcaacaattgacatcaatttcatcttagatgaacgttcacgtgaattctatggtgaaggctatcgttggttcgaccttgtccgcacacaaaagtggaacgaatatgccgatagctacgaaatctgcggaaatgataaaggagaccgcaatatcgtgacttatacacgtactatcaaacccggacattatctacgtcctatcccacaaggacaacttgacggtatggaaatgagtgctgacgagaaaaagaactaccaaaatcctgaatacagataactgtcttttgggataagttcgcaataggtattcaacgaaaccgcttgtagatgtctccaaggtatctgcaagcggtttttttataaatattgatatgatgagaaaatatagcttttatattaaataaatacttatatgaagaacattaaaacttttattatcatagttttttccatactgaatttttcggcatgtaatactcccgagcctatagaccaagatggaaccatgctttggcttgcaaacggacgaagctataaagaagtgctggcttcggttgagacccggatagacagtactctttccaaagaagagtatcacatttacgatgccaatggcaaacgctatattgatggcggttcacaagcagcaatccgttatggagtatatgccctgcaaagggcagaggttctcggtaaagcagatgccggtctggatattcatgaaaaaccatattacgaataccgtattctcaaccattgggacaatcttgatgatactgtagaaagaggttatgccggactatccatgtgggaatggacagcaaaagaaattcccactgagagaatccaccactatggcgaactctgtgcatctgtgggattgaacggtgcagtcctcaataatgtcaatgccaatccccttatcttggacaaagaacatatcgaaagagtagctcaaatagccaacatactcagagaatatggcatcaccacctacctctccatcaaatggacaagtcctgtcactcttgacggattaaaatcaggagatcctcttgatccaaaggtacgtcagtggtggaaaaataaagcagctgaaatctacactgccatcccgatttcggcggctttctcgtaaaggcaaattccgaagggcaggctggtccgcaagattatggccggacccacgccgacggcgcaaatatgcttgccgaagcagtagctccctatggtggaatcattatgtggagagccttcgtatacaaccctaccagcagcgacagggccaatcaggctgtagaagaattcaaatcacttgacggacaatttgcagacaacgtcattatccagatcaaaaacggtcctattgattttcagccacgtgaacctttcagtcctttattcggacagttatacaacactcccatgatgatggaattccaaattactcaagaatatttaggattctccaatcatctcgtctaccatggcactacttatgaagaatgtctcgacagcgatacttatagagacggaaaaggttcgaccatagcaaaaatggttaaagccattgcaggtgttgcaaataccggtcaagaccctaatttctgcggttacatatttgcccaatccaattggtatgctttcggccgccttgcctgggaccctacattaagtgctgaacagattgcaaatgaatggatacgtcaaactttcatcaaacccaaaggaataacacccacagcttatgaacagaattttcttatcccagtcaaggatatgatgatgagttcccgcgagacagccgtaaattacatgatgccgcttggattccaccatatatttggcggttcgcattatggaccgggaccatgggaaaatagtataagacgtcccgactggtcgcctgtattctatcataaagcagacaaaaatggagtgggattcgaccgtacacgcaacggttctgctaatgtagaccaataccatgaaccgttagcttcacaattcaattcacttgaaacctgccctgaaagtcttcttctttggttccaccatctcccatgggactataagctttcttctggtagagaactttgggacgagatatgcctgcactatgacaaaggtatctcgcaagttgaggaatacaaaaaaatgtgggcaaagctcaagccctatgtcagcgaaagcatttttaatgaggtatccgagaaactggatattcagaagaatgacgctgaatggtggagagatgcttgtgtaggttatttccagactttctctaacaaagagctccccgcaggtgtaagacctttgaacatccccattgactctctaatgaacagcagagtgaaatccaatcgttacggtatgccttaccatgatgaaaatcacaagcctatcattatcaaacgtctttaaaaacattttacccatatgcaggacatcctgtgcatgggtattttaaaggattaagaacatttccagaccttctcttgtaacaataaacaaagataaggaaggtgtgtcaaaatgcacaccttcattattttacgtacaaagccccgactttcacaagctggggctttgttattacctaaagattctgta

SEQ ID NO: 4097 - DNA, 35265 bp, Unknown
  gut microbiota DNA sequence
gaggtggtcttatttgttttttagaggaaagataggaatatatataataagtctataaatcttacaacagtttcttcaaaaaaacattcattattttataagaagcataacttaacccctttctgcgagaaggtaaccgatgaaaggaaaaacgggcacatatacaagagcataatgctcccataaagaatagaaatccggcagaacttctgatatctcccatcccgaccaaaggtgacacgatacctccaaatgcaaaacctattgcccctaaaagagccgaagctactccggcattcctacgttcacagtccatagccaaagtgttggaagcagtaaaagccattcctaccattgaaagcaaacaaaagaccaacacttcataaacccagaaattgcaattcagaaagaatgcaactgaaagtagtacggaaataaacaacatcccatgatttcctatatgtaaggcatgttccatggtagaacaacgcacagacaatgctgaagatattaccattgcaaccgcattaaccccgaagcaaacactgaacagcatgggtgaaagaccataatgttgttgcataataaaaggagcggaagcaatattggtgaacagaacacccattgtaaaaccgtattgcaaaatgtaacgcacatattggcggttacgtaatacagcaccgaaacggtgatacatatctacacatcttatattttgcctttgtccaattggcagagactccttaaaacgtacacttccgataaccagaagaacgcccaatgcaaacaaaaaccagaaaatgccatgccaacctccaaagtcagccaatgccccaccgcctatcggagcaactaccgtagctattccattgacagcgccaatagtagccaacatgccagcaagctcatgagcagaatatttatcggcagcaatagaacgggatatcacaactcctcccgctccggcaactccctgcacaaaacgccacaacacaaactgtgatatgtcccgggagaagatacaacctacagtagaaatcagaaacagacccatagctgccaacaagggagaacggcgaccgtacttatcacttaacggaccaaaaaccaattgtcctatcgccagccccaccatactcgtagtaagccccaactgcacttttgaagatgtagtctgaaagaaatccgacattgccggtaaagtaggaagatacatgtccataacaaatggaccaaaagcactcaacatccccaaaaacaccaatatgaaaccttttgaattttgtttacctgtcattatctttccctcttttaaaatcggtggcaaaattatcccatattttccaaacagcctatggcttatcttgtacaaaacatttcattttcggaacaatatacagtattatcattgaatatatctatatttgttgcgtaaaacagaactttattcacatgtacgaacaaatatctccagacacttcccatatcagatatgaagaaaccgacttgtcgtatctgaaactacgtccataccgttttaaatgtggcatatacttaatctgcatacagggtaaaagcattatttcgacaggagtgcaacaatatgcttttgatgaacaaaccgaattaattttccttacaggcagcctcatccagataatacaggcctctgccgattttaaagtacggatacttctatttcccaaagacgttttcctaaaagcaatactaccgattgataccccctacttcaattacgtacatgaacacccgcattatcatcacacggcagatgaaaggagtcagaatacgtggcgggaaattatattatggatggacgttgcccaaatgcttttcaagaacaacaacacactcctgttcagaaaacaacaagaacttaatttccttcaaagcatattaatgtggcttttcaatactattccggaaaaactggctgccaataagcaatatagcagaaaacagatgctctgccaccagttcatgcaactgatacgcgaacacagtacttgcgaacatcaagttccgttttatacggaacagctctgcataactcctcgttacctatacgaaatcaccactcaatacatgaatggaaaaacgcctaaacaactgatagatgagcaactgatagcggaggccaaagttcttttaaacgaaccgtgcttatctgttaccgaaattgccgaactgctgaactttgccgaccaatcttatctgagccgttttttcaaaaagaacaccggcatgtctcctaaagaattcaggttacaaaagctattataaccagtttcgtcaaaataatttaaaatcggttgttttaaccgccattttattaactttgttagcataaccaaaaccaagctgccatgaaatacaaattattagttcttgacgtagacgggacacttctcaacgatgccaaggaaatcagtaaacggactcttgcttccttacttaaagtgcagcaaatgggcatacgtgtcgcattggcttccggaagacctacatacggccttatgccattagccaagactcttgaattaggcaactatgggggcttcatcatctcctataacggtggccagataatcaatgcgcaaaatggggaaattctgtttgaacggcgaatcaatccggaaatgctaccttatttggagaaaaaagcacgcaaaaataattttgccatatttacttaccatgatgataccatactgacagatagttccgataatgaacatgtccatgccgaagccaatctgaataatctgaaaatcattcaggaagaagaattttccacagcaatagattttgcaccatgcaaatgcatattagtcagtaatgatgaagaagcattgaaagatttggaagagcattggaaaaaacgcttggacggaacgctggatgttttttgctcggaaccttactttctggaagtcgtgccctgcggaattgataaagcaaacaccttaggcgtcctattgtcatatttgaacatcgcccgtgaggaagtaatcgccattggagacggtgtatgcgatgtcaatatgctccaagttgccggtctgggcatagccatggggcatgcgcaagactccgtaaaagtttgtgccgactatgtaacagcttccaatgaagaagacggtgttgcccaatctgtagaaaaattgattctggctgaagtgcatgctgctgaaatacctcttgacctgctaaacgagcgggcacgccatgcattaatgggcaacttgggtatccaatacacctatgcctcggaagaacgcatagaagcaaccatgcccgtagaccaccgtacccgccagccctttggcattctacacggcggtgcaactcttgcgcttgccgaaaccgttgccggactcggctctatgataacctgccagcccgatgaaattgtggtaggcatgcaagtcagcggaaaccatatttcgtccgcacacgaaggagataccgtacgtgcggtagcgactatcgtgcataaaggacgctcatctcatgtgtggaatgtagatgtatttacttctaccaataagctggtttcttctgtcagagttgttaacagtgttttgaaaaaaagataagttgagatatgccaatatggagtagactcataaacatcagatatgccatagtagatgtcgaagtcggcttgaaaaatcataaaatccatgatattggagcactccgccatgatggtgcaacataccacaaagcttcaaaaaaggagttatttgaatttctcagcggcacggattatatatgcggacataacatcattcaccatgatgccaaatatctattcacagacaaaacatgccaatggattttggtcgacacgctttatatatctcctttgctgtttccggaacgtccttaccataagcttttgaaagatgacaaactgataagtgatcagatgaataatccggtaaatgattgcgaaaaagcaaaagcactgctattggacgagatagcacgctggcattcgttaccggatgcaaagcgccggttatttgcatctttattaaaggataggaaagagttcgaaggttttctcagcatggtaggtgctgtgtatgccaacaaaggaatatccgaactgatcagcaacctctatgtgaataaaatatgccagcatgcagagcttgacatgcttatcaaacaatatccgtgcgaactggcatacgcattagccctgattgacacaatcgaccatcattccattactccgggatgggtactttacaattatcccagagtggaatttgttataaaacttctacgacacaacagatgcaacgaaggttgtgtttactgcaacacccaactggatgtactacataacttaaaaatattttttggatacgaacaattccgcacctatgagggtgaggctcttcaagaacaagccgttcaagcagcggtaaaaggcaaatcgttactggcaatattccctaccggcggtggaaaatcgctgacttttcagctaccggcactcatgtccggtcattcggtacatggtcttacagtcgttatctcaccattgcagtcactgatgaaagaccaggtagataatcttgccgaccgaggaattactgatgctgtaaccattaatggcctattagaccctattacacgggcactatcaatacaaagagtacaaaatggggaagcttccctcttatatatagcccccgaaatgcttcgttcaaaaaccattgagaaaattctgatggcgcgccatgtagtaagatttgtgatagatgaagcacattgtttctcttcatggggacaggattttagagtcgactatctttatattgggaaattcatcagaaaatatcaacagaaaaaaggatgcaaagaaccaatacctgtgtcttgtttcactgccacggcaaaacagaaagttgtgcaagacattcgcgattatttcaaacagacattaaatttaaatctggaattgtatgcatcaacagcctcaagaacaaaccttcgctattctgtcatacacgctgaaactgatgatgataaatatttaaaattaagaagacttatagctgagtccgatagtcctaccattgtttacgtatcgcgcactaaacgtactaaagaacttgctgtaaaactgactcgtgacggttataaagcattacctttcaatggtaagatggaatcagaagaaaagattgccaaccaagatgcatttatgaatgaccaagtacgcatcattgtagcaacatcagctttcggtatgggagtcgataaaaaagatgtcggacttgtagtacattatgacatatccgattcactggaaaactatgttcaggaagcaggaagagccggtcgcgatcctaaactcagcgcacgttgttatgtactttacagcgacaatgacttggacaagcattttatactgctgaatcaaaccaaattaagcatcagcgaaatacaacaagtatggaaggccataaaggaccttaccagacaacgtatgagagtcaattgttctgcattggaaatagcacggcaggcaggttgggacgactccgtatccgatattgaaacccgtgttcggacggcattggctactttggaacaaagcggatacctgataagaggaaataacgtaccccatgtgtatgctacggggatcactgtaaaaaatatagatgaagcaagaatgcgcatatcggcatcattgttatttggcagtgatgaaatagaaaaggctgttcgaatcatcaaatcactgatttcacagaaatacattaccaaagctcaagactcagaggccgaatcacgaattgattatctggcagatatattaggaatcagtaaaaaagaaataatatctgttgtagaacgcatgcgtcaagaaggcatattggcagataacaaagatatatccgcctatttactggataccggagactcggaacgaaaatcgcagactctcctcgaacgctttgcaaaactcgaacgatatattcttaaccacattcctgacgaatctttacaaacatcatataagcaactaaatgataatgccacaaacagcggaatcaatacatccaaagaaaaggatattcggacattgctctatttcctctgtgtcaaaggatacgtcaaaaaagaagaagacgcttcccataatataacaatcagtcgccagacagatttcgattcaaccatcaaactgtttgaaaaacgactggaaataagccgtttcaccatagaatggctatacaagttagttgccgatacggaaaaagaatgctcacaaaacaaaacagtccaattttccgtggtagaacttctaaatcaaataaagtcaaatcctcaatctcttttcagcgaacccgacaaactacagttggaagatgtagaagaagcccttctttatctatcaaaaatcggagcattaaagcttgaaggcggtttccttattctttataatgctatgaatattcaaagaataaaggataacaaatcaagatataaacaagacgactaccggatgcttaacgaattctacaagcaaaaaatccagcaagtacatattgtaggggaatacgccaatttgatggtaaaggattataatgcagcattgcagtatgtccaagactacttccagatggactacaaaaagtttgtcgcaaaatattttaaaggagaaagagtaagtgaaatacagcgcaacctgactcctcagaaatacaagcaattgttcggtcagctatccaaacgccaaatggaaattatttccgacaaggaatcgcgctgcattgttgttgcagcaggtcccggcagtggaaaaacacgcgtactggtccataaacttgcatcactcctattacttgaagatgtaaagcatgaacagctcctaatgctgacattttcaagagcggctgccacggagttcaaacagaggcttatggagctaataggaaatgctgcccattttattgagataaaaacatttcattcctattgttttgaccttttaggaagaataggaaaccttgaggatgccaaagacatcgtctcgaaagctgccaaaatgattaatcaaggggaagtggaaccaaccaagatcggtaagacagtacttgtcatagacgaggctcaggacatgggaaaagaagaatacgaccttgtgaatgccttgatagccaataatgaagagatgcgtgttatagcagtgggcgacgatgaccaaaacatttatgaattccgcggttcaaattcccgatatatgtaccaactgacacaaaatcctgaaaataaattcattgagatgactgaaaattatcgcagtacacatcatttggtaaattttgccaatgaattcgctaagaatataggcaaaagaatgaaaagtaccccaatcatttcaatgcgaaaagagaacggatgggttggagtaacatatcatcaatcaaagtatatgtatcagccactggttgaagaactgcttcatcaacgaggaagcgggacctcatgtgtgcttacccaaacaaacgaagaagcagtcattttaacggctcttttgcgaaagcatgccataaacagcaaattgatacaatccatggatggcttccttttctggaatatggccgagatgagatattttttgagatatatagagaaacggataaaaactcctttaattccggaagagttatgggaaaaagcaaagcatgtaacctacaccacttatgaaaaaagtaaaagcttgacatatgtaaagcgttgcatagaactatttgagcaaaccaataaagtaaaataccatagtgacttcaaagaatttgtatttgagtcatcagtagaagatttctgtgacatttcgggaacagatgttgtagtatcaaccatccataaagccaaaggaagagaattcgataatgtgtatatgctcatatccgataattactcaaaagacgaccatcttatgcgtcgatattatgtaggaatgacccgtgctaaaaatcaactgtttatacatacgaatggcaactgcttcaaccatataagcgctgacagacattgtatcgaccgaaaagaatatgcgatgcccgaagaaatagttctgcaactctcccacaaagatgtctttctgaaattttttaaaggacgcaaacaagagatattagcattaagaagtggagattctctgatttacaaagactctgttttatatacagcctcaaccaataaagcggtagcaaaattatcacagaatatgcaagccacaatgtgtgagtgggaaaaaaagggttataaagtgagagctgcgtatgtccgatttattgtagcatggaaatctaaagattccccaaaagatgaaccggaaacagccgtcttattagcagatttactactttcattataacctaagatacataatcctcaatccaaacaaataaggaaaaccatgcggataataagaaaagcgtgcaactcattgagctgcacgcttttgcttattgtttattatcttgtttccttatcggaatcatttcacttcctcaaagtcagcatcctgtacattatccccatgcttgccattatcctgagcaccgccttgctgtcctgcattcatatcaggaccggcctgtgcaccaccttgagcaccgctttgggcatacatctcagcgcttgcagcttggaaagcggtattcagttcagccatcgcagagtcaacagcagctaaatcctgtgctttgtgagcatctttcagtttctgcaaggcagcttcaatcggagctttcttgtcggcaggcagcttatcgcccagttccttcaactgattttcagtagtgaaaatcattgagtcggcttggttcagcttgtcaactttctcacgttctttcttatcggcttcggcatttgcttcggcttcggctttcatcttttcgatttcttccttgctcaaaccgctggaagcctcgatacggatagcctgttccttaccggtagccttatccttggcagatactttcaagataccgttggcatcgatatcgaatgtcacctcaatctgaggaataccacgacgtgccggagcgatacctgtcaggttaaactgaccgattgacttgttctgtgcagccatcggacgttcaccctgcaatacgtggatagtaacttccgtctggttatcggcggcagtagagaatgtttcgctcttcttgcaaggaatagtcgtattggcgtcaatcagcttggtcattacaccacccatagtctcgatacccatagacagcggagtaacatccagcaatacaacacccttgatttcgtccgtcaatacggcaccttgtactgctgcacctacagctactacctcatcgggatttacacctttggaaggcactttaccgaagaaatcctcaaccagtttctgtacagccggtatacgtgaagaaccacctacaaggataacctcatctatatcggagttgcccaaaccggcatcgctcatagctttcttacacggttcaagacaagcctgaatcaagttgtgggccaaagcttcgaatttggcacgggtcagcgtcttaaccaagtgcttgggcacaccgcctaccggcataatgtacggcaagttgatttccgtgctcgtagaagaagacaattcaatcttagctttttcggcagcttccttcaaacgttgcatagccatcggatcctgagtcaggtcagcgccttcatcgttcttgaactcttgaaccagccagtcgatgattacctggtcgaagtcgtcaccacccaagtgagtatcaccgttggttgacaatacttcgaacacaccgccaccgaattcgaggatagaaatatcgaatgtaccgccaccgaggtcgaatacggcaactttcatatccttatgcgccttgtcgataccataagccaaagctgcggcagtcggttcgttcacgatacgctttacttccagaccggcaatctgaccggcttccttcgtagcctgacgctgagagtcggagaaataagccggaacggtgattacggcttccgttacttcttgtcccaaataatcctcagcggtctttttcattttctgcagaatcattgcagaaatttcctgcggagtatagagacgtccgtcaatatccacacgcggagtattgttgtcaccttttaccactttataaggtacgcgagcgatttctttctgaacctgatcccagttctcacccatgaaacgtttgatagagaacacggttcttgtagggtttgtgatagcctgacgctttgcaggatcaccgatcttacgttcgccgccgtctacaaatgccactactgaaggagttgtacgcttaccttcactgtttgcaattactacaggttcgtttccttcgaatacagaaacacaagagtttgttgttcctaagtcaataccaataatttttcccatgatcgttatttttttatttgttattattctgtttcggtgtccgcctcgttggcagacgccaataaaaagacaaacgccgtgccaaattgttcaaggcggcggcagatttatgaatgtgacagtttgtctgtcagtttggcagagttaaatatattttttctgtcggaaattaccatttgttaatttctatcccactcaaaagtcctacttttgcccccgaaaaagaaaagatattgtttgagggattcaagaaagcatattggttctcttttttcagattttatcagattttctctaaagaaagctgatataaaaccaaaacactttctaaaaaggagcattgccaatatttatccgttccaccatggtggaacagaatgtatcccgtgatggaacacaagtttctccgtggtggaacaaaaacttcctcatggcggaacgaataagcattagccgccgaacctcttaaacaaagaaacagattacaataagacatagaagactaaagattatggaaaagatgagagacagtattgacttcaagaacatggacattgcggcattattccgcaaattactgctcccaaccgtactgggaatgatattttccgcattgttcgtcattaccgacggtatctttgtgggaaaaggtataggcagcgatgcccttgccgccgtcaatatcgtggcaccgctatggttgttctccaccggcatcggcctgatgttcggcgtaggagcatccgtagtggcttccatccacttgtcacacaataaacccaaaacggcacgtatcaacattacgcaatccatagtggtatcctccctgctgctgatgtgcacttctaccctattttgcctgtttgcaccgcaagtggtacatctgttaggcagttcggaacggctcaaacctttggctgtagaatatatgtgctggtttgtacctttttccgcttttacggccctgcttaattcgggcatgtttttcctgcgactggacggttcgcccaacttcgccatgttctgcaatatagttgcctccgttctgaacatcatactcgattatctgtttatcttccctttcggctggggaatgttcggtgcggccttcgcaagtgccataggaacaacggtaggagcgttaatgattatcatctatctttcacggcgcaactgtgcgttgcgtttctatccggtgaagttcagccgtaacagcatgaagctgatgaagcgcaatgtgggatatatgtgccggctgggctcatctgcctttctgtgtgaagtggctattgcctgcatgatgtttgtaggcaatcttgtattcatccattatctgaaagaagacggtgtggcggccttcagcatcgcctgctacttctttcctatcatatttatggtatacaatgccattgcgcagtctgcacagcctattatcagtttcaactatgggcttaacgaaacgttgcgcgtacgcaagacatatctgcttgccttaaagacagccgttggctgcgggatatgctttgccctgattacaatattttgcagccgggagattgttgccatgttcatagaccggagttatcccgcctatgatatagcagtgaaaggcttgcctttatatgcatccggtttcgtgttttttgcaatcaacatagtttccatcggttattttcagagcgtggaacgcgccaagtacgccactgtcatcacgctgctgcgcggatttatcttattgacactctgcttttacggacttccgctactattgggcaaaccggggatttggctggctaccccgctggcagaattattgaccactcttttcatactcattatttatatgggcaggaaaagaaatggcaaggaaaattcaatatctttgcaacatggaaatcatgctaaagaaattctgcaagaagtataaattacccgaaaaaagcctgtttgagctgttgtctcatatggaagaaatatccttttccaaaggagagcttataatagagaagggagaacggaattctaatttctaccttataaagaaaggtatatggcgggcatactacctggcagacagaatagaaaactccttatggtttgccactcccggcgatgccgcattttcttcatgggggtatgtggacgacaaaccttctcaggtcaatatcgagtctgtaaacgacagtacagcctattgcatcagtaaagccaaattagaggctctgtttgcacactctatcgaaatggcaaacttcggcagaaagatttttgaacgtgaaattttgtcagtggacgcttcgacactggcttatgggacaccacccaccgccaaagagcgttatctgacattaatggaagagaatccggaactattgcaggatgtaccgctgaaatacttggcctcatacctgtatatcactccgcaatcattaagccgcatacgtgccggactgagggaaaaagaggatgtgtcaaaataaaaaacgcccgctgtttgtttctttatcaaacaaaaattacacggatttcacagaaaaagaataaaataaatctgtgaaatccgtgtaatcttatactgaataatgaccgatgtccgttatttcttcaccaataccattaccagattgttgtccgcatcataaaagcccataccgccgcctgccagcttaccgaaagactgaacggagttcaatgctttcaacacacggctctccacttccatatcgggacatgccatcatggtactgataacctgcgggaaagatatggctaccggatttgcatcatccacattaaatgaaccgttaatgacattacatccggcagtaccatgcagagttttttctgcaatattgaactcgatgaacggctgcttttccattcccgacgggatggtctctccaccggcctcgctaatcatccatttgccgttcaaatcggccaacttagcagaagcttcttttttctgcaacacaatgacaggacgattggaagaagcgcataatgccatattctccttgcccagttgcttatacttctttacctgtcctaaagcagccagcacgtttttctccactgtcatatccggacacatcatacgggtacttcccaatgcgccaaggtctatctgtccgggtttggcgttcacatcgaacgaacccatcagacggttacagccactgttgccatatacctgtccggtctttgtatcaaaaccgataaaaggaaattcctgattcggagcaggtacaaccgcactgccgtttatttcaataatattccactcaccactcaaggaagagagcgttgcggcatttttagtcgaagcgcaagatgacagccctgccacagtagccgccatacaaagggaaacaaatactttcttcattgttactttttgtttaagttaattttatcaccacaaatatatacaaaataatccaaaagcaaatcttttgtttagaaatagcaatacttggtcaaagtatttagcaggattttaatgtttatctgagaattaagccttatatttgctcattgaaaaaaaataatcatatttaaaacttttgtaagtagaaaaatgggtaaagttcttattatcggtgcaggcggtgtaggtaccgttgttgcgcacaaagtagctcaaaatccggatgtgtttacagaaatcatgattgccagccgcaccaaatccaaatgcgacgctgttgtaaaagcaatcggcaaccctaacatcaaaaccgctcaggtagatgcagacaatgtagacgaactggtggcgctcttcaacagtttcaaacccgaaatcgtcataaacgtagctctcccctatcaggaccttactatcatggaagcctgtctgaaaagcggagtaaattatctggatacagccaattacgaaccgaaagacgtagctcatttcgaatacagctggcaatgggcatacaaaaagcgctttgaagatgccggactgacagctatcctcggctgtggtttcgacccgggtgtaagcggcatatataccgcctatgcagccaagcatcattttgacgaaatccaatacctggacattgtggactgcaatgcaggaaatcatcacaaagcatttgctaccaacttcaacccggaaatcaacatccgcgaaattacccaaaacggacgttattacgaaaacggcgaatgggtaaccaccaaaccgttggaaatccacaaagcactcacctaccccaatatcggtccgcgcgactcttaccttctttatcacgaagaactggagtctctggtgaaaaatttccccacaatcaaacgtgcacgtttctggatgacattcggacaagaatacctgacccacctgcgtgttatccagaacattggcatggcccgcattgatgaggtagaatacaacggcatgaaaatcgttccgctgcaattcctgaaagccgtactccccaacccgcaggatttaggagagaactacgaaggcgaaacctctatcggttgccgtatccgcggcttgaaagacggcaaagaacacacctattatatatataacaattgcagccaccaagaagcttacaaggaaacaggcatgcagggcgtgagctacacaaccggtgttcctgccatgattggcgccatgatgttcctcaaaggtctgtggaagagaccgggtgtatggaacgtagaggagttcgatcccgatccgttcatggaacagcttaacaagcaaggactgccctggcatgaagtaatcgacggaaacttggaagtttaaattagcgattaatcatttattaccaatcaacccctaaacactgaattacgtgaatatcggagataaagcgcccgaaatactgggtatcaatgaaaaaggcgaagaaattcgtctgagcgattataaaggaaaaaaaatagtgctctatttttatcccaaagactcaacttcaggttgtacggcacaagcctgcaacctgcgcgacaactataccgacctgcgtaaggccggctacgaagttatcggagtcagtgtagacaacgagaagtcgcaccagaaattcatcgaaaagaacaacctgccctttaccctgattgcagacacagacaaaaagctggtggagcaattcggcgtatggggtgaaaagagcatgtacggacgtaaatatatgggtactttccgcaccaccttcatcatcaatgaggaaggagtgattgagcgcatcatcacccctaaggaagtaaagaccaaagaccacgccgcacaaatcctgtaacagtgattgataattaatcactaaacactaatcattaatcactaaaataatggcaaagaaagacgaacttaattttgaaaacggaaataacatggcaggcagcgaaaaactaaaggcgctgcaagctgccatggataagatagaaaaaagtttcggcaagggttctatcatgaaaatgggcgacgaaagcgtcgaacaagtagaagtaatccctaccggttccatcggactgaacgtagcattgggtgtaggcggttacccccgcggacgtatcattgaaatctacggtccggaatcttccggtaagaccacgctggcaatccatgccatcgccgaagcacaaaaggcaggcggcatcgcagcattcatcgatgcggaacacgctttcgaccgcttctatgcagccaaattgggtgtagatgtggataacctcttgatttcacaaccggacaacggcgagcaggcattggaaattgcagagcaactgattcgttcttccgctattgacatcatcgttgtagactccgtagccgctctgacaccgaaagccgaaatcgaaggcgatatgggcgacaacaaggtaggtttgcaggcacgtcttatgtcacaggctctgcgtaagctgacatctgccgttagcaaaacccgtacaacttgtatcttcatcaaccaactccgtgaaaaaatcggcgtaatgttcggtaatcctgaaacgaccaccggcggtaacgcattgaagttctatgcttccgtacgtcttgacatccgtggtggccaagctatcaagaatggcgaggaggttatcggcaagcagaccaaagtgaaagttgtaaagaacaaggtagctcctcctttccgtcgtgcagaattcgacatcatgttcggtgaaggcatctcacgtgctggagaaatcatcgatttgggtgcggaactgggcatcatcaagaaaagtggttcctggttcagttacaatgatactaaaatcgcacaaggacgcgatgccgccaaacaggttattctcgataacccggaactggcggaggaactggaaggactcattttcgaggaattgaaaaaagagaagtaatccttaactgaaaggttaaaagtttggattttaagacacaaagaactggtttgtttataatatgctttagacactttccggttgttcttttgtcttaaaatccaaatttgttttacatatatgagaagagacaccatataactattccgaaagcagatattcacaatatcaagcaattaatgacaaatggttcatattcgttcttcttgttatctatcctcattcaaaaaaataatatcctcataaaagataccatcatcggaaaaatccataaaatgaaactattcatcttacaaaacattttttgttatcaaaagcccccaccttacccccccaaaacaccacaccttaacaactgaaatgccacagcataacatactaaagtcctaaggtttagggagcaaactcctgcaatttgaagagctaaggtgaggtgtttatgttactagtttcacacactatccgtatattgacaggcgactatcacctcttttacaaatacaaaaatacacgaaatgataatagagcaaagaagaaaatgttcagaaatcagcagaaatcatacatttacaaagatatgtaatataaaagccggaaacgtataatccataaccaatcgtctgcaatcaattatcttatacacttcgcattaacagttatttatatatttatttttacaatattgttgttttatcaattattttataatatttttgccacgcaacaaacaaaaaatcataaatagtgtatggcattaataacgtacattcttattgcgataccggtatgtctactggctatcattctatggctatatttcaattattggaaatataaacgcaagaatcatttcatactcctgatacttcttttttatccggtattgtcgtatgcacaatatatggacaaaacgcaatgcaaaatttcattttcatcgcatgcaaaccaggcgggaaaattggaatatacccaagacggaataatttaccgttttacgccggaaagcaatgcgtggaaaataaccatcaaaaacaatacgaacaagaatgcacggataaattgggaaaaaggcagttttatcattaatggaaaagcttccggaatcagtttgtatccttttacatccgatgatccccctacggatgttatcaaagaaaaatctgaaataacccgaaccgttactgcatccaacttaataaaagggaaaaaggttaataaaatatatagtaaacgcaatctgaagagaaatggacggacgtccgtcaacattgctttgccaatcggtatcggcaataaaccgcagtttttccatatattcaattttattgtaacagctaactaactatgactttccaatatattatcaaccatttgcatgaaccgcatttgtggtgtattgtactgaccgccccacacgccgaactcaatatccaaaagaaactggaacaacaaggggttatcacttatgttccaacgatttcagttcggcgcagttgggccggatgtataaaagaaatacacatcccgacaatagcaagatgtgtatttgtatatgcaaccaaggaagaaatgcaagagatgcaaaaggaatataccgccttatctctgcaaaccgttacagccttatatcaaagccaataaatcctttctaaaaacaaatttataaatatacctacgaatcatttcaacgcatcagagattctccttttcaagttcaattttgccaaatcctccggttttaattccaactccaccaacaccttagcagtagcgacattatatgaggattcttgtatatcacaatttgtctgtccttcatgtaaagagtatagcatagcaaagtcataattcaatgctcttgaaacattgtataacgtatccgtatcaatacttttccgtgtcaacatataatcgacactttgaggtctaacacccaatcttcttgcaagttcagccttagtaatctggttatcagccataacactcctgataacctcgccaatatatatattactcttttccatttcaatgaagatacgaattaattagccacactaaaactacttgaataataatttgtctgtatataagttcgttttaatccataatttatttgttttatcaattaatttatgatatttttgccgcgtattcatataaataaaaagataatacatataatgccatgacattgagtagttgcattctcattacaatcccggtctgtatatcagccatccttatgcagacttactttgacagccgaaaatacaaacggatacctcatctcattgttttattgtcattcctgttttccaccttatcacatgcacaatacatcgacaacgaaaactgccgcatttcattcaaatcatatgaaaaccatcaagggaaactggaatataacaaagagggaattatttatcaattcattccgaacagcaatgcatggaaagtcatcatcaaaaacaacaccgatgaaaccgtatggctaaactggaaacaagccggtttcattgttaacggaagggcgtcaggcatcagcctctacccttttacaacagacgaagctcctttggaaaccatcaaacacaaccaggaaataaaccgcacaattacagcaaccaacttaattacggaaaaaggtatcagcaaaatatatcacaaaaagaaattcagaaaaaacggaagaacttcagtcaccatcgtttttccaatgacagtcggtaataaaccgcaatttttccacactttcaattttacagtaacaaaagacaactaactatgacttttcaatatatcatccatcacttagataagccacattcgtggtttatcgtattgaccaacccacacaccgaactgaataccaaaaagaaactggagcagcaaggttttattacctacgtcccattggtttcggttcggcgatgcagggaagggtgtataaaagaaatacacatcccggcgatagcgagatgtgtatttgtatatgcaactgacgaaaatgtacagagaatgcagaaagaatataccatactgaatcctcaagccgttgcagccttatatcaagaccaataaatataagccagtgtactgacactgataactacccaaagcagaataccctgtacaagcggtttgatacctactgctttcaggacatcacgggaaagggaagctcctataaagaacaatgttattgtcaatgccttacgggcaatactgttgattcccgcaccgattaaagcccctgtctcggaaagattcaagacataggtattgacaatcattgccaaaacaaagaagaagataaaccagggtatactgattttctgccctttacttttgaaaataaatgaagtagcaattgccaacggaataatccaaagcgcacgggtcagcttgatagtagtagctacccgcaatgcctcctcaccataggcagcacccgcaccaactaccgaactggtgtcatgaatggcaatggcagcccatgtaccaaactcatgctggctcatattcaaggcatgacctattacaggaaatatgaacaatgcaatcgcattcaaaataaaaatcgtacccaaagccacagacatttcactgtcttttgccttcaacacaggacctaccgccgcgatagcgctaccaccgcaaatagccgtaccggagctgatcagataagaagtgtcacgatctactttcagaaacttacgaccaataacccagccgataagtaatgtacctaccacagagataaccgtaaactccataccttccttaccggaagcaagcgaagcctgcaaattcataccgaaacccagacccaccacagaatactgcaacagatatttggatattttcttattaaacttaggatgtgcctgtccgcataacaaagcaaacgacagaccaagaaataaagctaccggaggggtaacccatgcggaataagcgtgcattcccggaatataatcaagaaacaagaaaaaagaaagaatgacaagaagtgaaacgtaaataattttgttgttgttttgcagaaaagacatattgatgcttttcgccaatgttcgagttgaagccatacttttttatttttattaatttgttttcgaccgcaaaggtaggcttcttttctcaatcatgccaattgtttctgcttatgtgctataacttatggttattgtgcatggcaaattgcatgaatacttgcgccaaaccgctttcttgcccctgaggctgtgcaaaactaaaatcgcgtaacataggcattcccttaatctcaacgacacgcaactgtccagaatacaattcgcgcgtaatggaacgaacggaaacaatgcccagacaatcggtatgttccaaaaacaatttgatactttccgtgcttcccaaatacatcaaaacctgtaaagaggataactttatattatgttgctgcaaggcacgctcaaaaacatccaatgtccccgaacctctttcgcgaagcaccaaaggcaaatggaacaattcatcaggagttatctcctctcccacagccaatttactgcctgtacgcaccactgccaccaactcatcttccaaaaaagtagtatatctaatattaggcaacctgaatactccttcgacaaagcccaaatcaatgcgatgttcctgcaaagcggcctctatctctctggaattaccattcaacaatgacaggctgacttgtggaaacttaccgataaagctggcaagcaaaggaggtaacacatattgggcaatggtagtgctggcccccagcttcaaaccgcctgtatattcattatgcaacaagtgcatttcgtactctaaccgtttatagtcttccaaaatccgctcgcaatgctccaagagcaaattgcccgactcagtcaacgaaattctactaccctgccggtcgaacaaacgtgtctgataagcagcttccaactcttgtatatgtttggtaatagcaggctggctgacaaacaattcttgcgaagccttcgtaaaactcagattcttcgcaacagaccggaatacctttaaacgaaaatcgctcacagcacaatgaattaaattgattaactattctgcaaatcttcactcctgatacccaacaccgacatcagcggataccccagcatctcccaacggcatacagccggagcggcaggctcctccatacggaaataaacaatgtcttttgcctcttctttatgtccggcattttccaatgcgcattccctcaaaacgttctcaacctctttaccatactcctcattaaaaggaacaacaatcagcttcttcacttcggcggcattcaatactatctgcaacaaatcaagatacaagtctccacgagacacaaaaccctctgaaggcgcagccataaaactgaactcacccaaagaagccttaaacgctactccatccaattcgttcttcaaatcggatggcaggcagtgctccagctttccggactgcttatcatatacgagaagtacctgtacatcattgtcactccctttcaacccggcatccatagccagatacatggtaaaaagcgccagatccactgtttgtaaagaacgtcccagcaacggttcaaaatacttcctcaaatcgtttataacaaaattcaggtaggcaacatcaatcaccattaccgtttcggaaagttttatttgggtattttccatattactcatttatttattgagggagtaaagatacaaaaagttttgtagataaaaggtatttgtcgcaaatcagccaatttgacattcattttcttctattaactgaaattttgtctcatttttgctgctggcaaatcttttgcgctttttaaagtgttatgaagctgataaaaatagaaaggagaactaaatatgaactttaaccaatttactatcaaagctcaagaagccgtacaagaagccgtgaacttgacgcaagcacgggggcagcaagccatcgaacctgtacacttgcttcaaagcgtgatgaaagtgggcgaaaacgttaccaatttcatcttccagaagttaggcatgaacgggcagcaaatcgcactcgtacttgataagcagattgactccctgcccaaagtatcgggtggagaaccctacctgagtcgtgagactaatgaaatttttcagaaggccacccaatattccaaagaaatgggcgatgagttcgtttcactggaaccgatgttgctcgctttgctcactgtaaaaagtaccgcttccaccatcctgaaagatgccggaatgacggaaaaagacttgcgcaatgcaatcaatgaattacggaaaggcgaaaaggttacttcgcaatccagcgaggacacttatcagtcattggaaaagtatgccatcaatctgaacgaggcagcccgaagcggcaaactggaccccgttatcggacgtgatgaagaaatccgccgggttctgcaaatcctaagccgccgtaccaagaacaatcctatattgataggtgagccgggtacaggtaaaacagccattgtagaaggacttgcccaccgtatattgcggggtgatgtacctgagaatctgaaaaacaaacaagtttattcactggatatgggtgcattggttgcaggagccaaatataagggcgaattcgaagaacgtctgaaagccgtcgtcaatgaagtgaagaaatcggaaggagacatcattctgttcatcgacgaaatccacacattggtaggcgccggtaaaggcgagggagcaatggatgccgccaatattctgaaacctgctctggcacgcggtgagctgagaagcatcggtgctaccaccttggacgagtatcaaaaatactttgagaaagacaaggctttggaacgccgtttccaaatcgttatggtaaacgaaccggacacgttaagcaccatttccatccttcgtggcttgaaagaacgttatgaaaaccatcaccatgtacggattaaagacgatgccatcattgctgccgtagaattgagcaaccgttatatcaccgaccgcttcctgccggataaagccattgacctgatggatgaagctgccgccaaactccgtatggaagtagattctgtaccggaagagttggatgagatttcccgtaaaatcaaacaactggaaattgaacgcgaagccatcaagcgcgaaaatgaccgtctcaaactggagcaaatcggcaaggaacttgccgaactaaaagaacaggaaaagtcgtataaagcaaaatggcaaaacgaaaagacactggtcaacaaaattcagcagaataaagttgaaatagaaaacctgaagtttgaagccgataaagcggaacgtgaaggtgattatggaaaggtagccgaaatacgttatggcaaacttcaagcactgaatcaggaaattgaagagacccagcaaaagctgcacgaaatgcagggcgatcaagcaatgattaaggaagaagttgacgccgaggatatcgcagatgtagtatcccgatggacaggcataccggtaagcaaaatgctgcaaagcgaaaaggagaaactattgcatctggaagatgaactgcatcagcgtgttatcggacagaatgaagccatcgaagctgtagccgatgctgtacgccgcagccgcgcgggactgcaagatcccaagcgtcctatcggctcattcctctttctcggtactaccggtgtaggtaaaacggaacttgccaaggcgcttgccgaattcctgtttgatgatgaaacgatgatgacgcgtatcgatatgagcgaatatcaggagaaacatagcgtttcccgtctggtaggagctcctccgggatatgtgggatatgatgaaggcggtcagttgacggaagctgtacgccgcaaaccttactccgtcgtactgttcgatgaaatagagaaagcacatccggatgtattcaacatactattgcaagtattggatgacggacgtttgacggataataaaggacgtaccgtaaacttcaagaataccattatcatcatgacttccaatatgggtagcggatacattcaaagccaaatggagaaactgaacggttccaacaaggaagagattgtagaggaaaccaagaaggaagttatgaatatgctgaaaaagacaatccgcccggaatttctgaatcgtatcgacgagacaatcatgttcttgccgctgactgaaaaagaaatcaaacagattgttgtacttcaaatcaagagcgtacaaaagatgttatccggaaacggcgtggaactggtattgaccgatgccgccatagatttcctggccaatgcaggatatgatccggagtttggtgcccgcccagtaaaacgtgctatccagcattacttgctgaacgatttgtccaagaaattattgtcgcaggaagttgaccgtagcaaaccaatcacggtagatatcaatgcaacgaaagacgaattggatttcagaaactgacaagctaaaaaaagaagagggtgtgtcaaaatacacttgatgatttcttttaggcacggatttcgcggatttcacggaaaaagaacaaagaacgtggaatctgtgcctaaaaagaaacaattagcaagcggatgttaattttgacataccctctttttattttaacctcagaatgaagtataattattcagctgtttcttctttaacctcttcagcagcagtttcagatgtttcttcaaagtctgtcatatcacttgctaccaacagattataccaggaaatcagttttttaatatcagacacatatacgcggtcgcggtcaaaattaggcaacaccgccgccaaataagcttggagctctttcacagaagccttttttacatccaatgccacggctgcaccgttttcctttttcttcatagagagaagtacatctttcaaaggtacttcttctgtatctgtatacatggcaatatctcctaaagagataatcttttcattaccataagcaggaaaacgtttcttgtcaacaagtgactccacaatcaacatattctttccctgagagatgagtttatacaatcccggcttaccggaaatagacaaaatagtcttcaacataatatattcagtttttgtaattagtagttcattttttcggtgggcaaagataggtattattttgagacagaaaagtgattaagcccaaaacctgcggaattaacggtgtttcgccatcattcactatcacaaaatctgccagtttccgtttttcttcatcgcccatctgactacgaatgcgcttttctatcagttcacgtgaggaagcatcccgcttcatggcacgctgcacccgtatctcctcgggagcgtagaccataacaactacatcaacctcatctgcaaatccagcctctatcagaatagcagactcgattcctgccatccggcatgccgcacgctgacaaacccactgcctgaaatcctcttttacacgcggatgaacaataccattaatctgcccggcatgctcgggactaccgaaaagataagacgcaagcagagacttattcaatactccaccggcatacacctcctcacccaacaaggcagtcaactcactgcgaatacaagagtctgtcatcataagctgtttggtttccccatcagaaatatagaccgggattcccatcacctccaacagtcgggacacaacactttttccactgccgataccaccggttatacctatcttgacagtcataatgaaggagatatttgttctataagaaaatcaacctgctccggattaaaacgcacttgtttcaccccgtcgggaatattccgcaattttaccgtatacttgtccgagcccaaacgcagcaattcctcataagaaacattgatatgaaaatcatctgcagttatctcacggaaacggctaagccctacctggaaagttacttgaaccttagaaggaaaagcacgcaatactttatcagccggaaagtttacgccgtgcaacggtacttccaccgtcttttccgtataaatgtccacaggaagtatcatctcgatagaggcaggaacaaacttcacacctcgtcgcgcaagcaaagacacctgttgccgcaatgtatcggagacattctcctgtttgacaggctgggtataggcagcggttatcgtatccaataccccttccggtgcataagccaaaaccgagtccggtttaaaaatcgtatccgacaaataatattgacggccggcacccactgtccccgataatctgacaggtaccaatttggacattcccgttgcataaatgtattccaaggtatctggcttcatagaaagcaagcgggtggaaacattcaactgactcagcacttttttctcaaactgagaagcataaatacgtacatgattatcaacagctttataatcggaaaagtcaagcgaaaccggatagaagctctttcccaacatataattaagcaaaacagtacctttatcctttacctttatatgcagttcggagaccggctctgaagtaatcatcgtattattaggcactccacgcaaacggaccggaatagaaaattccgcttcataatcgttgttcagtgtctgcaacaaccagaaaccaccggctataaagaagaaaaataaaaaaacaaagaactctctgctcttatcactgagcagaaagtcctttgtttttccggttatattcaaataaatacgtcttatgttcctacgatcaaacataggctcacatctgcttatttagaagcctgactactgtttgcatcagcagcagcggcaaaaatggaattcttgtcaatatggattttaacgttggaagcaatttcaagaaccacatcattatcgttaatttccttgataataccatgaatgccaccggcagtaatcaccttttggttcacttgaagagatttgcggaaattcgcaatttctttttgcttcttattttgcgggcgaatcataaagaaatacataatagcgaacatagctatcaacataatccacatcatgcttccgtccgggcctgcagcaggagcttgcaggaaaaatactgtcatcaaattcataaatattccgttttaatttttattattcaacaaaggtatcagtttttcgacaacttcccttcttttttcaattccttaactattccatccaaagtgccattgacaaaactgccactcttggctgtactgtacactttggctatatctacatactcattcaacgaaacgctgacgggaatgttcgggaaactcaatatttcggccaatgcacactgcatgataactacatccataaaagctacacggtccaaatcccagttacgtgtgttttcgctaataagatgacggtagtaatcgcagttcagaatagcacggcggaacaaacggcgggcaaactcctgatcttcatcatccttaaactcaggcaataacggctgattcgcgccattcttctcatcaaagcgtttgattgttttcagaacgaatgtatccacaatttccttgtcgtcattccaataaaggctttgatcttcgagtaatatatcaagttcctcattattgaaaatgaatgtcttataaagctttctccataattcacgatctgcctcgtaagagttttcggaagaagccatatattccttatatatatcagacgctacaatcttttcaaataaccctttaacaaaatcttcatcattctcccaagtacgtttctggttggaaataaagtccatcaactgcctgttcacttccagttgggaaatgaatttgttttctacaaacttcatgttcggatacaactcttcggctgtgggagccaactttgcttttgccgcatcaatgcgcttttgtgcgtagttcgtcaaggctatcatcaacataagcagataattgtaaaggtcatatgccttggagagactaaagaacaactctttctccgcagcatctaaatttttactgccattctgataataagcatatacaatctgtataatcttaagacgaataagaactctgtttatcataactaaagtaaatactggtgttttaacgaggtgcaaaagtagatatttttaatgagtttacataaataaatcacattttttaatgcagataatcattatccgggctttttcttttgacagtttaaaaaaaatcgtcaattttgaacccgattacaacaagatagctataatatggaagactttaaaaagaaaagcggactggacgtgagcgacaaagaaatagtattctcccaatccattaaagcaggcaagcgcatctattatttagatgttaagaaaaacagaaaggacgaaatgttccttgctatcactgaaagcaagaagatagtaacgggtgaaggagatgaatcacaggttagttttgaaaaacataaaatctttttgtacaaagaagattttgaaaaattcatgaatggcctgcaacaggctattggcttcattcaggaacagcaaggatgttttatgcgccgcaacgacaatgaagaacaacctgacaatgtgcagccggcagaagaacagaaagaaaaagattctccgcttgacggagaaattaaaatagatattgatttttaaaggaaaaccttttgataattcaaaaagaagcggtatttttgcaccgcttttttgcaacatcgtgtggtgaaccacatcgtgtgatggtgaattaagcaataatctacttaatttagagtaacacaaaaagaaattaaaatgaaatcaattgaagtaaaaggaactgcaagaactattgcagagcgttcttcggaacaagcaagagctttgaaagctattcgtaaagacaacggtgtaccttgcgtactctacggagcaggtgaaaacgttcatttcactgtaccggcagaaggtctgcgcaatttggtttatactccgcacatctacgtggttgacctgattatcgatggcaagaaagtaaatgctatcttgaaagatattcaattccacccggtaaaagatactatcctgcacgttgacttctatcagattgatgaaactaaacctatcgtaatggaagttcccgtacaaatggaaggtttggcagaaggtgtgaaagccggtggtaagctgactctgcagatgcgtaaactgaaagttaaagctttgtacaacgctattcctgaaaaactgattgtcaatgtatctcatttgggattgggcaaaacggtaaaagtaggtgaattaagctacgaaggtttggaactgttgaatgctaaagaagccgttgtatgtgctgttaagctgactcgtgccgcaagaggtgctgctgcagctgctgcaaacaactaatcagcgctttcttagtaagcaaacgagatattccggaacgcggattaacgcagacgacgcagatttcatatccgcggacaactgcgataatccgcgttcctctctttttatctgaattatcattaaagccaagtatataaaaatgaaatatctaattgccggtttaggcaatatcggtcccgaatatcacgaaacccgccataatataggcttcatggtagtagatgctttagctcaagcagccggaataacctttaatgacggacgctatggttttacagctaccatgtcggtcaaaggacgccaactgatattgctgaaaccgtctactttcatgaatctgagtggaaatgccgtacgctattggatgcaaaaagagaacattccgttggaaaacgtactgattgtagtagatgatttggcactacctttcggcaccctgcggctgaaagggaaaggaagcgatgcgggacataacggactgaaacatattgcagccacattaggtacccaaaactatgcccgcctgcgttttggtatcggtaatgattttccccgcggcggacaagtggatttcgttttgggacactttacggacgaagactggaaaacaatggatgaacgcctgaaaacagccggcgaaatcattaaaagtttctgtctcgccggtatagacattacaatgaatcagttcaacaagaaatgagtgaagcaagaatagacaaatggatgtgggctgtacgcatattcaagacacgtacaattgcagccgaagcctgcaaaaaaggacgtatcagtatcaatggtgcacttgcaaaggcagctcgaatggtgaagccgggagatgtaatacaagtacgcaaaccgccggttacctattctttcaaagtactacagactattgaaaagcgtgtaggcgccaagcttgttcccgaaatgatggagaacataaccgccccagagcaatatgaactgttggaaatgagcaaaatcagcggatttatcaaccgcgctaagggaacgggacgccccaccaaaaaggatcgccgtgaactggaagacttcactgcgcctgaattcgtggatgactttgattttgatttcgactttgaagaataatatacaagtatgagtgagaaaataataaaatggggatttatcggctgcggagaagtgaccaaatacaaaagtggacctgcatttcagaaaattgaacactccgaagtggtagctgtgatgagtcgggatatctccaaagccaaagcttatgccaaagaaagaggcattgccaaatggtacaatgatgcacaggaactgattaatgatgaagacgtaaatgccgtatatattgccaccccaccctcttcccatgccacatatgccattatgtccatgaaagccggcaaaccggtatacatagaaaagccgatggcagtgacttatgaagagtgttgccgtatcaaccgtatttcccaagaaaccggcataccttgttttgtagcctattaccgccgttatcttccttatttcctgaaagtaaagtcattggtggaagaaggggccatcggaaatgtcatcaatatacaaattcgctttgcccagccaccccgcgatctggactataacaaggagaacctaccctggcgtgtacagcccgatatcgccggtggcggttatttttatgatttggctccacaccagatagacatactgcaagatatgttcggatatattcttgaagccaacggatacaagagcaaccgtggcggactatattctgcagaggataccctcagtgcctgtttccaatttgacagcggcctggtaggcagcggctcgtggtgtttcgttgcacatgagtctgcacgtgaagaccgtatcgaaatcatcggagacaaaggtatgatatgcttttctgtatttacctatgatcccatagccttacacaccgaacgaggaagggaagaaatccctgtagaaaaccccatttacgtccagcaaccgcttattcaagctgttgtagaccatttacttggcaaatcaatctgtaactgcgatggcgaaagcgcaacactgacaaactgggtaatggacaaaattttaaataaaatataaaatacgaagtataaggtataaatggctatgctatgatattacataaccatttgtcattcataaatcatgctcattgccaatttatactttatacttcattctctttcaaagtttgcttctcaccgcttcaaccaattcctgatattcgacatccgtcagatacacctttcccggattcatctggaaagtaccaccataatcgggaccatctacatatttcggcgccaaatgaaaatgaagatgagataatttgtctgaatacgcaccataattaatcttttccggattaaaagctttttgcatggcacgagtcacacgggcaacatcagccataaaagcattgcgttcctcatccgttagttcattcaagtcattgacatggtctttgtaagccacaaggcagcgcccgcgataagtttgttccttaaaaaggaagacacgtgacacactaagctgcgcaatctcaatcatcagattatgcaacgtttcattattctgacagtacagacagtctttcggatcacttttcatgatatttcttttttaaagtttatgttcgtaaagcaaagataaccgttattccaatatcacaggtcgacattctcatcattttcaccgaccaatttgtacacatcgacattctcaccgacaatccatactacatcctcctcgacaaaaggctcgtgcacgtcaggagcatgcaaagtttcccctcctcgctccactccaacaatcaggcagtggtatttctcgcgtatgcctgcatctttcaatgttttacccaagaacggggaatttgcatcgatacgcaactgacgcagtatcatctcacttttttccacggcgtccgcagctatcgttgaaagcttattcatttcctcaccaaacacattcaattcttcatcagtagcaataacctgtatcttatctaaaggaaaaagacgcacagaagcaccgggaatatttatccgcctgcgtccacgaagaatagaaacgacatgcaccccataacgcttgccaaaattcaactccgccagcgtcttgcctgcccaagccgattccccgggaatctcataatccgtcaaatgcaaatcacgcgaaagcagacggcctgcatattcaggcttcttctcgcccaaatattccgcacgcatatcccgcgaccgcaaattctgaaaaaaagtacgttcaatcattatagactgccgcttcaactgtctggaaagtatcatcactataaccagcagtaccgcaactccaaagacaagaccaaccgacagtttaaacagtccggctattacaaacatcacaaaagaaactgccaacagaattcgcagcacaatagtagctaccaatggagcgcgatttccccgactgtcgcgccacaatgttacgaattctaccgaatggtttttcttaatcatgatggctcgcagaaaaggagaaataaacagaacaatgaccaaagcagacaataaagagccccaaatcccaggcaagtttcccttgaaaaacggtacaaggaagcggaatgcgatagcaatcaccgccacacttacaatggaataaaccaccgtaatacgcaacaaagcaaatatcagtttcttccataaactctcatgattcacagtctgcgaaccggaagcataatgcagcaaaaatttctgccaccgttccggcaaatgcgtatcgacaaaattggaagccggctctgcaaaacgaatcatataaggggtaagaaaggtagtaatgacagatacagccaccactataggatacagaaaatgacttgttacatgcaaagacactcccaaagaagcgatgataaaagcaaattctccaatctgcgtcaaactgaatccgcattgcatagccgtcttaagcggctgccctgcaagcaatactcccaatgtgccgaacaacgattgcccgacaataaccgccaatgtgatgacaacaataggacccgcatattctactatcatcaaagggtctaccatcatacctacagatacaaagaatatggcaccgaataaatcttttaccggcttaaccagacgttcaatactttccgcctctaccgtttcagccagaatagaccccatgataaaagcgccgaacgctgctgaaaatcccgtatgggcagcaagcacaaccataccgaaacaaagcccgagcgatacaatcagcaaagtctcctcactcatcagcttccgacattttttcaacagaacaggaatcaaatagatgccgaccacaaaccacaatataagaaagaataacagttttgctatactgcccagcatttccgtcccttcaaaattatgactgactgccatggtagacagcataaccatcaggacaatggcaagaatatcttccaaaatcaacacactgagcaccagcccggtaaactttttcttgcgcatgcccaaatcatcaaatgccttatagataatagtagtggaagacatggctatcataccgcccaagaaaatgcaatccatccgtttccatccgaaagccgtgccaactgccacgcccaacaatatcatacagaatataattgtacaagcagcgattatagcagctccccccaccttgactattttcttaaagctaaactccagccccaaagcaaacagcaagaaaataacgccgatgtccgcccaagtctgtatgtttgccgtatccatcaccgaaggggtataagccatgtgaggactggccaagaagcctgcaacgacataccccaagactaacggttgtttcagttttttaaataatagcgtcattattccggcgcaaatcagtatcaatgccaaatcggcgatcaagggagctaaatgtgacataatatttgtccgattgaaattctactgacaaagatataacaaaaaaagcttttgaatctcttttataacaaaaaacga

SEQ ID NO: 4098 - DNA, 4520 bp, Unknown
  gut microbiota DNA sequence
cgttgttgtccataagatttctgagttagttttatgcaaagataggatttttacaaatattacccctcaggtttttacattgacccccttttaccaccatttccgctatttatagtatgctttaacgggaataataatgtatctcgtattcagaaacaattataacactcccggttttcctgtccactcctgattaattttccagccacttttccggtttttctttcttatttttcaaaaaccaatcggttgtttggttttatattttctttcttatatatttgcatcaaaggttctcgtcagtaccttttaatttgagagaagcaaatagtttaaatcagtttgtatcaataaaatactccattagctaattatatgtacttactgtttggaaaagaaaaataatatttaccgaaaatgaagataatcttgtcctatataatggccactatcatccttctttttcttcttgcattgcccattgcaggagtagtagcctacatacggttaatccgtaaaatgcgcagagagcagataactgccattccgaaattctccttattcatgctttttcttatctgcggaactttgctcatggaaattctgttaggaataagcggcatgtggtcgggagcatcgacagcgagattcatattcctgctgttcgttgctcccgccttgtgtggaatgatagcctggcggcatcggcatcatagcgaaatatccaaataccactgcactattttgcatgcagcattagggtatttgctgggcgaagcggttctgataggtgcagtcagcttgtttatcatcggagaactggcttatatggcgctgatcggttagcataaaaccgtattttcgcataccggaaaagaaattcccggaatattaattatctttggtgaaaaatagaagggaatggatatacatacgtttataggcaattatcgggaagctttcgggcagcaggccggacttcccatcgtattttggtactccgaccaaccggaagctccggcagagaaagtaaacgggtgcttctttaaaagcatggcgcaagtaagaaacggaaaaataatcagcctcaatgccgaaacaataggctgtggaggcggcaagttctacacaggcttcacggatatgccggaacatgtgcccggcttcgtctctttgaaagagaaatacaagaaaacacccgatatggttattgacttcatacaggaattgcaagtgcctaaagcggaaaaagcctacctgcactttgcacgaatcgacaagattggttctttcgacaaaatggaaggcatattgtttcttgccacgccggacatgctggcaggacttgccacatgggcttttttcgacagcaatgcaacggatgccgtatcagctcctttcggttcgggctgttgttccgtagtgactcaggctatccttgaaaaccggaaacaaggcaaacgaacctttttgggattcttcgacccgtctgtccgccctcatttcgaggcagagttattaagcttcaccattccgatgtcccggttcaaggagatgtatcacaccatgcgcgaaagctgcctgttcgacacccacgcctggagcaaactcaaggaaaggatacaggacaggcagaaagagacaaagcctttcaaccatttaaatgtatcttttgaaatccgtccggatattgtgctgcgtgaagtaacggtagaagatgccgctgccatataccatgccatagatacccaccgcaactatatgcggacatggttgccttttgtagacaacctgaagtccgtagccgatgaggaaaactttctgaaaagggtcctctccgcccctgccgacagctacgaacctatattcggtatttggaacagagagaatgaaatttgcggactgataggttttcatttttccgactttgccaatcaccgcacggaaatcggttactggcttctgcccgaataccagcatcagggcatcatgaccgattgtgtccgccgcctatgccgatgggccgtcgaaaccaaaaatataaaacgcatacagatacgttgtgccacgggcaatgtagcaagcaacggcattcccgtcaggcttggcttccgccttgaaggaacggaacgggccggagagttattggcttcgggagaatatgcggacatacatgtatacagtattttaaaagaagaacttatggaacaacaagcgaaactcaatgagcacaacaaacaggaatacccgcctatgcacaccaccgaacacatcattaatcagacaatgatcagattattcggttgcggccgttccgtctccgctcatatagaacgcaaaaaaagtaaattggattatcggctcaacgcctgccccacggaagaacaaatagagagtctggaaaaagcggtaaatgaagtgatagcacggcatctgcctgtcactaccgagttcatcactcaggcagaagccaaaggacggttcgatttggaacggttacccgaagatgcttcggaaaccgtacgtatagtaaaagtcggtgattatgacgaatgcctttgcatcggtacacacgttgccaacacttccgagataggaactttcaaaattatcagccacgactgggacgaagaaagcaagcgctggcgaatgcgttttaaattagtatgaaattcaatcaattttaaataaaaagatagcaatattggcattatacaggtaaaatagtcagaccaacaatgacaattagtcaataaagtgagtacaaacctgttggcatacagtttgccataacagtaagtgaacgacggttcaagatacagacggtgaaagccgaaaggtaaacatcggggaacatcgaaaaccgaagttcagagcaaaacgaatgtataactttttaaagataggagactatgattatgatgcctgtaagaagaactcagaattggttaccaagtatctttaacgatttctttgataacgattggatggtaaaagccaatgcaacggctcccgccattaacgtatttgaaacagaaaaggaatacaaggtagagttggcagctcccggaatgaccaaagaagacttcaacgtccatatcgatgaagaaaacaacttggtcatcagcatggagaagaaaacggaaaacaaggaagagaagaaagaaggccgctatctgcgtcgcgaattctcatactccaaattccaacagacaatgatccttccggacgatgtagacaaagaaaagatttccgcccaagtagaaaacggcgtattgaacatagacttgccgaagttttccgaacaggaaaaagaaaaggccaaaagattcattgacgtaaaataagataactggtaattagagaaaagtcccggtgcagattctgaataaactgcatcgggacttttttatcatacctgaactggattacattgtacatgcgtttacctcactacacgagaactaatttttaacagctttctttcctttcaggaatcggtctgtcagccatttgcgtataggttcgtcatagagtttcagacaggcataggcaagaacgaaagcaccggcaaaggtcagtatcatataaggaatgccttccgctaaagtagcattattattgcacacccatgccgtgtaggtatacaccaacggataatgctttatgtataccggatacgaaatatctcccagaaacttgcacacagcggtagaacgtttgcccgtcaccttacctcccgcccccatggacacaatcacaggaaagacaaaaagaatgcagcaggcctcataaagtccgttcatccaataatgattttcaccgcccagacggggaaatgccaaaactgccacaatcatcagactgcaccaccagaacgcacgcttctcaatacaaacaagccaccccagacgggacagcagtaatccgccaaagaaaggatacatcaaccggacaagccctacgtactgctgctcccaattcaacgcccagccgccgacaatatcacctgcaggtgcggtaagacaaaggtgcaccgtaaaacatcccgccacaacaacgagaacggataaagctgtcttgctgaacttgcggatgaacaatgcataaagaatattgcctatgtattcgtagtaaagcgaccaggccggtccgttgagcggatgcatctcggtccagccgcgaatgtcccatttcaaaggaagcggaagcagcgtacaccccagcagcattaccagcagcatagtccctaccgatgtatcctgaatagccggaaagcagggcgactcctgaaaataaaagaacactgcacccactatgcttcccactatcaccataggatgcaaacggataatacgccgcttgaagaaagtaccgatgctcatcctgctccagcggtcgtcataagcataaccgataacaaaaccggaaagcataaagaaaaaatctaccgccaggtaaccgtgattgataatttgttccaagtgattgccgccggaatgcgcttccagcagatgaaa

SEQ ID NO: 4099 - DNA, 19729 bp, Unknown
  gut microbiota DNA sequence
atcgtgcccgccgtatgcgacattgtcgatattgccggactggtgaaaggcgccagcaaaggtgaaggactgggcaaccagtttctgggcaacatccgcgagtgcgacgccattatccatgtgctgcgttgcttcgacaacggcaacatcgtacacgtggacggaagcgtagatccggtgcgcgacaaggaaatcatcgataccgaactccagctcaaggacctcgatacggtagaaaaccgcatcaagcgtgtagagaagatagccaaagttggcggagataaaatggcgaaagtagagtacgaactcctgctccgctacaaagacgcattggaacagggacagagcgcccgcaccgtaatacctcagaacgatgacgaggagcaatgcgccaaacagatgttcctgctcaccacgaaaccggtactctacgtctgcaacgtagacgacaccagcgccgccaccggcaaccaatacgtagagcaggtgcgcgaggccatcaaagacgaagatgcccagctcatcatcatctccgcacagaccgaagctgacatcgccgaactggaaacttacgaagaaaagcagatgttcctcgaagacctcggcctgaaagaaagcggttgcaaccggttgattaaagctatctacagcctgctgaacctcgaaaccttcatcaccgccggcgaaatggaagtaaaggcatggacctaccgcaaaggctggaaagccccgcaatgcgccggtgttatccacaccgacttcgagaaagggtttatccgtgcagaagtcatcaagtacgaagactacattaagtatggcagtgaagccgccgtgcgcgaagccggaaaactgggcgtggaaggcaaggaatacgtggtgcaggacggagacatcatgcacttccgcttcaacgtataaaaataacaggaagagggtatgtcgaaatgaatgacaaactatatgttttgggcagggccaatgatgtagcaatcaaaaatttcgacatcctcaatcataaagctgaattcggcatttcgagacaattcaataatcatcctttttactcctaaaatttatggaacagcaaggagaaatagtactttatcagccagaaacaaccttcaagctcgaagtgcgattagaaaacgaaacagtttggctcacgcaagcacaaattgcagaattattcggtaccggcagacaagccattaccaaacatctgaaaaatatcttcaacagcaatgatttggaagaaaattcagtatgttccattttggaactaactgctgcggacggcaaaacctataaaaccaagatatataatcttgatgcgattttatccgtaggatatcgtgtcaatagtaaaaatgcaacctctttcagatgttgggcaaacaaaatattaaaagaatacctgctgagaggatattcgattaataaacggctaaacaacatcgagcaaagaataaacaatgatttaccgaaacacgaacaacgtatcgggcaaatagaagaaaaattggacctgcaacgacacaatgctgaatatccggcaatagccatccatgaatacaagcagtctcatgaccgtttcctcatcatagactccgaagttttccacataggggcttccttgaaagatcttggaaaaaaatggtttgctttttcaaaactgcatttctccccgcaagaactgattgagaggatgctgacagaaatacagaaataattaatcttctaaagatacgctacaaatgaaaaataacaacctgaagtatctcattgcaggaaccggcggtgtaggcggttcaatagccgcatttctcgctctcgccggaaaggacgtcacctgtattgcccgtggcggacatcttgccgccttacgtgaaaacggattgaagttacattccgatttaaaaggcgagcatacattggacgttccggcttatacggcagaggaatatgccgccctcgcctcttcggcggacgcttacaaggcagacgttattttcgtatgcgtcaaaggctattccgtagactccattacggaattaatcaggcacgccgcacacaaggacacggtagtaatccccatcctgaacgtccatggcacaggtccgcgcatccagcggctggttcccggcgtcacggtactggacggctgcatctacatcgtaggattcgtatccggcaaaggcgaaatcacgcaaatgggcaagatattccggttggtttacggggcacacaaagacaccattgtttcccgtgaaacattggcagccatacagcgggatttgcaggaaagcggcatcaaggccgacatatctcccgacatcaaccgcgacaccttcgtcaaatggtctttcatctcggccatggccgttaccggagcttactacgacgtgcctatgggcgaagtgcagaagcccggcaaagtacgcgacaccttcatcgggctttcgcaagaaagcgcggccttgggacggaaactgggcatcgggttcgaggaagacatcgtagcgtacaacctcaaggtaatcgacaaacttgcccccgaaagcaccgcttccatgcaaaaagacatggcgcgcggccaccaaagcgaagtgcagggattgcttttcgacatgattgcggcagccgaagaacagaatatcgacatccctacatacagaatggtagcggagaaattcaaataattttatacctttgcctcaccatcttatacagtttcatcttccggagcgtagcgcagaacctcttccgtgcaatacataaaaagagcagattctgcgctacgctccgaaggacgaaaacaaagatataaactaacttaaattgcttatgaatatgctgactctcctctctatcaactggaatcccaacccggaactgttcaaccttttcggcagccttccaatccggtattacggcctgttatgggtggtaggtattgctcttgcctacgtaatagtacaccgccaataccacgaccggaaaatcgacgaaaagacattcgaaccgctgttcttctactgcttcttcggcatcctgataggagcgagactggggcactgtctgttctaccagccggattattacctgaatcacttctgggaaatgatacttcccgtgaagttcctgccggacggcggctggaagtttaccggctacgaagggcttgccagtcacggcggtacgctgggactgattatcgccctttggatgtactgccgcaaaaccaagatgcactatatggatgtgctggacatgatagccgtagccacacctgtcaccgcctgttgcatccgccttgccaacctgatgaactccgagattatcggcaagccggccgatgtgccctgggctttcgtctttgaacgggtggatatgctgccccgccatccggcacagctctacgaggcaatcgcctacttcatcttcttcctgggcatggtctacctgtacaggcgcggacaaaagcagcaggaaaacaagctcaaaacggacttcagcaccaccaaagccaagtccaccgcagtgcaaaccggcgctaccctaccctaccaccgcggcttcttcttcggcctctgcctgactgaaatattcgtattccgcttcttcatcgagttcctgaaagaggatcaggtggattttgaaagcgcaatgacgctgaatatggggcaatggctcagcattccgttcatacttatcggagtgtacttcatgtgtttccacggcaagaaaacggcaggaaaataagaactccgcaacaataaaaaaatatcaaggcatgaaaccaacagttccacctaaggaaactgaaagttccatgccttgatacttcttgttccactacgtgaaacaaagagtttctcacggggaaacaaaccgttccctcaggagaaattttttgtttcattctttgaaacccgacttacgtcgcaggttactttcctttgactatccgcttgatgtcattcagcttgttcagcgcttcgagcggtgtcaggttgttcacatccaggttcagtatctcgtcgcgtatctggcacaacaccgggtcgtcgagctggaagaaactgagctgcatgccgccgcgcgtctctcccacttcaaccatcggcttggccgcgatgccttgctggcggttgtccttttcaagctgtttcaatatatcaccggcgcgtttcacgatacttttgggcatacccgccattttggctacatggataccgaaggaatgctcgctgccgccgcgctccagtttgcgcaggaaaatgaccttattgtcgatttccttcaccgatacattatagttcttgatgcgcttgaaggatttctccatttcgttcagttcatggtagtgcgtggcaaagagcgtacgcgccttggcatgcggatgttcgtggatatactccacaatggcccaggcaatggagatgccgtcgtaggtggaagtaccgcgccccaactcgtcaaaaagcaccaggctgcggggagaaaggttattcaggatgtcggccgcctcgttcatctccaccataaacgtagactcgcccacggagatattgtcgctggcccccacacgggtgaatatcttgtccaccagaccgatatgcgcgctttccgccggaacgaaacagccgatttgcgccataagcgtaatcagggcggtctgacggagcaatgccgacttacccgccatgttaggaccggtaatgatgattatctgctgcgtactgctgtccagcatcacatcgttggctacgtacttctcgcctatcggaagctgcttctcgatgaccggatgacgtccctggtgtatctccagcacctcgtcgtcggagattacgggacggatataattgttttcgcgggctgcggtggcaaaagacagcaggcagtccagccgggctatctggttcgcatcggtctgaatggcaggaataaactcactcaaggactgcaccagctctgcataaagctgtgtttccagtaccagtatcttgtcctcggcgccgagtatcttttcctcatattctttcaattcctgcgtaatgtaacgctcggcattgaccagtgtctgcttgcgaatccactcctgcggcactttatccttgtgcacgttgcgcacttcgatatagtaaccgaacacattgttatagccgattttcaggctgggaatgcccgtaagctcactctcccgctgctgtatctgcaaaagatagtccttgccggaataggctatccggcgcagctcgtccaattcggcatttacgccggattttatcacaccgcctttattgacaagcaacggcgggtcgttgttgatttccctttcgatgcggtcgcggatggaacggcagatgtccagttgtccgccgatatggttcagactagcgttatcggcatccatacaggcttccttaatcggttcgatagcctgcagggccactttcagagcgactacctcgcggggagaaacacgtcctacggctactttggagataatgcgttccaggtcgcctatcaagtgcaactgctcttcaatcactcccttgaactcaggcttccggaagaaatactccaccacgtccagccgtccgttaatgggcttcacatccttcagggggaataccatccaacgcttcagcaggcgggcccccatcgggctgattgttttatctatcacatccaacaagctgctgccgccgtcgttcatgctgcccatcagctccaggctgcgcaccgtaaacttatccagacggacgtacttatcttcctctatacgtgccagcgaggtgatatgtcctatctgcgtatgctgcgtcataatgaggtactgcaagatagcccccgaagcgatgataccgtttttgagatgctccacgccgaatcccttcaggtttttcacttcaaagtgtttcagcagtttctcgcgggcggtggtttccgtaaacacccagtcgtccagctcgaacgtaaagaacttgctgccgaaattgccttcgaacattccccggcggccacgttcaaacagcacctctttcggggcgaagttgttcagcagcttgtctatatggtcaaaggagccttcggcggtcaggaactcaccggtggagatatccagaaacgccaccccgcaggcgcctttaccgaaatgaacggcggcgaggaagttgttttcacggtaattcagtatattgtcgttaatggatacgcccggcgttaccaattcggtgataccgcgtttcaccagtttcttggtgagcttcgggtcttccaactggtcgcaaatggctacgcgcttgcccgcacgtatcagtttgggtagatacgtatcgagcgcatggtggggaaagcctgccatttcaatcgtttttcccttgccgttggcgcgcttagtcaaggtaatgcctaatatttcagaagccaggacggcatcggtggaataagtttcatagaagtcgccgcaacgaaacagcatgaccgcatcggggtgctttgccttcaactcaagaaactgcttcatcatcggggtaaggacaatatcttcgtgcatacaggtatatctttgcggaacacagaagcccggtggcgcagagttttaacggtatgaactcccggtttcatgaagcagacgctctgcacaagcaactctgtgccaccgtatctctgtgttcattgattaatgtcacaaagataatccttttttagaaaatacgtatgtaaagggatttaatccttagcaagccttaacaaagccggtgtttttgctaaaacatgttataaaacacacttttttatttgctttatttggaaatttcccgaaagtccgtacctttgcactgtgtttttcatagtattagatttaaggttaacaaaggttggagtacagcggtactcctttttttatgcccgtacgtccggttcatacatccgcagcgcccgcgcacgtccggcttcaaccgctaaaaccggcgcaaaagttcctcgaacgtcacaccgctgtccgctttcatcttctccatacgaatacgcttcaggcgcttctttaccgaatctttttccagatgcatgatttgtgacatttccaattgggacagttgcatcttcaccatacagcagtagcgcaaatcctctttattcaaagcaggatagtgttgttgcagtcgcctggtgaagttatcgaaaataatgtccgcgttctgcacaatgtcttcccagtcatcgtccgaaagaaggatattgctccccttctctatctcctgaacgatacgctggttcagccttctgaagaaagtctccttcagccgggcttccttctgctccatttcggccatacgctgcaagttctcggtagtcacttgccgctgatgatgcaattcttcctgctgactggcaagctggtgctgctgctccaccagccggcggcggttgcgccaataaaagaaataaatggtacttgctatccacagcgacaatagggacaaggtagccatcagatatacattgctctgcctttcggcggcctgagtgcgccaataaaggttctccacggacagttgctcgtgcttgtaaagctcctgcaacgcaatgacttccgccgtatggcgttgcttcctcacgctgtccgccagttccgtaaaacgcagcagaagagagtatgcctcattgcaccgtcccattttataatacgctccggacatatggttataggcatctgcctgtgttgccaaattcgggctggcaacggctttccgaaaataatggtaagcggagtcatactgccccagcttcccgaacaaatccaccttatcggcatacaggccgagaatggcaagggtatctttacggggacgcaacccgatagctttgtctatatattccagtgcctttccgttctctcccattttggcatagatactgcccaaatcggtatatacatgaggtaattgcgacggcagggaatccgctattgccgcatcataggcggcctgtgcataataaagggcgctgtccagcctgttcagaaagtaatagccggtggcgatatcgcacaacgccaggttcttgtaaaacagattgtccatcctcaacgccgccttcaacgcctctttggaatagcgcatcttgccctcatactcttcctggttcaggcagacgactcccagccatgtattgaccctgtagagctgctcgtcattgccgcttccctgcaggaaaagcaaggctttcagaaaagactgcatggcatccttcatgcggtacagccgcctgtccaggtgcgccttgcagtacaacgcccgttcggcatacagagaatctcccgactcactgaaatatttgatggccggcagcagcaatgtatcggtttccgcattcaactgctgtttccggtgcatggcttcggacaataataaagcgtagagcgcatagtcgcggtcggtaaggttgttctgcggctctttgatttcctgcatcacggcgatagcactgtccgtctctttctccgccatcagtttttccgccagcgctacccggcggtcgggaccgcacgccaccagaaacatactccacaaaacaaccgaaattatatgtttatacctcatcgttccaaaatttgtcattcataagaatccattaccacttcaccggtttccccgtgcacaagtattaccttcactttatccggctgcacggagtcgcgtacatcaatctcccataacggcatatcccggcttgcatccacataacggtttacactgacatgtgccgtgtccgacagatttatgccacgcagtttagcaaatatatgaatatcctgccatgtatacagaaaagtgtgcttctttttagcctgcccggacgaacccgctgccaccctggcctgcgcaccggcagaataacggatttcatcctgcggctgcgaatacacggttgctaccggatgtattcccttgacgactccccagcccagccaaccgtccgccaggtctattttcaggtaaacacgttccgaaccttcaaactgccgtgccatgcggggcgacacattgacacatgtgtaccggtctccttccacaaacagttcgccatacgaaaaggtattcagcagccaggaagcggaatagcgcgaaaaacgggatttaggcctacggtcgtgcaccttggcggctataatcctatagtcgcaggttttatcggcagaagtaaagcacgcattcagccaaaagagagaaacgactaccacattcgtacacaatgccgacaaacctgccccccagaacaaaccgtaaagcatgtttctccccaatcgccttactcctttcttctcgtcccggccgcaacagagatacacatacagcatccggccccccatgccgataacgaacagaacagaagcgacaaccgcattcagacttcgatagctgcccgttgaaaaagccgtgcgcagcaaccatgcttcttccggatgccaggcacggcaatgcagcaaaaacagtacgattatcaccggaactgcaatcttccacaaagcaatcctgccctttcgcccggcagattccgcccgtatgctttcctcacggcaccgctgtccgggtgtatgcttcaatctttgctttttcccactcatatggcagtacggttatcagccggtttcctacaaataggtctcaccgtctattttcagcaaaaaaggttttatcggatagtccgtaccgccgaaggtcaacttcctgactctgataatattgcttccggaccgtaccacttccattctgtacacaaacgcatactcctctttcccgtccttcttgctataccgggtggaaaacgacagttgcctgataccgggatgctccagttcgggtctgctctcatcgggatggcggttgcaggtcaggacgaatttaaagacttctcccggccggagtgtttcaggctcggtgctgacactacagaccacttcttctatattctctgcaggaagcacgcagaccttcatcgtagagcaggtacgcatcttccctcctgtcatggcccgtaccgaaggcagagtaacccaaccggctttcttgaaacggactatgtaatagtttccgtggagtgaaagattctcctgcttgccgtttacaaaagaagtccttgacgaccgcgtagaatgcgggcccgacaccagctccgcctcacagtcgtcccaccggggaacggacatgtcgtaaatctctccggtactgtaatagccgacccggacatcctgccccacatgcactttgcaaaaagacgtatctacttcattgaagaatcttacactgtcattttgcgccgacaaggttgcaatatgcaatgccagacagcacaaaacgacaagcactttcgaatagcgtatctcattcatcccggtactgttttgtttcttcccactctttttccagcttaccgtctatgtcatacattttccaccggcctacacgtctgccgttgaggtattcgcccgtttcacgaacggcgtcgttcttcacgtaacgcgattcgaacagtccggttttccgcccgtttacataagtggatatttcccaataatcataacggttggtaacaatcagccggcgctccttaccatgcagacggccgtgttggtaggtcgcttcgtaaacaagctctccattgccaggattatattcgcgataaagcccgtccttacggtcggctttcaggtaaaattcacggctgcgggcgcccgtattacggtcatacgatatatgcagtccttcttccctgccgttgacgtaggtcttcactgacaatgtatcgccactttcggcaatttcaatccaccggccgtccttttggtcgttcttataatgccccagaatatgcggctgcccgaaagtgaacatcgaggagtattcaccgtctttcatgccgtattcattataatattccgtctcataaagttcgtacgtccctttcaggaaagtaaactgtttgcctacctgcttaccgtccttataagtatggtccctgcgcaacgtaccgtcccactcataaaccatatcctttccatcctgcttgccgttgcggtagttcacctcgcgctctaccttgccggtagtaaaataggttttatgggcgccgtgcagcttgccgtccttataggacttctcttcctgcacacgcccctcgctatcgtacatcttaaatacgccgtctttcttgccgtccttgtatgtaccgtcgcatttcagcttgttgtattcatactctccatacttgccgttgtaaaaaccgtccttaaattcagcctgtatataagcagagtgataaccgtctatgatgcggtggtctccgttcaagggtttttctgttttcaggtcacgaaaaagaatacgtccgtcacccacattgatagccgatacctgttcaatcggatactccttctgtgcctgtaccataacaggcagaaacatcagaaaagaaatcaatgccacacatttcttcatagctttttctttcaaaatcctactctttttatccataattattactttttataaaagttgaaaacagtcgtataacgcaccaacgggcctataggacaaaaataaaagataggtactgaataagaaaacggacaaggggtataattacgggatacttcacacccgataaatatttattttacaactcattatcatgatatacaaagaggtatgcaagggtatatttatatatcaataaaaatatacgttataatttttcaaagcaaataaagaaaatggaaaagcaggtatccaactaatgtttctttattgttttgtatccatttttctctattcatagaatactttttctttctaatccaaataaaagaaggtgtgctattgtgatatgaacacgcattcgtgaaattcaatcggacacaccttcttctatcctgtaattccggctaaagccgttatgcttcctgcttggaatattccgaaaactcacatccgaactgttccaccagcatattatccatgtcatcggccttaaaggcaagattcaccagattcgtacggatttcatcttccgactcttccgtgaggtcggacagatggatgcgataagccatgtaaatctgccggccttcaatgcccagtttatagggagcgaaatcctcactcaggatatagtccaatacacgttccacctcttttttaggcaagaggttaatgggagaaacagcaaacagataagtgttttcatacacaaaaatacgaatctccgaactccctttatgaaacgtccacgaatcgtaaccgtcccgcgcaaggatagggttaactcccatttcggcaatagcctgttcgcagaacacactcaaaggcgactgttcacgctccgcaaaaacttcttccggcaacttttcgccgcaggaaggacaaaattcctcttcctcggatatcagctcatcgcaactgtcgcactgtacctggaatgtattgcggtcaacctcgtcaaccgactccaaaagcttacgcaatgcctctacacgcacaccgaaccccatattgtccgcattggtgaacttgcttaccgttactcccaccacttcactgttttcattgaagataggtccgcccgaattaccgggatttacggcagcatcggtctgtatataatattttccttccataagctgcttgggcgaggaaaccgacccttccgttaccgtaaaaggcatgccgtaaggataccccgccacactgacctttccgccgatggccaatgaatcgtccgcggccagactcagttcaggaagagctgaaaagtctgcatccacagccaataaggcaatatccaaagaaggatttacgagcaccactttggcaaggtaaggattccggtcgttatcatgtatggcaacagtatggaaaccgttcaccacatggtagttcgttacaaaaagattataagatttcagatagaaacagcttccggaaccgccggcatgtgtcaccttatatacgagtttataaatgttctgatccataatatatagtttagataccgttaagttaattcataattcccatcaccttcttctgcatttcaagcatcagtcgggagtattcctgcatattaccgctcatcatggcttccgccattttctgttgcaacacctgcatgtcgtcacttcccatggtttccgtaattttctgcacctgttccatgccggcagcaaagtccgtctcatcctcatcgtccaaatcgccttccataatcttgtccatagcattgtaaagaatttcagaggcctcttccaaagagcggttgcctgccttcttcaaagcttttgatataacggcattgatatcgtcctgcatatcattatagaaataagcttcgtagaacacataaagcaagcgtaccgcactgcgttcataattctccgactggatggcttcggtggcttctttatagacattcataaaattctcctgcacgtttttcagggaagaacggcgctttgcagacaccaacgtatccgtgtagtaaaggtcttccgccagtttttccttcggaacggcaagcagcttttcaaggaacgcttttccttttgatacaacctcttccgtaggcaggtcggcatccatatcattcactgccttgtcgaggtcgttcagcaattgtccctgaggatgtgcaaaataggaaatctggtagaaagcggtatccagcacattccacgaataaccgtaccggcggtcggccccatactctttgagtgcctccaacgtttcgcgtcccaatgtctgtatgccttcataaatgcggtctacctcttcctgcggatacggagtcacctgcggctcgtaacagcgggtagcgccaaatttcgtacagaactcatcgtcatacttatcgcctatgtggcagatattctgaagcacgaaatacattttatgcggatgactctgtgaaagcggacaaacatattccatattcaacttatcaccgttctttacgaagcggggcaataacaatttattcaggttcaagtccgccacctgacggagcatggctaccctacccttttccggcagattcaggaaatcggcattgatatggaaaaaaccgtcggcaatacggatatgtacaagaatggaaccgtgaggaatgtgaaactccgtaccgtcggcattaccgtacttggtacgaaagtccgcgttcaaataatccagcaaactatgaaaagcctgtacatactcaccccggttatacaagtccacaccctgttcgtaggcttcggtacggatagcactttgcgtagaatctactacgggagaaataaaagcaaatgtctgtttcatatcatgatattgtatttaaagaaataataataaccgtatcccgccctgcggaatgccggaaaacaaatatagaaagcaaaacacaaacaagaacatagatgcagggggataaatacagaatgaaaacatctcgttaaaatattgaatattaaaaatttatttggcgtaaacagcataaaacaaggggatatttaccccgaaaacatggatttctttcctttttttccgcccgatacataccatccggacggcacaacagaacgggaaatgtaatgattcttcgctcccatatattatatggaaaagccggtattcacaacaagtggtttcctttttcagtacaacaaaaaaacgctcttaataaacctttctgcaattttactataattcgaaaaaaattatagtaaaattctctccgaatttattaacagcctgttttcccgctatcgcgacacttgtaataaatataaacaaaaaaggatgcaatcttcacagattacaccctttgaaatatcctaaaaaatcttttttgtaaaatcctattgaagtaattcagccattatttgtattacaaacaaaaaattagttttaaaagcacttcacaaatatagcgaataaaaagcgtattgtcaagtattccatgctgtttttttaccctacttcgctacaaatctgaaaataaacccttaactttgcaccgtttaattaacaggatataaaccaaattaaacgggctatcaacaagttttagtaagtatatcaacaagttttcaacaatataattacaaccattatggaatacaatttcagagagattgaaaagaaatggcagaaacggtgggtggagaacaaaacctaccaggtgacggaagacgaaacaaagcaaaaatactatgtactgaacatgtttccctaccccagcggcgcaggtctgcacgtgggtcatccgttgggatacatcgcttcggacatctatgcccgttacaaacgtctgcaaggtttcaatgtcctgaatcctatgggatacgatgcttacggcctgcccgcagagcaatacgccatacaaaccggacaacatccggccattaccaccgtcaacaatatcaaccgctatcgcgagcaactggataagataggtttctctttcgattggaaccgtgaaatccgtacctgcgacccggaatactatcactggacacaatgggcgttccagaagatgttcaacagctactactgcaatgacgaaaagaaagcacgccctatcgaagaactgacagaagcattcgccaaatccggtaacgaaggactgaatgccgcatgcagcgaagaactgcatttcactgccgatgagtggaatgccatgagcaaaaaagagcagcaggaagtcctgatgaactaccgcatcgcctatctgggtgaaacaatggtaaactggtgtccgcaactgggtaccgtgcttgccaatgacgaggtggtagacggcgtatcggaacgcggcggcttccccgtagtccagaaaaagatgcgccagtggtgtctgcgcgtatctgcctacgcacaacgcctgctggacggacttgacaccatcgactggaccgaatctctgaaagagacgcagaaaaactggataggccgcagtgaaggtgccgaaatccaattcaaggtaaaggacagcgatttggaatttaccattttcaccacccgtgcagataccatgttcggagttaccttcatggtactggctcccgaaagcgaattggtggcccaagtaaccactctggaacagaaagccgatgtggacgcctacctggagcgtaccaagaaacgtaccgaacgcgaacgcatctccgaccgcagcgtcaccggcgtattttccggaagctatgccgtcaatccctttacgggcgaagcagtgcccatctggattagcgactacgtattagcaggatacggaacaggcgccatcatggccgtacctgcacacgacagccgcgactacgcttttgccaagcacttcaacctgcctatcgttccgctggtggaaggctgcgatgtaagcgaagaaagtttcgatgccaaagagggtatcgtatgcaactctccgaaagcaggtacagagccttattgcgacctcaacctgaacggactgactgttaaggaagccatcgccgccaccaagaaatatgtgaaagaacataatctgggacgcgtaaaagtaaacttccgcctgcgcgacgccatcttctcgcgccagcgctattggggcgaaccgttcccggtttactacaaggacggaatgccttacatgattgatgaaagctgcctgccgctggaacttcctgaagtggccaaattcctgcccaccgaaacgggcgaaccgccgttgggacatgcctctaaatgggcttgggacacggcaaacaaatgcgtggtcgataatgagaagattgacaatataaccgttttcccgctggaactgaacaccatgccgggatttgcaggttcgagcgcatactacctgcgctatatggacccgcgcaaccatacggcactcatcgacaagaaagtggatgaatactggcgcaacgtagacctctacgtaggcggtacggaacatgctaccggacacctgatctactcccgtttctggaacaaattcctgcacgacctcggcgtatccgccgtcgaagaaccgttccaaaaactggtgaaccagggtatgattcagggaagaagcaactttgtatatcgcatcaaggataccaatacattcgtatcgctgaacctgaaagaccagtacgacactaccccgctccacgtggatgtcaacatcgtgtccaacgacgttctcgacacggaagcgttcaaggcatggcgtcctgagtatgctaccgcagagtttatcctggaagacggcaaatacatctgcggctgggcggttgaaaaaatgagcaaatccatgttcaacgtggttaatcccgatatgattgtagagaaatacggtgcggatacgctgcgtatgtatgagatgttcctcggccctgtagaacagtccaagccctgggatacgaacggtatcgacggcgtacaccgcttcatcaggaagttctggtcgctgttctacgaccgtaccggcaactacctggtaactgatgaagctgccggcaaagaagagttgaaatccttgcacaagctcatcaaaaaagtgacgggagacattgaacaattctcttacaatacaagcatcagtgcctttatgatttgcgtaaacgagctgtccgcgctgaaatgcagcaagaaagagatattgaatcagcttaccgttacgttggctcctttcgctccgcacgtatgtgaggaattgtgggagacattaggtaacacaggttctgtatgcgacgcgcaatggcctgcatacaacgaagaatatctggtggaaaatacggtgaactacaccatttcgttcaacggaaaagcacgtttcaacatggaattccctgccgatacggcatcggatgtcattcaggaaacggtattggcagacgaacgttccatgaaatggacagacggaaagaccatcgtcaaagtaatcgtagtacccaagaagattgtaaacattgttatcaaataacaaatatgcaaatcacaaaaccaaccaaagcggaagtgatgagagagttgaaagactatgtcttcatcactttcggattaatttcttacgctatgggatgggctgcgttccttatcccctatcagattacgaccggcggtactacgggtatcggagccatcatctattatgccactggatttcctatccaatggtcgtatttcatcattaatgcagtcctgatgacgtttgccatcaagattttaggacctaaattcagtatcaagaccacatttgccatcttcggactgactttcttcctatggtttttccagttgctggtgaacggagcggacggagtgccgcctcagatactgggaccgggacaggatttcatggcttgcctcataggcgcagccatgtgcggtgcgggtctgggcgtagtgttcaactgcaacggaagtacgggcggtacggacattatcgcagccatcatccataaataccgcgacgttactttgggacgcatgattatggcttgcgacgttatcatcatcagttcctgctacttcatattcaacgattggcgacgggtgattttcggttttgtaacgctgttcgtcatcggcatcgtactggattatatcgtgaacggtgcgcgtcagtcggtacaattctttatcttttccaaagagtacgaaaagattgccgaccgcatcaccaaagagactcatcgcggtgtaaccgtactcgacggtataggctggtacagcaaacgcaacgtgaaagtattggttgtgttggcctacaaacgccagtctgtcgagatattccgtctggtcaaggacatcgacccgaatgctttcatctctcaaagctccgttatcggcgtgtatggagaaggattcgataaattgaaaggaaaatgaaaaagaaatttgtttttgcaaccaacaatgcccacaaactggaagaagtaaccgctattttaggagataaaatagagcttctcagcatgaaagacatccattgcagtgcggatattcccgaaacagcagatacgcttgaaggaaacgctttgctgaaggcaaggtatatctttgaaaattaccacctggattgttttgccgatgataccggtctggaagtggaagccctgaacggagctcccggagtgtattcggcacgctatgccggcgatgcacacaattcagaagccaatatgcagaagctgttgcaggatatggaaggaatggagaaccgaaaagcccgattccgtaccgttttcgcacttatcgtcaatggaaaggaacacttgttcgaaggcatcgtaaaaggcgaaataacgaagcacaggcacggtacttccggtttcggatatgacccggtctttattccggaaggatatacgcagacatatgccgaaatgggaagcgaattgaagaataaaatcagccaccgggcagtggcaacggataagctttgcaacttcctgtccaagtaatgaaagtggcaaaagtatgcggatgcttgtagatactaattgaaaagtgcgccaatattccagttgaaaattgcgccaccataggataagtataatgacctttgtataatccaaatgcaaaggtaaaatgaagactatggtagaaagacaatcaataatacacatgtatagggtatgcggttatagcaaacggcgtatctctcgtgaacttcatgtcagccgtcataccgttgacaatattctttcaga

SEQ ID NO: 4100 - DNA, 20023 bp, Unknown
  gut microbiota DNA sequence
tggactggcataaaaatccaaggtttttatgtaagtttgtacaactaaccaaagcttaacgatatgaagagacagattggagtgctaaccgcttcgttgctcatcctgtcgggttgcggcacaagccaaacggcatcgggcgatcccggtgcaatatttgcaggtgcagccatcggcggaaatgtcggcggtgccatcggcggtctgataggcgacaataatggcggctggcggggcggttaccggggttcggccatcggtacaattatcggaaccattgccggagcagccattggaaatgctgtgtctgcccccaaacaagaggcatacggttaccggatagaaagaacggagccctacaagccgcagcacgaaacgtatcccgctccaagcgtcttcgataacctaaggatacgcaacatccgtttcatagacgacagccgtgaccacgtaatcagttcgggtgagaaaagcaaagtaattttcgaaatcatgaacgaaggtgaacagactatatataatgtggtaccgatggttaccgaaaccacaggcatgaagcgcatctacatttcaccacctgtaatggtggagcaaatcgcccctcacaatggcgtgaaatacaccgccaccatcagcgcaggcgagcggataaagacgggaaatgtcaccatacgggtggctgtagccgacggaaacgggcaacaatacgactggcaggagttctcacttcccaccgagcgataaacaaattttcggagtctatacagactgaacacagagacgtagaaaatttaacagcatgaagaaaataatacagagcataccctgattctctgtatttggaaagcaaaagttgaatactttataaacaacagattatggccgacaactatctggaaaaccaatacgaacagtatcaggcgcgcaaagctgcctgggagagggaacgcaaatacggaaagaagaaaaagaaatcagcgtatccgcatcccttgccgcaacagaaggatgcggaagatgtcctgtccgttccggacgaggagaatgacaacattccctacattatcaatacggacaatgataatttgattgacgattaacccctctcgccatgttgcaccatttccatactcccgtagcagacataccattgccggaaagatttactttccctttttgctatacacctcatccgctctgcgtggcagcagcgaaagaggtgcaagcctatctcggtttgcaggaagcgtggaaagaagagttggctcagggcaagatgttcggtgttctggttgtaaggactcaagagggtgaaacaggatacctggcagcattctccggcatactggcgggcagtaatgtgcatccgtttttcgtaccgccggtctacgacctgttgcagccgcaagggttcttcaagatagaggaagaacagatttcgcaaatcaacacgcgcatcggactgttggaagaggacgaagaatacaaacgacaggtacaacaactggctgccctgcggcaaactgcccaagaaacgctggaagaagccaaacggcagatgaaacgcgccaaagagaaacgggaagagcgaagacgcgaagcggctttacccaacggtgctccaatgacgcctgaggaagagagcgccctgatacgcgaaagtcagttccaaaaagccgaatacaaacgcatggaacgtgcctggaaagagcggattgctcccttacagcaaacggtttccgattatgaggccggcatacaggcattgaaaagcgaacgtaagcaacgttctgccgccttgcagcaaaaactgttcgaacaattcaaaatgctgaattatcggggagaagtcaagacgctttgcgacatcttcgggcagaccgtacacaaaaccccgcctgcgggagccggtgagtgcgccgcacccaagctgttgcaacaagcctatctgcacgggtggaagcctgttgcaatggcagaattctggtggggagaatcccccaaaacggaaatacggcatcacggacattactatcccgcctgcaaaggcaagtgcgagcctatattgggacatatgctgcaaggtcttgaagtagacgagaacccgattctgaaagagttgcagtccggcaagaaaacattggacattatctacgaagacgaatggctggcggtggttaataaaccggcagggatgttgtccgtacccggcaaagaagatgtggtttccgtttacagcatgatgcgcgagcggtatcccgatgcggacggtccgttgattgtacaccgcctggatatggctacatcgggactgctggtggttgcaaaaaccaagcaggtccaccaaaacctgcaagcgcagtttaaaaaccgcagtgtaggcaaacgctatattgcgttgcttcaaggcagcgtttctcaagatgcgggaacggttgaactgccattatgcccgaacccgctcgaccgcccccggcaaatggtgcataccggatatggcaagcctgctgtaacagactttgaagtactggaacgcaaggacaaccgtacccgtatcgccttttatccccgcaccggacgcacccaccagcttcgggtgcatgccgcccacccgctcggactgcactgccccatcgtaggcgacgagctctatggacggaaagccgaacgcctgtatctgcacgccgaaatgctggagtttacacatccggtgaccggaaagagaataagcatcactcaaaaagcagacttctaacctatgaagtaaccgattataaccggcaaccgacgtttataccaacagtaatcactattaataaccccaaaacaagtatccgatgaaaatccttcgacccaccccgcaagattatgacgaactgctcaccgtatgggaagcctccgttcgtagtacccaccatttcctgacagaagagaacatacaattctacaagccattggtacgaaaccaatatttccaggccgtagagctttacatcatccgtaaccgggaaggaaaaatcgctgcctttatggggctgagcgacgaactcattgaaatgctctttgtacatcccgatgaacagggaaaaggatatggcaagcagttgatgcaatacgcactccacgaaaaacatatctataaggtggacgtcaatgagcaaaacgaaaaagctcaccggttctatctgcacatgggcttccaactcatcggaagagatgaaaccgacccttcggggaatccttttcccattttacacctgcaatggaagccgtagatgaacacgcattgcataaaacaaaaacagattgacttatgagaatacatcacatcgccatctggactttccgtctggaagaaatgaaaaaattctatatccgttacttcaaaggtacaagcaatgagaaatacgtcaaccctcaaaaagggtttgaatcctactttatccgcttcgactgcggagccgacctggagctgatgagccgtaccgatgtacagaatactcccatcggggaaaacaggctcggtttgacccacttcgcctttgcactcgacagcaaagaagaggttctcgaactgacggaaaagctgcgaagtgccggatataccatcagcggagaaccccgtacatcgggagacggatattttgaaagcgtagtgctcgaccccgacggcaaccgtgtggaatgcgtgttcaaagcaggctgaaaagtcattttacacagaatttaaatcaacgtctttcgtccggcattgcactaagtttcctatgtttgcaacataattcataagtagattttaaatttatcggaaaccatgaaaatcattgcattcctatttacggcatttatcagcctgcaaatgtccgggcaagagaaattccccgacggcacgcctattcccgactggttcagacagaacgaaatcgtaaacatcgacacactgggcaagaagtataccattaccgattacggtgtggcaaacgacagcacaatcctgcaaacggagaaaatacaggccgtcatcgaccgggcagccgagaatggcggcggcgttatcatcatccccaaaggaacattcctcagcggctccatcttcttcaagccgaaaacgcatctatacatggaagaaggtgcagtgctgaaaggaagtgacgacatcagcaacttcgccattgtcaacacccgcatagaaggacaaagcctgaaatacttcgccgcactggtaaatgccgacaaggttaacggatttaccatttccggcaaaggcacaatcaacggcaacgggcacaggtactggaaatctttctggctgcgccggcaggttatcccgaaatgtaccaatatggacgagttgcgcccccgcctggtttacatctccaacagtaacgatgtgcaaatctccggagtacgccttatgaactctccgttctggactacgcatatctaccgttgcaataacataaagctgctgaatctccatattttcgctcctgccgccccggtgaaagcaccgagcagcgatgcgatcgatattgacgtctgcagcaatgtactggtgaaaaactgctatatgtccgtcaacgacgatgccgtggcactgaaaggcggcaaaggcccgtgggcggataaggaccctaataacggcagcaacaccaacattatcatagaagactgcacgtacggcttctgccacagcggtctgacatgcggcagcgagtcgatacacaaccgcaacatcattctccgccgctgcaaaatcagcaatgccacgcgcctgttgtggctgaagatgcgtcccgatacgccgcaacactacgaatatatcctggtggaagacatcacaggcgatgccaagagcatgctgctcatcaaaccgtggacacagttcttcgacctcaaaggccgcaaggacatccccctctcacgtgccaacaacgtgacgctgcgcaatatcagcctgagctgcgacatattcttcaacgtcagaaagtccgaccaatacgaattgaaggatttcactttcgagaatttgaatatcaaggcaaagaatgcccaatgcgacaaagagattatctctaattttgagtggaaggacgttaaggtcaaccaataatgcaggtagcagacagcaaacgcatcacgagaaacgaataaacttcattatcgtataattcgggcacaaataacgcggactttcgtggatacaattaataacatccacgaaagcccgcgtcatttatttccggacaattattcaaaactacgcagcatgctgatttcttccgcccaaagcgtttcatccggagtttcgagtatcaccggcatatcgttaaaacgctcgtctttcataaaacgcttgaagaaatccaagccgataagccccttgccgatactgtcgtgacggtctacacggctacccaacgcttttttcgaatcgttcaagtgtatggcgcgcagaaaaccgaagccaacggtcttatcgaattcgtcgaaaaccttatcgtattcatttacgatatcataacccgccgtatacgtatggcacgtatcaaggcagacacctacgcgcgacttgtcttccacacggtcgatgatatgtttcagttgccaaaactcattgcctacattgctgccctgtcctgccgtattttcaatgaccgccgttacgccttgcgtcttgcctaaggtaatattaattgattcggcaaccctgtccaggcaagcctcaaccgaaatcttatttaaatggctgcccggatggaaattcagcagttccagccccagctcctcacaacgtcgcatctcatccagaaaagccgcacggctcttctccaacccttcttcttcgggatgtcccagatttatcagataactgtcgtgtggaagaatataacgtgcctccaaagcatatttcctgcaattctccttaaacaaggcaatactttcctgcgtcaggggcttcgccacccactgacgctgattcttggtaaacagggcaaaagcattcgctcctattccatgggcattgacgggagccagctccacaccgccgccggcagatacatgtgcacctataaatttcatatttcgattattattcgttagtttattgttctttcataaattcccattgagactttttcatatctacaaagccgtttgtcttaaaccggacaccttcattctccaacaatactctttgctccgtccaacccggcactaatctgccccggctgtttacaaccctatgacaaggcaaatgcaattcctccggtacgttgtgcatagcctgccccaccatacgcgagcactgagacctgcctaccaaactggcaatctgcccgtaggttacaacgcatccttcaggaatagcggcaacaacactgtaaacatcttgcagaaaagtagtccgattcataagataaagtctttctttgcggcaaagatagcgtaaacagagagtataaaaaatacacagccttgttttttataccaagcgacagcaatgagatgcctacccgacagccgggcatctcacgtctgattacaggaaagtacttgccccaagcgtattgtaagcgtaagtgatattctgctggcggagaacttcaccgttcggagtaaacaatatctgatattttatctgcacgttcagcctgcccacctgtatggctacaataggttgccatttgggaaattgtacccaaacaacattctgtaccaccccgtccgaaaactgactggctgcaaaagcgttgaatacagcggcaggcacctcatccagagtttcccagtccgtttgcttcattacccactctgcatccgtattgaaccagaccttggtatcaaatccgttcatcataaaatccgcaacgtaatactcctcgtcctgcgaccaggctatccctttggcggaaggatacattttcgtcagggcagtttgcacattatcaggagcatagcctgcaaaaagtggcaaaaatgtccaaagcgtcaaaaaaaagaacaaagacttcattttatccataaccattaatctattccatgttggaaatcaacaatatttcctggtgttttgtttggttctatacccataaggattatctttgccatacaaacccgttcaaacagcaatgaaatgataagtatacagcctgtgctccataataagaaacaatacctcgacctgctgcttttggccgatgaacaagaaaccatgatagaccgttatctggaacgcggtgaaatgttcgtgttgtccgaggacggcagtatcagagcatcctgtgtcgtcacccgcgaagcagaagatgtttttgagataaagaacattgccgtttatccgcaattccaacgtcggggatacgggaagaaactgatacagtatcttttcgggcattatgcaggcagatgccggacaatgctcgtaggaaccggagacagcccattggcgattcctttttacgagaactgcggatttacctattcccaccgcatcccggacttctttacggataactacgaccatcccatttatgaagcgggcaaacaactgaaagatatggtttacctgaaacacaatatggatgaataagacctgccaatcacacattgcccaagaacaacgcaccgtagaacagatgatccgcctctattgccgcaggaaagaaggcaacaaggaactctgcccgcaatgtctcgaattgctggagtacgcacgaacgcgcctgtcgcgctgcccgttcggagagaataaaacaacttgcagactatgccccgtacattgctacaagccggagatgaagaagcggatgcaggaagtcatgcgatatgccggaccgcgcatgctgctctatcatccggccgcagcgtgcaggcatttatggaaagagcgtatatatcaatatttcaccagacgtttcggagtcccgtgccaggaacagcataagcagtaaacctcttccaggtcatacccttctaaagaagctgccggatctttcggtacgacctcgcctttgtccgacacatatacgggcaaacgctctccctgcccgttcaagacataaaatgcccccaccttgcattgggggcacaccattttgcgcataatcagttgaaataatataaaaatacagcaataccttcaagcgctttcttcttctcgccctgaatctcaatggcaaactttatttccgcctttgccacaccgcgcaggtttgccaacgaatgcagagaagccaccagacggatgctctgtccggaaagtacagcctgaccgaacttcatcttatccattccgtagttaatcatcatcttcaggttatttacctcgataatctgattccacagatgaggcaacatggagagggtgagataaccgtgtgcaatggtactcttaaaaggactttcggtcttggcgcgttctgtgtcaatgtgaatccactgatggtccagcgttgcgtcggcaaagagattgatgcgttcctgcgtaagttccacatactccgaaacaccgatttgctgacctaccagcttttcaaaatcctcgtacgaattgataataactttttccatatattttttgttttgttgggtaaatgcgttgtaaacggtaacaaagataccgcttatctccgaataaattacaagcgaatcattaaaaagccatatttttccggttgttgttacggtaattactctcattattacccgtatcattcttcaaaatagcatgcaaattcacgctctcttatcaataactggcatcacggtttcacaggccaagacaaagataagttcaacaaaatcattattgtaccgcttttaataaaacatccgctccctatttctttccatttctgcgaattatatctatttttgtatgcgcatataatataaacaaccctaaacatccatgtatggacgctgaaaaggattacaacctgctgtcagaaataatgcacaacgccaatataggctggtggaaagccgatatacaagatgccgattatatatactacggtcccatcgccagcctgttaggattggaagaaggcggttgtatcagttttgaaaatttcaacaagcgcatactgagagaggaacagccgcatactaccgtccgttccttcgacaacatacaacagacgaatgaaaccgtctatctgcttgataccgtcaaaggaccgacatgggtccgcagcaaaatctgtatgcaaaaaaccgatgaaaacggaaagaccaagatttacggcatagccgaaatacaggacggtccttatatgtcgtccgccacacagatgttgcgacaacgcgaacaactcttgcacaacatctataagcatcttccggtaggcattgaagtctacaatacagacggagtattgacagacctcaacgataaggaattggaagtgtttcatctgcaacaaaaagaagacttgctgggtatcaatatatttgataaccctatcttcccgaaagagatgaaagagaaactgaaaaaatatgaagacgccgatttcacattccgctacgacttctcgaaagtaggttcttactacaatccgcaaaccaggaccggtacaatagacctcgtaactaaagtaaccacgctgtacgacgagaaccacacccccgccaactacctgttgattaatgccgataagaccgaaaccaccgtagcctacaacaagatacaggaattcgaaagtttcttcgaactgataggtaactatgccaaagtaggatacgcacactacgacttactcacccggcaaggagatgcccaacacagctggtacatcaatatcggcgaacaagaaggaactcctctgtcccgaatcatcggagtgtacagacatatccatcccgaagaccggcgcgccatgctcggtttcctgaacaatgcagcaaaaggtatggaagacaagttcaataaagaagtacgtgttctcagagaagacggcagctacacttggacacatgtcaacctgatagtgaaaacctacgctcccgaacggaacagtatcgaactaatctgtatcaactacgacattacccggctcaaagccacggaagccatgctgacagatgccaaagaaaaagccgaagagtcagaccgcctgaaatcggcctttcttgccaacatgagtcacgaaatacgtacaccgctgaatgctattatcggcttttccagcctcctgccccatatagaagatgctgaggaacgcaaccattacatctccctgataaaccacaacaacgaattgctgctgaacatcatcaacgatgtactggatttatcgaagatagaagccggacacatagagttggccccggtctggtgcaacctctccgacctgatagatgaaagttgcaccgaatgccagcccaacgtacctgaaggcgtaacgctcaagaaacgctacccggcaactcccaacctgataaagcaagatccgatgcgcatcaagcaggttttgagcaacctcatatcgaacgcactgaaaaataccgtacagggctatgtcgaaatttcgtacgagatgacaccttccgaaacaagaataagcgtttccgacacagggcgcggaatccctgaggaaaagctcggcataatatttgaacggttcgaaaaagctgatactttcattcagggagccggattgggcttgcctatctgcaggtctatcatggaacatatgaacggaacaatcgaagtaacctccaccgtaaataaaggtagcacgttcacagtagtgtttccttgccaagtacggccaatggaataaagaatagaaaatatgattatacagaaagaatttacccttaccccccatcgacgcgggttccatctgattacggaagaaatagtacgtaacttaccacagttgcctccgaccggactattgcacttgtttatcaaacacacaagtgccgcactaaccatcaacgagaacgccgatccggatgtacagacagatatggaagctatcttcaacaaccttgtcaaggagcgtgagccttactacgaacatacctgcgagggtgacgacgatatgccggcgcatgccaaatctaccattgtaggagcagaactgaccatccccatcaccaatggacggatgaatatgggcatctggcagggtatttatctttgtgaattccgcaaccgtggcggaggaagaaaaatcgtagcaaccattatcggataatctcttcccatgaaaaaagctatcatcataggagccacctcaggcatcggacaggaagtagccggaatactcgtgcaacaaggctggcgcataggcattgccggcagacgcgaagaagtcctgcgaagcatgcagcaagccaatccccaacagatagagatacagcatcttgatgtgacaaaggaaaatgccgtattacaccttacagaactgatagaccgattaggcggcatggatttatttttcctcagctccggcgtaggttatcagaacaggaacctggaacctgaaatagaactgaataccgcacgtaccaatgtcgaaggctttatccgaatggtaaccgcagctttcgattatttcaaaaagacaaaaaaaggacatatcgctgtaatcagttccatagcaggtaccaagggattgggagtcgcacccgcctactccgccaccaaacggtttcagaatacatacatcgatgctttggcacaactcgcacggatgcagcatcttaacatccgcttcaccgacatccgtccggggttcgtagcaacggatttactgcgaaacggcaagtatccgatgctgatgcatgccgataaagtggcggaatatatcgtccgggcgttgaaacacaaaaaacgagtgacagtaattgacggacgctatcgtctattggtattcttctggcgaatgattccacgttggctgtgggaacggttgccgataaagaattgatttcgtatcttcacgcccaaaaagcaaaaacaaccaagatgaaaagaaagtccggatatatgatactcacagtcactgccgccttgtgcataggcacttcactgccttttctccttggcagcagtgtactgaatcctgaaagacagtcggttaaatcggaaataccttactgcgtcacctctcctaccgtacccgccaagattgcctttgccgggcaggaagtagacttgttacgctacgaccaccgcgagcgcatggaccgtgaactgatgtcgtttacttatatgcattctaccacaatgctcaccataaagcgtgccaaccgttattttcctattatagaacctatactaaaggcaaatggcataccggatgatttcaaataccttgccgttatagaaagcgcacttaacccacttgccaaatcgcccgccggcgctgccggaatgtggcagttcatgcccggtacagggcgcgagttcggtctggaagtaaacgacaacatcgatgaacgctatcatgtggaaaaagagacgaaagccgcttgtaaatatctgaaagaagcctatgccaaatacaataactggctttgcgtggctgctgcctacaatgccggtcagggacgtatctccacacagttacaaaagcaaatggtgagtcaggcagcagacctttggttggtagaagaaacctcacgttatatgttccgcttgctggcagcaaaagctgttatcagcaacccgcaacaatacggttttttgatgaaacgtgaacacctatatccggctatcccttacaccgaagtgaaagtcaccacgggaatagccaatctggcacaattcgccaaagataaaggaatcacttatgcccagctgaaagatgccaatccctggctgcgcgacacttcactaatgaacaaaagcagacgtacatacattctgaagataccgacacaagccggaatgcactataacccgcataaaactgttccgcacaacaagaactgggtaataaactaaatactaagtctgcttctcggtcaaatacttccaatatcgcacaggcatgtcttgcctgtgcttgcggggattcagcctttccttgatacagattgccttgaaataagttttccaaagttgctgaaagagcttttcatccttatccataaggctctcatccagtattcctgtcacaagatgtccttcccggctatcttcctcaaaaacaacgttccgcacctcttttaaatcgtaataataaccataagcacgcttgatgtcgtatatcaaccaacattggtcggcaaaacggtctttaaaatgcccggttatcaagggaagtacattcttctccggttctaccgccgcaaaataagtgccatctgctgctttctgaaaacggacaaactgcaacatccgtatccgttcccaatccacccgcttccacatacgcgaaaattccaaaatatcagggtctgcaaagttcgtttcaatggaacgggaagcatctattgccttgcggatataacggaacaaaagcgatgcagtttccggctcttccgccaaccagcactgcgtaagacaagacaaggcagatgcagaaagttttttctgcaagccacgccaaaccctccccgctttctcttcatccgatactacagtaaaagcctcgtcatagaacagaggaagcggctccccttccgccagcaaagcatccggaaaagtacgacgggaataggcttcaaaaacagaagtcagcaatccctcaaatgtattatcgaatataaacagagtcattttcttcgtctccaaaatcaagaatcagctgcctgtcgtcatatttctttctgggtttctgcaccagcaagttacgtactctctgcggagtcatttcattgaccgtgcgtactggcagttcgctgcacgtaataaagtactgcgccttcttcatcaccacaccgatcttcttcagttgataaaatcccaatttggagaaacggcgggaagcgactatcagacgagccgatttcacaccgatacccggtacacggagtatcatctcataatccgccttattgacgtcaacgggaaactgttcgggatgccgcaacgcccacgatagcttcgggtctatctccagatccaaatccggaaaggtgtcatccacaatctcatctactttgaactgatagaaacgtagcagccagtctgcctgatagagccggttctcacgtaccaaaggcggctgtttcaaagccggcagacgcttgtcgtacgtgttcaccgagatatatccggaataatagacgcgccgcatcgtaggacgctgataaagagccgatgaaagaaaaagaatatccttgtccgtctcggcagtagcacctacaatcatctgcgtgctctgtcctgccggggcaaaacggggtgcatagcggtatttcctgcgctcttccgcactctccaaaacaccttgctgaatataacgcatcggagcaaatacgctttcatggtctttttccggagcaagcagcctgaggttttcttctttgggaatttccacattgacactcagacggtcggcatacagccccgcctcattcaccaactcacgactggctccgggaatgctcttcaaatggatataaccgttgaaacgatggatagtacgaaggtctttggctacacgcaccagccgttccatcgtataatcgggattgcgcaccactccgctactcagaaaaaggccttcaatataattgcggcggtagaactccattgtcaggtccacaagttcgctgacggaaagagtggcacgaggcaaatcattactgcgacggttaatgcaataagcgcaatcgtatatgcaatagtttgtcagcatcaccttcagcaacgaaatgcaccgcccgtcttctgcaaagctgtggcagatgccccatccgcccacggtattgcccagcatgcctgccttgttggaacgtacagtgccactggacgagcaagagacatcgtactttgccgactctgccaatatcttcaacttatttagtacattttcgttcataccctgtgccaaaagtaataataaaacttctatttaaaagcaaaaggccaagcaattaatatattaaaatcgttgaggaatatcataaaaatacgacttatttatacaaaacagccattatgcataaaataaaaaagaccgccgaacggcagtctttcacagcattaaatctgcgttttctcttactttttagaatcttccaaagatgctttgcggaattctttcattgtcttttcgatttccaaagaagccttacgtgcacgagtaccggctgccttgttaccgttttccaactgagcttttgcatctttttcgaatgctgcatacaattctgcaactttttcaactaattctttcataatccttttttaattacttcgttaataatgtccgacaaaaatacattctttcttgaaataaatgcagaaaaacgatattttttttgaaataatacgcaaaatcggcatttaaaaaggcttatacgtgttttttatctatttttgcagacatgaaaacgcttactgatacccaatatatacatgctctcatagccgaaggagagcaccaacaacaagattttaagttcgaaatatctgatgcgcgaaaaattgccaagacgctttctgccttttcaaatacggacggcggacggcttctcatcggcgtaaaggataatggtaagattgccggagtgcgttccgatgaagaacaatatatgatagaggcagcagcccggttatactgccgaccggaagtgagttacagcacacagacctatcaggtagaaggccgcagcgtattgctggtgcaaatcgatgaaagcgaccgcaaaccggtatatgccaaggacgaagccggcaaatatcttgcctatctgcgcatcaaggacgagaacatacttgccaccccggtacatctgcgtatctggcaacaaagcgaaagtcctcaaggagaattgatggaatataccgaacgggagcagctactgcttgatttactggaacaaaacgaccggttgtcactgaaccgttattgccgtctggcacgtctgtcacgccgtgctgcagagcatctgcttgccaaactcatccgttatgacattgtggaacccgtattcgaagggcataagtttcacttcaagctgaaataaagagttggagtgctggtaaaaagcaagttatttactacctttgcgcccataaatcagaaaaattatcatcatgggtatatttgccaaactattcaacaagaattcggaagaggtttcttccagaaatgtggaggacttcgtttcattgacacgcgtctatttccagtccgtgatagccgccaatctgggcatcaccaacatccgttttgtaccggatgtagccaacttcaaacgtttattcaaaatccccacacaaggcggacgtctgggacaagcggaaaaagcggcttcccgcaagatgctgatgcaggattacggcatcagcgagagcttctttaaagagattgacgcatccgtaaaaaagcactgccgtacacagaacgatgtacaagcctatcttttcatgtatcagggattctccaacgacctgatgatgttaatgggcaacttgatgcaatggaaattccgtatgccttccatcttcaaaggcgcattacgcagcatgaccgaaaaaacagtacatgaggtttgcaccaagaccgtgtggaaaaaggacgatgtgcacaagaccgctatgacagtccgccaatacaaagagcggttaggatactcggaacaatggatgacagagtatgtatacaacatagtcatgctggcaaagaaagaaccgaaaaagaaaggtgacgaacaagaaaaagcataagctaaagttttgacaaataggcagaaaagcgtttgttagcaaaacaaaaagaaatctaaaatatttcataagacaaaaggcgaggtttttataccccgcctttttttgttatatttatcagaccgtttttcccctcacggaatattgaaagcgcatcctgcgccaatcaccgattattaatctctaaaaaagaattgcgtatgaaacaaaagaaaatgcttgcactcactccctcacaactgaaacaactttaccggcacgaactccccgaactgaccggcatcgccgcccgaagcggagatgcacagactttcaaaacatatctgtcggagtatatggcgggacatccccaagcggaaagtgaggccggcaagctgattcgacttctgattgattatgacggacaaaaagtacatgaactctcaacggacaagcaactgcctgtttcaaccctctccttactctatgatttcctcaccggcaaactggaagaatacctcgaaactgaccttttcattgatttattccgacaattcaaacgtctgcaacaccccgaacatcccctacccggcttccaacgagtaaaagcctggagcgaacggtggctttccggactggatgaggatgtgcaacaactccgggcatacaacaaagaacgtatcctgcatgcccttatacagaaaatagaaaaccgcaagaattctgcttcacgctttcattttgcagaaggcatcagctatgaagaaaaattccggctcgtcagcgaatggtggaacgatttccgcttccaccttgcaatggcagtgaaaagccctacggaactgaaccgtttcctgggcaattcactttccgtggaaaccatgtatttattgtcgcgtgcacgtaaaaaaggcatgccgttcttcgccaccccctactacctttccttattgaactgtaccggaagcggctataacgacgactctttacgcagctatatcctctactcgccccaattggtggagacctacgggcaaatccgcgcctgggaacgcgaagacattgtagaagccggcaagccgaacgctgcaggctggttattgcccgacggtcacaatatccacagacgctatcctgaggtagccattcttatccccgataccatggggagagcctgcggcggactttgcgcttcctgccagcgtatgtacgatttccaaagcaaacgcctcaactttgaatttgaagaactgcatcccaaagaaagctgggacaaaaaattgcgccgcctcatgacctatttcgaagaagacacgcaattgcgtgacatcctcattaccggcggcgatgcccttatgagccagaacaaaaccttgcgcaacatattggacgccgtttaccgtatggcggtgcgcaagcgaaaagccaaccaggaacgcccggaaggtgaaaaatacgccgaattgcaacgcatccgcctcggttcgcgcctgcccgcctatctaccgatgcgcatcaatgacgaattagtggacatattgcgtgaattcaaggaaaaggcatccacggtcggcatacgtcagtttatcatccagacacatttccaaaccccgctggaagttactcccgaagcagaggaaggtattcgcaaactgctctcggcaggatggctcatcaccaaccagctggtgtataatgtagccgcatcccgccgggggcacactgcacgcctgcgacaggtattaaataaactgggcataatctgttactacacattctcggtgaaaggatttgaagaaaataatgccgttttcactccaaacagccgctccatacaagaagaacaggaagaaaaagcattcggaaaacttaccaaagaagatgcccataacctctccgtactgttggaacggacacacgaccctgccgcctgtatccgccgttttacgaaagcacatcgcctgccgttcctcgccacagaccggaatgtgctgaacctgcctgccatcggaaaaagcatgactttcaaaatggtaggaatcactccggaaggaaagcgtatccttcgtttcgaacacgacggtacacgtcgccatagtcctatcatagacagcatcggagcggtatacattgtcgaaagcaaatccatagccgcctatctgcgacaactgcaagccatgggagaagacacggaagactatgcttccatctggaactatacggaaggaaaaaccgaaccccggttcagcttatacgaatatccggatttccctttccggattacggaaaaaatgagtaatctgggacttgaaagctgctgaaaaactatttttgattaactttgccttatcatccgctaatgtataagcaaaatcaatcttatggaaatagaacagcatcctttagaacctttccttcccggcaatgcacgtttgctgatgctggggagtttcccgccgcaaagaaaacgctggtccatggagttttactacccgaactggaataatgacatgtggcgtattgcaggtcttttattcttcaatgacaaagaccattttgccgataaatcccaaaaagctttccgcaaggagcgtatcatcgatttcctgaacgaaaaagggatagccctgttcgatacggccactgccgtaaggcggttgcaagacaatgcatccgataagtacctcgaagtggtccggcctaccgacatatccgcattattgcaccaactgccacagtgcaaagcgattgtcactacgggacaaaaagccaccgacacgctctgtgcgctgttctcattgcaagaacctaaagtcggcgattttacagaattcattttcgcagaccgccctatgcggctctaccgcatgccctcttcatcaagagcttatccgctggctctagaaaaaaaagcggcagcctatcgcattatgtatcaggacctacaaatgttataagccatttttttaagaaaataaagcaacaaagaacttgcagatttgaaagtttccattacctttgcagccgcaaacacgggagtagctcagttggtagagcaccggtctccaaaaccgggtgtcgggagttcgagcctctcctcccgtgcaacgataaaaagctgtaagttaatcacttgcggctttttacagtttataggtcggacaaaagccggacaaa

SEQ ID NO: 4101 - DNA, 26857 bp, Unknown
  gut microbiota DNA sequence
ttctttgttttgcttgctttcttggggtcagcagatttttagtggggattattcttatacttgtgaagtgtttttctttctttgcttttagggtattatatcgtatcatacccatatcacatcatatatctggcaagcatttcctcttatatttttctgttcttattctctgaaaaaatgctctgtctcttatgtgaggagaagttttatttatatctctttaaacaggttttgaaatttccctttcctttcccgtaccgaatgggtatcccatagggatgccggaacttatatcttatcatatccgtatcacagcgtatttcgggcactgagctaaccctttacttcactctatccctttaataaagaagatttgctatacaggcgtaagagcaggctaagctgtgtccctgcttttaggggatttatgctcttttgcctgaaattaccggtttcgcattatattccaactgtatcctatcgcctttttgataagcatgttttcatgtctttccgtttttatgcctgaaagaatcctttgtattctctgttgtgaaaagtaatatttcactctctgtgtactgttacgcttccttttataccatataaatcagtcttatcggtgaccgaaacagggtgaaatgaatataaaaagtgaatattttgttctaattactacataatgaggataattatttgtatctttgtcgcccgaataaataaaagaagctttgggaaagtttgataaatacaaaatcgatttgaaaggtatgcaggcagattcatgcaaatatgaatttgtattggataaccttttcttcgctaatattgacggtccggaagtgcagaagggcaaagtcaatgttgttttggttgtaaagaaaacatctcgtgctttcgaattgaattttcagacagacggaatggtgtgggttccatgcgatcgctgtttggatgacttggaacagccggtaagttctacagataggttgctggtgaagttcggacatgaatatgccgaagagggtgataatctgattgtcattcctgaagaagaaggagaaatcaatgtggcgtggttcatgtatgagtttatagccttggcaatcccgatgaagcatgtacacgctccgggcaaatgcaacaaggcaatgagtagtaaattgagcaagcatttgcgtactaccccggatgatgagatggatgaagattcttttgtttcggaggacagcgatgaacttgcaaatgatgatacggaaacagcggtagacccgcgttgggacgaattaaaaaaaatattagataacaattaaagattaaagaaaatggcacatcctaagagaagacagtcaaaaacaagaactgcaaagagaagaactcatgataaagcagtagctcctacactggctatttgtccgaattgcggtgaatggcatgtatatcacactgtatgtggtgcatgtggctactatcgtggtaagctggcagtagagaaagaagctgctgtttaattgggcagtttgactaaacttatacttgaatatcgggcgtctgaaaagatttgtagcattcaatgaacaaacctttttagactgccgttgtttaagtatctttataagtaaacaagattaatggaaaaaataaatgcagtaattacaggagtcggcggttatgtgcctgattatatcttgacaaatgacgagatatccaaaatggtagataccaatgatgaatggattatgacccgtatcggagttaaggaaagacacatcctgaatgaagagggtttgggcacatcatacatggcacgcaaggctgcaaagcaattaatgcagcgtaccggttccaatccggatgacatcgacctggtgattgtcgctacttccactccggactatcaattcccctctattgcatctatcttgtgcgacaagcttggattgaaaaatgcctttgcatttgatatgtctgccgcttgttgcggtttcctttatatgatggagacggctgcgaactttattcgttcgggtagatacaagaaagttattattgtaggtgcagacaagatgtcgtcaatcgtgaactatacagaccgtgctacctgtccgattttcggtgacggtgcggctgcctttatgatggaaccaacaacagaagaattgggcgttatggatgctatgcttagaacagacggaaagggattgcctttcctgcatctgaaagctggcggttctgtttgtcctccttcttatttcacgatagacaatcacatgcattacctttatcaggagggtcgcacggtatttaaatatgcagtatccaacatgtcggatataagcgctgcgattgcagaaaaaaataatctgacaaaagatacgattgactgggtggttccccatcaggctaatctgcgcattatcgatgctgtggcgcaccgcttggaagttcctcatgagaaagtgctgataaatatcgaccgctacggtaatacgagcgcaggtacgcttccgctttgtatctgggactttgaagagaagctgaagaaaggagataaccttatctttacggcattcggagcaggatttacctggggagctgtttacgtgaaatggggttatgacggtaagaaacagtaatgtaaccgttacaaacaaaatatgataaaaagacgcatcctatttcgattcgatgcgtttttttgtctcaattcaaatacgtgaggattatgcataaagcaggttttgtcaatattgtgggaaatcccaatgtaggtaagtctacattgatgaatgcactggtaggtgagcgtatttcaatcgccactttcaaagcgcagaccacccgtcatcggattatgggtatatataatacggatgatatgcagattgtattttcggatacgccgggcgtactgaaacctacttataaattgcaagagtctatgctgaacttctccacttcggcattgacagatgcagatgtgttgctgtatgtgacggatgtggtcgagacacctgacaagcataatgattttgtggagaaagtaagccgcatggaagtacctgtattgttgctcgtcaataaaattgatttgagcaatcaggaaaagctggtggaactggtggaggcatggaaagaattgttgccgaacgcagaaattattcctatttcggctgccaccaagtttaatgtggattacgtgatgaagcggataaaggaactcttgccggattctcccccttatttcgataaggatcagtggacggacaaaccggcccgtttttttgtaaacgagattatccgcgaaaagatactgttatattatgacaaggagataccttattcggtagaggttgttgtagagcaattcaaggaagaagaaaagaagatacatatcaatgctgtgatatacgttgaacgtgattcgcagaaaggtattatcatcggtaagcaggggaaggccctgaaaaaagtggccaccgaggctcgccgtgatttggagagattcttcgggaaaacaatattcctggagacatttgtgaaggttgacaaggattggcgcagttcggacaaggaactgcgtaacttcggttatcagctggactaatattcatacgactgtgacagtcgcaaaaaacaaagagtgtaacctatgggaaatttagttgcaatcgtaggacgtcccaatgtgggaaagtctacattatttaatcgcctgaccaaaacaagacaggctattgttaacgaagaggcaggaacaacacgtgaccgccaatatggaaagtccgaatggctggggcgcgaattttcggttgtagataccggtggctgggttgtgaactcagatgatatttttgaagaggaaatacgcaagcaggtgttaatggctgtggacgaagcggatgttattctgttcgtagtggatgtgatgaacggagtgacggatttggatttgcaggtagcttccattttgcgccgtaccaaaaagccggttttattggttgcgaacaagaccgataataatgagttgcaatataatgctcccgaattttatagtctgggtttgggtgatccatactgtatttcggcagtgaccggtagcggtacgggcgatttgatggaccttatcgttgagaatttcaagaaagagtctgatgaaattctggatgaggatattccccgttttgcggtagtgggacgtccgaatgccggaaagtcatccattgttaatgctttcatcggtgaggaccgcaatatcgtgacggaaatagcgggaacgacccgtgactcaatctatacccgttacaataagtttggctttgatttctatttggtagatacggcaggtattcgcaagaagaacaaggtgaacgaagatttggaatattattcggttatccgctctatccgttctatcgaaaattcggatgtctgcattttgatgctggatgctacacgcggtatcgagagtcaggatttgaatatcttctcacttatccagaaaaactccaaagggctggtggtagttgtgaacaagtgggatttggtggaagataaaacggtgaaagtaatgaagacttttgagaatgcaatccgcaaccgttttgctccttttgtcgattttccgataatttttgcttcggcattgactaaacagcgtatcctgaaagtattggaagaagcccgtactgtatatgagaaccgtatgatacgcataccgactgcccgcttgaatgaagagatgttgccgcttatcgaggcttatccgccccctgccatcaaaggtaagtatatcaaaataaaatacattacgcagttgccgaatacgcaaattccttctttcgtttattttgccaatttgccgcaatatgtaaaggaaccatatagacgtttccttgaaaataaaatgcgtgagaaatggaatttgacggggacaccgataaatatatatatacggcagaagtaaaaacaagcctgtatatattggataaaaaagttaaaagactggttcatattgactcagtcttttttttgctttttttattagattgttttacctaattttgtagctgtaattgagattgctgctacctttggttgctgcaataaaaatatatcgtgatgatatacatcaattctattaactggttttatgaggataggtgtccggggcggtggtcccggacactttttttaggaatacagttgttcttacagccttagccttctatgttttgtatttcaacctctttcactttacggaagagatcggaagcaaaaataaaattattcaaacgctcattggtagatgtaaaaatatcgtttttgctgccttcccattctttgtgcccttcataaatgtagataattttttctccgatacccattacagagttcatgtcatgggtattgataagggtggtcatattgtactcacgggtaatgtcctgtatcagttcatcaatgacgagcgacgtcttggggtccaagccggaattgggttcatcgcagaacagatattgagggttcaaggcaatggcgcgtgcgatggcaactcgtttttgcataccgccactgatttcaccggggaatttatctttcgcttcaataaggtttacgcgctccaggcaaaacatggcacggcgcgtgcggtcgcgcaaggtatccgagctgaacatgttgagggggaacataacgttgtccagcaccgtcatcgagtcgaacagggcggcgctttggaatatcattcccatttcgcggcgcagggctttcttctctttctttcccatggtaaggaaattgcggtggtcgtataataattcacctttttcgggtgtcagcaggcctacgatacatttcatcagtacggtttttccagaaccgctctggccaataataagattggtctttccgttttcgaatgtggcattgatatccgtcagtacctctttctcttcaaatgacttgcaaagtcctttcagttcaatcattcctacttagttttgaatttagaatcaacttgtcagcccattagcaactgggtcagtatgagatcggcaaacagaatcagtacactgctgcataccactgaatccgtagatgctttacctacttcgatagaccctccttcgaccgaataaccgaagaatgccgatacgctggcaatgataaaggcaaaaaacagagacttgatgatgccgcaccagataaaccattctacaaacatgtattgcagaccgtattccaaatctacggccgacatgataccgccgaaccagcatgtacaaaaagcaccgatgatgccggcgaatatactgaacgttaccataagaggaatggttgacaccattgccgctatcttaggtaatatcaggtaattggcagagttgacacccataatctcaagagcgtctatttgctgggtaacccgcatcgttccaagttcggaagcgatgttcgagcctactttgcctgccaatatcagacacatgatggaggatgagaattccagcaacataatttcgcgggtgacataccccaccgtccagcgtggcatgaaagggctttctatgttcagcttgatttgtatggtaataacggctccgataaaaaatgatattagcaatacgatgccgatggagtttacgcccagttgttctatctcattgatgtattggcggaagaacatacgcatgcgctccggacgggcaaaaacacggcccattaatatgatgtatcttcctactgttctaagtgctttaatcatgactcgtaagtatttgtctgcaaatgtacactatttcagcttatttttgctacatttgcgccagtttcaccacagattacgccgaatggcacagtatttttgctgaaaccaggatgaagacgattgtaatctgggggagaaacggcagtattgaggactgatagtaatctgtatatataattgtggtgacatagcgttatggaagaagaaagcaaaatggtgctccggacagaggatttggtgaagaagtacggaaagcgtacagtagtcagccatgtctctatcaacgtaaagcagggagaaattgtgggattgctggggccgaacggtgccggtaagactacttcgttctatatgaccgtaggattgataactcccaatgaaggacgcatctttttggatgatttggatataacaaaataccctgtatacaaacgggcgcagactggtatcggttatttggcgcaggaagcatcggtgtttcgccagatgagtgtggaagataatattgcggctgtgttggaaatgacagacaagcctttggactatcagaaagataagctggaaagtctgattgcagagttccgtttgcaaaaggtccgtaagaataaaggcaaccagttgtccggtggcgagcgccgtcgtacggagattgcccgttgcttggccatcgacccgaagttcattatgctggacgagccgtttgccggagtagaccctattgcggtggaagatattcagcagattgtctggaagttgaaagaccggaatatcggtattctgataaccgaccacaatgtgcaggaaaccttgagcatcaccgaccgtgcttatctgctgtttgaaggaaaaatcctgtttcaaggtacgcccgaagaacttgccgagaataagattgtacgcgaaaagtatttgagtaacagttttgtgcttcgccgcaaggactttatggggtagagccggtttttgcagcagcatataacaataagcctataacaataaaaaaagaccgtccaagacggtctttcttattttctcctttaatctatatgattagtatttcggaggtcttgcttcttttaccaccatctggcgaccgaagaattcggcgccgtccagttcggagatagctttggcggcagctgcgctgtcttccatttctacgaatgcaatgcctctgaaacgtccggttgcgcggtccatgataaatttaacagaagatactgtgccgtagtcctccataaccttttgcaggtcatcttccttaactcggtagttaaggtttccaacataaatgttcataacgaaaaatgtaaataatataaaaatgaataaaactctcttagaaagacagccgaataataaaaggattgcaacgacagagagtttacaaaaacgttttttcaacggaagtaaaaaccatgtaatggaaatcgagaaactaatatgccatcattctgcgacaaaggaacacattaatttcggatatacaatactttttctcaattatttttatttctcttgtcataaggcggaaagaatgccccgctcatctatatatttctttgattttaatggatttgttgtatttgcctgccggcaatatgttttcctgatacgggcttattcccttgttcaggggtgttcgctgatttatgacatgtgtaccaaataatttcttcctttggtacacgttgtaccttactaaggtacggcggctaccactctttggtacgacggctaccaccctttggtacgacagctaccacagtgtggtattcctgctatcaagcggtggtattgggaagattgcctggaggtactgcattaaagaaacgggatggaaaagttttggcggtaggggaggcaaaggaaataattgcttgtgttttttgataattaaaagattaacgttaattttgcacgctcaaattggagaatgaaataaagtataaatcaaataaataattgtcagaatgaacgtttcattgcaaaacattgacaaagtaagcgcactgcttactgtaaagcttgagaaagcagactatcaggaaaaggtagacaaatcattgaagaacttccgtcagaaagctcaaatccccggtttccgtaaaggcatggttccgatgagcctggtgaagaaaatgtatggtaagtcggtattggctgaagaggttaataagctcctttctgattctgtatataagtatatccaagataataaggtgaatattttgggcgagcctctgcctaatgaagacaagcagaaagctatcgacttcgatacaatggaagaatttgaattcctgttcgacattgctttggctccggaattcaaagctgaggttgctgcagacgataaagtagattactatacgatcgatgtaaccgaagaaatggttgacaaccaggtgaaggcttatacgcagcgtaacggtaagtacgaaaaggtagacgcctatgccgacaacgatatgttgaagggtctgctcgccgaactggatgcagaaggcaacaccaaagaaggtggtattcaggtggaaggtgccgttatgatgccggcatatatgaagaacgacgaccagaaagccatctttgccaatgcaaaggtaaacgatgtactcgtattcaatccttatacagcatgggatggcaatgcagccgaactctcttcgctgctgaaggtagacaaagaagctgctgccgaaatgaaatccaacttcagcttccaggtagaggaaattacccgtttcgtggcaggtgagctgaaccaggagattttcgatcaggtatttggcgaaggcgttgtcaagaccgaagaagaattccgtgccaaagtgaaagaggttatcgccaaccagtttgtagctgacagcgattataaattcctgttggatgttcgtaagatgctgatggaaaaagtcggtaaattggaattcccggatgcgttgctcaagcgtatcatgcgtctgaacaaccaggataaggacgaaaaattcgtagaagacaattacgacaagagcatcgaagaactgacttggcatctgattaaagagcaactggtgaaagccaacgatattaaagttgaacaggatgacatcctcaatatggcaaaggaaactacccgtgcacagtttgcacagtacggtatgctgagcgtgcccgaagaaatcctcgacaactatgcaaaagaaatgttgaagaagaaagaaagcatcgaaggcctggtgaaccgcgttgttgaaacgaaactggcttcagccttgaaaacgcaggtaacgttggagaacaagaacatctcggctgcggatttcaacaagatgtttgaataagattttggcgggaagccgctgatttttataaagaaacacagagtttgacaaactataactctgtgtttttttgtgtctctgtgttctttttcgtttctttgcattcacattaaaaaattaaaaagagaaagacaatggatgattttagaaaatacgctaccaagcatttgggaatgaacagcttggtgctggatgatgtgattaaatcacaagccgggtatttaaatccctatatcctggaagagcgtcagttgaatgtaactcaattggacgtattctcccgcctgatgatggaccgcatcattttcctcggtacgcagatagacgactataccgccaataccctgcaggctcaattgctgtatctggattctgtagacccgggcaaggacatctctatctatatcaactcgccgggcggttcggtatatgccggactgggcatttacgacaccatgcagttcattagcagcgatgtagccaccatctgcaccggtatggctgccagtatggcggcagtgttgttggtggccggagcagaaggcaagcgttctgcactgacgcactcgcgcgtaatgattcaccagccgatgggcggcgcacaaggacaagcctcggacattgaaatcacggcacgtgaaatccaaaaattgaagaaagaactttatactatcatagccgaccattcgcatacatccttcgataaggtgtgggccgactccgaccgcgactattggatgacggcgcaggaagccaaagagtatggtatgatagaccaagtctatacaaagaaataaatatggcagactctaaacgaaacaagaacagatgcagtttctgtggacgctcggaagatgaggtcggcttccttataacggggatgaacggctacatctgcgatagttgtgctgtccaggcctatgagattactcaagaggctttggatgccaaaaaaggcgatggcgctacgaaactgaatctgaaagaacttcctaaacctgtagagattaagaattttctcgatcagtatgttatcgggcaggatgatgcgaaacgtttcctgtcggtatctgtgtacaatcattataagcgcctgctgcagaaagcgggggatgatgatgtggagattgaaaagtccaatatcatcatggtgggcagtaccggaaccggtaagactttgcttgcccgtaccattgccaaattgttgcatgtaccttttactatcgtagatgcaaccgtgctgacggaagccggttacgtaggcgaggatatcgaaagtatccttacccgtctgttgcaggtggcggactataacgtggcgcaagcggagcaaggcattgtgtttatagatgaaatagacaagatagcccgtaagagcgacaatccttccattacccgtgatgtaagcggtgagggcgtacaacagggattgctgaagctgctggaaggctcggtcgtgaatgttccgcctcagggaggacgtaagcatcccgaccagaagatgattccggtgaacaccaagaatatattgtttatttgcggcggtgcattcgacggcatcgagaagaaaatagcgcaacgcctcaataccaatgtcgttggttatggagcggtgcgcaatacggcggccatcgacaagaataatatgatgcagtacattgctccgcaggatttgaaatcgttcggcctgattcccgaaatcatcggtcgtctgccggtattgacctatttgaatcctttggaccgtacggcattgcgtgctattctgacggaaccgaaaaattccataatcaagcaatacgtcaagttgtttgaaatggatggtgtgaagttgacttttgaagatgcggtgtttgagtatattgtagacaaagctattgaatacaagctgggagctcgcggtttgcgttccatcgtagaaaccattatgatggatgcgatgtttgaaatcccttccgaacacaaagatggttttacagtaactttggactatgcccgtgcccagttggaaaaagcgaatatggcaagacttcaaaatgcttaaaatcaaaaggtaatacaaataaagcagacttttttgtgttttattgaaaaatattcggcggattatgcttgaaatttaagaagttgtttataactttgttagagttcttgaaaataagaaacgtcatgtagcggcgttattaatagcttaactcaataaacaacctaatgaatcatggcagggaagaagattaatttgacagaccagctgaagaactacttcgggttcgacacttttaaaggaaatcaggaagcaatcatacagaatctgttggcgggtaacgatactttcgtgttgatgcccaccggcggtggaaagtctttgtgctatcagttaccctctttgttgatggacggcacggccattgtgatttctcctctgattgccctgatgaagaatcaggtcgatgcgatgcgtaatttcagcgaggaggatggaatagctcatttcatcaattcttccctaaacaagagtgcgatagaccaggtgaagtccgatatccttgccgggcggacgaaactgctgtatgtagctccggagtctttgacaaaagaagagaacgtggagttcctgaaaacggttaagatttctttctatgccgtagatgaggcccattgtatttctgaatggggacatgacttccgaccggaatatcgccgtatccgtcctattatcaatgaaatcgggaaagctccgctcattgcattgactgcaaccgccacaccaaaggtgcagcacgatatccaaaagaatctgggtatggtggaagcgcaggtgttcaagtcgtctttcaatcgtccgaacctttattatgaggtacgtcccaagactgcaaacgtagataaggatattatcaagttcatcaagaacaatccggaaaagtcgggtatcatctattgcctgagccggaagaaagtagaggaacttgccgagatacttcaggcaaacgggattaatgcccgtgcctatcatgctggaatggattcggccacacgaacacagaatcaggatgatttccttatggaaaaaatcgatgtgatcgtggccacgattgctttcggtatgggtattgacaaaccggatgtgcgttatgtgattcactatgatattccgaaaagcctggaggggtattatcaggaaaccggacgtgccggaagagatggaggcgaaggacagtgtattactttttataccaataaagacctgcagaaactggaaaagtttatgcaaggcaagcctgttgcagagcaggaaataggcaagcagcttctgctggaaaccgctgcgtatgccgaatcgtccgtttgccgccgaaaaacgttgctacactatttcggtgaggaatatacggaagaaaattgtggaaattgtgacaactgtttaaatccgaaaaaacaagtggaagctcaggaattattgtgcaccgtaatagaaactgttcttgcggtaaaagaaaattttaaagcagactatattatagatattatacagggaaaagaaacttcggaagtgcaggcgcatctgcatgaagatttggaagtgttcggttccggtatgggagaagaagacaaaacttggaatgctgttatccgccaggcattgattgccggttatttgaccaaagaagtcgaaaactacggcttgttgaaagtaacggatgcaggtaagaaattcttgaagcatcctaaatcctttaagattacggaagataatgatttcgaggaagtggaggaagaagcaccggcacgcggcggtggcgcctgtgcggtagacccggctctctattccatgttgaaagacttgcgtaagaagctctccaagaagttggaagtaccgccttatgttatattccaggacccttctttggaagcaatggcaactatttatccgataactttggatgagttgcagaatattccgggggtaggagccggcaaggcgaagcgttatggtgaagagttttgtaagctgattaaacgccattgtgaggagaacgagatagaacgtccggaagatttgcgtgtacgtaccgtggccaacaagtctaagatgaaggtcgctatcattcaggctattgaccgcaaggtggctttggacgatatcgccatgtcaaaaggtattgagtttgaggagttgctggatgagatagaagctattgtctactccggtacgaaactgaatatcgactacttcctggaagatattatggatgaagaccatctgttggatatatacgactatttcaaagaatctactacggataatatcgatgatgctctggatgagctgggagatgattttacagaagaagaagtacgtttggtacgtattaagttcatctccgaaatggcaaattaatcctcgggctgcgataaaaaaagaaaaaaatattgcgtgtaaatatacggaatggaataaaaaccgtatatttgcacgcaataaattttaaacgcatagccctatgtcatttattgctgataagattgtaatggacggattgacttacgatgacgttctgttaatccctgcttactctgaggtacttcctaaaacagtcgaactctcgactaagttttcacgtaacattgagttgaaaattccgtttgtaacagccgctatggacactgttaccgaagcgaaaatggctattgccattgcccgtgaaggcggtattggcgtgattcataagaatatgtctattgaggagcaagcccgtcaggttgctattgtaaaacgtgccgaaaacggtatgatttacgatccggtaacaatcaagagaggttcttcggtagctgatgcattgggcttgatgtccgagtataagattggcggtattccggtagtggacgatgaaggacatttagtgggaatcgtaaccaaccgtgacctccgtttcgagaaagaccataacaagcgtatcgatgaggtgatgacaaaagacaacatcgttaccaccaaccagacaaccgatttggaagctgctgctcaaatcttgcaggagcacaaaatcgagaagttgccggtggtcgataaagacaataaactggtaggtttgattacctataaagacatcaccaaggctaaagacaaacctatggcttgcaaggatagcaaaggccgtcttcgtgtggctgccggtgtgggtgtgacagccgatacattggagcgtatgcaggcattggtcgatgccggagcagatgctattgtaattgatacggcgcacgggcattccatgtatgtaatagaaaaattgaaagaagctaagaagcgttttccgaatattgatatagtagtaggcaacatcgctaccggagaggctgccaaggcattggttgaggccggtgcggacggagtaaaggtcggtatcggtccgggctccatttgtaccactcgtgtcgttgcaggtgtaggtgttcctcagttgtctgccgtgtacgatgtggcaaaggcactgaaaggcacaggcattcctttgattgccgatggcggtttgcgttattctggtgatgtcgtgaaggctttggctgccggcggttactctgttatgattggttcattggttgccggaacagaagaatctccgggtgaaacgattattttcaacggacgtaaattcaagtcttatcgcggcatgggttctttggaagccatggagcatggttctaaagaccgttacttccagagcggaacgagcgatgtgaagaagctcgtgccggaaggtattgcagcccgtgttccttataagggaactttgtatgaagtgatttatcagctgaccggcggtttgcgtgcaggtatgggatattgcggcgctgccaatatagagaagctgcatgatgccaaattcacccgcatcaccaatgccggtgtgttggaaagccatccgcatgatgttgcgataacgagcgaggctccgaattatagccgtcctgaataaggatattcatccataaagatatatgcccggagagtaaattatacttttcgggcattatttgtttatgatattgtatctttgtgaacttgcttgtttattggttttgcctattttagacagatggttatgataaggacttgtttggtgatgattttttccggagtgagctggcttgctttttcccagcaggacccggtgttgatgcgtgtcaatggaaaggatgtgctgcgttctgagtttgagtattattataacaaggatgcggcatcgtttgcttccgggtatgttgcaccggaaaagtatgcggagaagtttgtagacttcaagttgaaagtatctgctgccgagacagccggtttggatacggctctttcgtttcgtgagaaggttgaaaattaccgcaatcggttgataaaatcgtatctgacagatacggctgtcattgaaaatgaagcccgccggttgtatgataaaatgaaagccggtcatcatgcgggacgcgtccgtgtgagtcatatttttaagtatcttcctcaaaatgtatccggtcatgcattgcgtaaagctattgccggcatggactccatttacgaatatctccggaggaatcagacatccgaggcttttgatgcctgcgtaaaacgtttttctgatgagaaacagccattttgggtgagttggctgcaaatgccgatagagtttgagaatgtagcttttgagttatcggcaggcgaagtgtcccaacccttttttacgccgcaaggcattcatattgtgaaagttattgagcgaatggaaatgccgtcttttgacgatgtgaagaatggaatggagctttgtcgggctcatcgtcacgggactgattggggagttgaagcacaggtggagaagttgaagaaagaatatgagtatgctcccgacaaaacgggtatggacgaactgatacgtacaggacaaacaaaacgtacgctgtttacattggcaggaaagagttatacgggaaatgactttatccgttttgcagcagcatatccggctggtgtacgcaggcagctggatgcttttgtaatgaaaactgtacttgattatgaaaatgtatgtttggagcggaaatatccggaattacgttatcaggtggaggagtataggaaccgcttgttgctggataaaatcaccggacaggaaatccataaacgaatcgggtcagatgaggccggtctgcaaacttattttgaaaaacatcgttccgactatcagtggaggaaacagcggtataaaggtattgttctgcacggagtaagcaaacgtattgtcaaacaagcccgtaaatttttgaagagtctgccggaagaagaatggaaagatgcgattcggttgactttcaatgccggtgcacagcctcagatacaggcggagcagggaacattcgcttccggtgacaatgtatatgtcgatgatttggtgtttaagggcaaggacgcagcgcctatggtgtcattcccttttactgccgtgctgggtaagaaggtgaaagcgccggatgactatcgggaagtaaaagacagggtggttactgattatcggaattgtctggagaagcagtggataacccgtttgcgcacctcggctaaggttgaaattaaccaagaggttttaaaaaccgttaataatcactgatgcaaccgattaaagccgtatcttcgtaccttaaaatgtagtaaatatcagctggtaatgcgaacaacctgtttgggacttttaatccttcttttctgtggctcgtgcaaggaacagcacgatcatggagggcgaacaccgttagtggaattggatggtaacttcctttaccatgaagacctgcaggcggtgcttcccgcagggttgtcgaaagatgacagcctgttgtttgcggagcattacatccgtaactgggcagaagatgtgctgttgtatgagaaggcgcagagtaatattcccaacagcggagagattgacaaactggtggagaattaccggaaggcgttgattatgcatgcataccagcaggcgctgataaaccaaactctttctgaagaaatttcggaaacggaactggctgattattatgagaagcatcaagagctttttaaggtggagagtcctttgataaagggattgtttatcaaagttcccctcacagcccctcaactgagcagtgttcgccgttggtacaggaccgaaaaccgcgaggccgtagagcatctggaaaaatacagtctgcagaatgccgtgaagtacgagtatttttatgacaagtgggttccgataaccgaagtgatggacttgatgccgctgaaagtgcccgatgccggagaatatctgaataagaaccgccacgtggaactgaaagatacggcttttcattattttctgaatgtgagcgattatcgtgctgtgggagaacaggaaccgtatgagtttgcccgtagtcaggtgaaggatatgatgctgaacatgaagcaggtgaattttatgaagcaggtgaaagaagatttgtatcagcgtgcggagaaaaaagataaaattaagtattattagtataagataccaagaatgaagatgtgtatgaactttaagtttgtagttttatttgccttgacgctgttagccggttctaccgtttatggacaagacaatgtgattgacgaggtcgtgtgggtagtgggcgacgaggctatattaaagtccgaagtggaagaagctcgcatgagcgctttgtacgaaggacgtaagttcgaccgggacccctattgtgtgataccggaagagatagccgtacaaaagctgttcttgcatcaggcggcacttgacagtattgaagtttccgaatccgaagtcatccagcgtgtggattatatgacaaatatgtatatcagcaatatcggttcacgtgaaaagatggaagaatacttcaataaaacttccagccagattcgtgaaacattgcgggaaaatgcccgtgaagggttgaaagtacagaagatgcagcagaaactggttggtgaaatcaaagttacgccggccgaggtgcgtcgttatttcaaagatctgccgcaagatagtattccctatataccgactcaggtggaggtgcagataattacccagcagccgaaagtacctttggaagaaatagaaaacgtaaagaaacgcttgcgcgattttactgaccgtataacaaagggtgagaccagtttctctacgttggctcgtatgtattcggaagaccgtggttctgccattcgcggtggcgaaatcgagttttccggacgtggtatgctggatccggcatatgccaatgttgctttcaacttgcaagaccccaataaggtctctaaaatagtggagtccgaatatggttttcatatcattcagctgatagagaagcgtggagaccgtattaaaacccgtcatatattgctgaaaccgcatatcccggaagaatctttgacagcaggtatggctcgtctggactctatagccgatgatattcgtaacgggaagttctcttttgaggaagcggcatcggtgctttcacaagacaaagatacacgcaataatcacggtttgctgcctaaccccaataccaatacctccaaattcgagatgcaggagctgccgcctgaaattgcaaaagtggtagacaagatgaaagtaggcgagatttctgaagcatttaccatgattccgcagaaaaccggaaaagaagaatgtgtcatcgtgaagttgaagagccgtaccaatggacataaggctaccgttgccgatgactaccagaacctgaaagagattgttctggagaaacgtcgggatgaaatgctggacaagtggattcgtgaaaagcagaaacacacttacgttcgcatcaacgaaaattggagaaactgtacattcaagtatccgggatggataaaagactgatatttggtttggtatgtttgttcggcgtttgtttgttgagcgcgcaggacaggaaaagtgagcctgacaagaaaaagaaacgtgtggatttgctttatgccgatgaggcgcaggcggatcagcagttgcgccctgatgtgcaggtgctgattggctcggtcaggatgaagcacgatagtatgtacatgttttgtgacagtgctctgatttacgagaaaattaactctgtggaagcattcggtaatgttcgtatggagcaaggagacactttgttcatatacggtgattatttgtattatgacggtatgtcccagcttgccatgctgcgtgataatgtccgtatgattaaccgcaatacggaacttactacggatagcttgaactatgaccgtctgtataatttaggatattactttgacggcggtacgctgaccgatgaagaaaatgtcctgacttccgaatggggagaatacagcccggcaaccaaactggcagtgttcaaccatgaagtgaaattggtaaatccgaagtttgtcctgacttccgatacgttaaagtacagtacggagtccaaaatcgctacgattctgggaccttccgatatagtcagtgataagaatcatatttattcggagcgtggagaatacaataccgtatccgagcaagcagagctgttggaccgttccattttgactaatgaaggcaaaaaacttaccggagacagtcttttctatgaccgcaagctgggttatggtgaagctttcgataacgtacagatgaatgatacggtaaacaagaatatgcttaccggcaattactgtttttataatgagctaaccggtaatgccattgctacccaacgtgccgttgctatagactattctcagggtgacagtctttttatgcatggtgatacactgcgtttggtaacgtaccacatgaatacagactctgcctatcgtgaaatgcgtgtttatcacaaggtgcgtgcttaccgcacagatgtgcaggcagtgtgcgattctttggtttataattccaaggattcctgtttgacgatgtataccgaccctgttttgtggcacggtgcgcagcagttgctcggtgaggaggtaaaggtctacatgaacgacagcaccatcgactgggcgcacatcattaatcaggcgctggctgtggaacagaaagattctatccattataaccaagtgacaggcaaggagatgaaagcttttttccaaaacggagatatgcgccgggtagatgtgaacggtaatgtcctgattgtgttctatccggaagagaaagacagtacaatgattggcatgaactatgccgaaggcagttttctgcgtatttatctcaaagaccgtaaaatggaagaagctgccttgataggcaagtccaacggcatattgtatcctatggaccaaataccggccgacaagatgaaacttccttcatttgtgtggtttgattatattcgtcccttgaacaaggatgacatctttgagtggcggggtaaaaaagcgggtgaaacattgcagaaaagtgaccggaaacctttaacttcgccaagagatatgcatataaaacgaactaaaaaataatgctatgggaatgtttgcaatgcgtaagccgcggggatttcatcattcatacatttatgtagatgaacggaaagagaaactggccaaaatggaggaagatgccaaacgcgagttaggcatgttgccggaaaaggaattttcgcccgaagatatccgggggaagttcattgaaggcactacccatctgaaacgtcgtaaggaaagcggacgcagaccggtgcatctgggggtgatactggtggttgtggcattgctgatatatttgtggtatgccattaccaacggtattatctaattttttctgtaccctttatttcatactttatactttatacttatcatgagcgatatcattcatttgctgcccgattcggttgcgaaccagattgctgccggagaggtgattcagcgtccggcgtctgtcatcaaggaattggtagaaaacgcgattgatgcagaagccaccgaaatacatgttttggtaacggatgccggaaagacctgcatccaggttattgacgatggaaaaggaatgtccgaaacggatgcgcgtctgtcctttgagcgtcatgccacttccaagatacgtgaggcctctgatttgtttgcgttacgtacaatgggttttcgcggtgaagcgctggcgtctgttgcggcggtggcggaggtagagttgaaaacccgtccggccggtgaagaacttggtacgcgtctggttattgccggttccaaagtagagagtcaggaggctgtttcttgtcctaagggaagtaacttttcagtgaagaacctattcttcaatattcctgcccgccgtaagtttctgaaagcaaattcaacggaattaagcaatattcttgccgagtttgagcgcatagccttggtgcatccggatgttgctttctatctgtatagtaatgatgcggagttgttcaatttgcctgtcatgccgttgcgccagcgcattctcgccatattcggtaagaagttgaaccagcagttgctttcggtggatgtagacacgacgatgataaaagtttccggttttgtggcaaagccggaagcatcccgtaagaaaggtgcgcaccagtatttttttgtgaacggccgttatatgcgccatccatattttcataaggcagttatggatgcctatgagcaactgattcctgccggcgaacagatatcctatttcatctatttcgaggtagaccctgcgaatatagatgtaaacattcatcctacaaagacggaaatcaagtttgagaacgagcaggctatttggcagatactttcagcggctgtgaaggaatcgcttggaaaattcaatgctgtaccgtccatagactttgatacagagggcatgcctgacattccggcatttgaacagagtcgtcccatcgaaccgcctaaggtgcattataatgcggacttcaatcctttcaagacttcctctgcctcttcttatagcagcggaggaagttatccgcgccaaagtgtagagtgggagggactgtattccggtttggagaaagcaagtagaatgaatgagcctgtcgaggaagaaccgcttgctttcgaggaggcggtttccgctgtaacggaagccgttgagcccgcttcccaatcttcttctttgtactccggtgattcttcttccatggagaagggggcacagcatttgcaattcaaaggacgttttatccttacttccgtaaaatccggcctgatgttgatagatcagcaccgtgcgcatgtccgtgtgctgttcgaccggtacatgactcaaattcgccaaaggcagggagtatctcagggggtgttatttccagaattgattcaattgccagtttccgaagctgcggtgttggaaagtctgtcggacgatttggcggcagtcggtttcgacctcagtcctttaggtggcggcagttacgctatcaatggtattccttccggcatcgaggggttgaatccggtagaactggtgcgcaatatggtacataccgccatggagaaaggcagtgacgtcaaggaagaagtccggacaatccttgcgctgacactggcgcgtgcagcagctatcgtttacggacaggtgctgagcaatgatgagatgtccaatttggtagacagcctttttgcctgttctacgcccaactatacgcctgatggtcgtacggtgctttccactatcagggaagaggatattgaaaagttgttccagaaatgatgatttgtacattatttatccataacaattaaaaaaaatctttttttcagaaccttttagtcttgtcggcgttaattaatcagtttgaatgataaagaatttaattaaccaacttaactattttaaggtatatgaaaaagattctaatgttgctggctttggccggcgtatctgctgccactatggcacaacaaaaacctgttgttgtagagcaggttgacattattcaggtacaggataagtaccaggtaatcacaaatccattctggagcaactggtttttctctatcggtggcggtgcatcggtaatgtatggagataacgaccagcagttgggtgatttcggaaagcgcattagtcccacgatgaatatttctgtgggtaaatggtttactccgggactcggattacgtttgcagtatagcggccttcaggcaaaaggctttaccatggacccctttgctgattatgtaaagggtactcagcgtgcgaatggctcgtacaagcaacgctttgattacatgaatttccacggtgatgtaatgttcaacctgaatgccttgtttggcggatacaacgaagaccgtgtatatgaaatcattccttatctgggtgccggtctcactcataactatacgaagcctcaccgtcaggcacttgctctgaatgccggtatcatcaaccgctttcgcatttcaaatgcaatagatattaatttggaacttagtgcaatgggagccgaagataaatttgacggaacagttgccggtaaggggtatgatggtgtgttcagtgcaacgcttggtttgacttaccacttcccgaaacgtggtttcaaccgtccgaccccacaattgatttccgctcttgagctgtctgccatgcaacagcagatagctgaaatggctgctgccaaccaacagttggagtcggctctgaccgctgcacagaacaaaccggtggaagttactgaaactgaagttgtcgttaccgatccgaatatcgcaccgcgtaccgtattcttcaagattggttctgccgaagtatctccgcgtgaggtgatgaatatttcttatctggccaaacagatgcaagagttcccgaacactacctacaccgtaaacggctatgccgactctgcaacaggtactcctgaattcaacaaagagctgagcttgaaacgtgcacaggctgtagtggatgttttggtaaaggattacggtatccctgccaaccgcttgaaaatttctgccgatggtggtgtcgacaagttcggacaaccgattctgaaccgtgtggtattagtgaagtctgctaactaacagataaatagaaaagaacaagggctgtatccgctaccggatacagccctttcttttatgccttgccgcgcggagattattccgcgctgaatttctttacctgctctgcgataagttccgcatcatcgaaatagttaatcttcatggcacgacgcacgtcgtccaatgtcgctgcggctgtttcgcgtgccgcttcacagcctttcttcagcatatcgtagatagccggaatatctttttcgaattccttgcggcggttacgaatcggctccaaggtttcctgcatgatattgttgaggaagcctttcactttcatatcgcctaaaccaccacgttgatagtgggctttcagttcttccagagaaggatagtcgggcaggtaacgttcgaagtgttcggggcggcagaaagcgtccaaataagtaaatacggtattcccctcaatcttgcccgggtcttgtacgcgcagatgatcggggtcggtgtacatgctcttcactttcttctgaatctcgtcggctgtatcggaaaggtagatacagttgcccaaagacttactcatcttggcttttccgtctgtacccggcagacgcagacaggctgcattgtcaggcagaaggatttccggttctaccaatgtgtcgccgtagataaagttgaagcggcgtacgatttcacgggcttgttcaatcatcggttcctgatcttcgccaacgggaacggtggtggcgcgaaacgccgtgatgtccgcagcctggctgatagggtaggtgaagaaccccaccggaatacttgtttcaaagttgcgcatctggatttccgtctttaccgtcgggttacgttgcaggcgcgatacggtgacaaggtccatataatagaatgtcagttcgcacaattccggaatctgcgactggataaagatggtactcttcgtaggatccaatccgcaagccagatagtcgagagctacttcgataacgttctgacgtaccttttccgggttttccatgttatctgtcaatgcttgtgcatcggctatgaacacgaacgtcttgtcatacagtccggagttctgcaactccactctgcgtcttaatgagcctacataatgtccgatatgcaggcgtcccgtggggcggtcgcccgtaaggatgattttttcttttgccatatctgtatcttttgtttatttcactgaaagtttataagttatctgcaaagataccgatattttcttctctgtcaaagtggattcggactttatcctcttttccttaacaagcgaagagattcttcgtcattttattctctgtattctatgagatagaggggaaaatgtaaaaaacagcactaaattttggcatgtggttaatttggataacagattggttagtttggataacagattggttagtttggataacagattgattaatttggataactggatactcaaatatagatattaattttgtaacatcaaaaaaacatgggtaaagtatatatagcgaaaatgaatagaaaagtccggtttgttttgagttgatttccaattttcatctgtgttacgtagacaggtgaaaaatcagaagatcagcaagggaaaattaatttattaaatatgtaattaagaaaattatgaaacaaaagaat

SEQ ID NO: 4102 - DNA, 378 bp, Unknown
  gut microbiota DNA sequence
gactgccatctggaaacactgcaagagaggaattcctattccaagacggacaaggacgctacttttatgagaatgaaggaggatgccatgcgcaacggacagacgaagcccagttacaaccttcaaatcggcaccgaaaatcagttcatcaccgattttgcactcttcccgaaccctacggatacactgaccctgattcctttcctgcaatctttttcaaacaggtatgaccggatggcccatacggtggttgctgattccggctatggctccgaagagaattaccgcttcatgtccgaaaacggcatggaagcctacgtaaagtacaactatttccacatggagcagcggccgagattcaaaccggacccgttcaag

SEQ ID NO: 4103 - DNA, 61869 bp, Unknown
  gut microbiota DNA sequence
tacagaatctttaggtaataacaaagccccagcttgtgaaagtcggggctttgtacgtaaaataatgaaggtgtgcattttgacacaccttctttctttttccatgttcgacacactccctgtattgcctgcaaagataaccgttaaacaaaccattcctactcggctatttattggatggcaggtgttaaataataaacctgcatttgcataggagagttgaatggtgttttaacgcagttgatacacatttataagttagcagccactaccggtaacggtatgcagattttatagaatctcatcaaccgacgcacaggagtacggcacaagtcctgcaatttattctcagaaaacggatttgtgatttcatcacgttctttcggataaatgattatacaagggacatcaggcaagggagattcttcatcaatctcattgtaacctaatttctgcaatatcggcaagtctctgctatatccgctcaactgccggactacataattatccaataaataagattcatcatatttaggtatgtatttggtatcaagtattgccttaaagtcatgcgatttatatagaaaatccggataaccggttctgcccttaacctgatacaaaactttgtcgccgtaagcatcatgaagcaatccatacacataatgttcatatagtaatgacatatccaatgtgaaaggtaaaatattgtcatcctcagtgcttgtcttacttatgctgaaatcatatctccgtaagataagctttgccaagcgtacagcttcactatactcattgaacaacttgtgagccttgatctgagttacttctcttacctgtacgtcttcacttaccctttcaaacattaatagtgactttgacagcatttgcttaaccttgctgccgtccttatgatgctctattactgtcctcaatatctgcttacaaaacaaaagggctttcttgattagtttattctccggaatatcaactgtgtattcatcatattcacagaatactctgtcaaagcgtttaatcgccatgttagttctttcattcctgataacattgatacggcctttcacttttttcagatttccactataatggacatagcccttttttaacgatttaatcctactgactactgcaagaaaatgcagcacaataagtgggctaataatccccttcaatgaaggtgcatagataaccggggcatcactatcaatggtgtatatttgcgagaaagcatctgctgacaaacttgacgagaaacaggtcataaacattgcaaggaaatctatttcttccatccctctctttgtcgtaactaccagcgcttcattctcgtctatccattctgcgccgatcacatacgatgcatagtgcccccacggttcataatccataggtttatcccatcgaacaagatgcagattgtcaaatctactatcttgcccaacgttcaaccgttcatgttcctgaataagaatgggcctcatatcgcatttaccgttcgtcctcatccgggtcgtcttgctccgcttctccgataggagtcagatgcagccatgaatcaaaagcagattccttttgagtattctttacagcgaggataccatcgttgatatattcattgataagcgggataatttcatattcaactttggcaagcaattcctccttatcttccgccatgaagaaactgtggccaatcataagatcgtcaatactcatatctccgcagagatgtttaggattctcgatgaatttcctgatgtccttgaataaggcaacagctatatcaccaagttcccgattgcctgcttcgttgtaatatttctcaataatagattcgtctgctttcaatgttacaaaagcaaatcttctacgtaaggcataatcaagagtacctgtacttctgtccgtcgtattcatcgtaccgataatgtataaatttgaaggcacctcaaactctgcctttgtatatggcaacataaccttaatcggatgagcaccttgacttctcttgtcagcttccagcaaagtaataagttcgccaaagatttttgatacattgccacggtttatctcatcgatgataagtacaacacgtttatcggcaatagccccatactcctcctttactgcattgatgaaagcctgcgcataagcctgccaattgttttcacaaccttttcctaaagcctgaagtttcactttctcaatattcattggcgaaggagtatactcctccccgcgtgaacatgtagaactggtactgcggctacttatggttgaattgccttccttccaccaaacgaagagcgaagatttgccagaaacagtaggaatctcgcgtttgttttcataaccctttatcttctgaaggtagtcatctatgcactcaacaatatctttgctctgatcggtttgcacagcattacaagcacgtttaaaaattccatcttccggctcataggttacaccaatagagttaccattctcatctgtctgcacatgaggtttcagtccttcaacaaaatcttcataatcgagagactgatgaaatgtggtaaaaaagatttggtctccaagcaaagaattatagcgttccatgacggcagtatgatctgtcagatccgtatccgtgatgcctaatgccttcaaagcgatggcagcagtattataggtcttgccagtaccaggtgcaccctgaagtataatgttacgctttgacagcaacaacttagcaatattactgataaacatattcttcttattatattgtttttccaattcttccattttgctctttgcaaacccggcatctacctcaaagatagattgtcttgcattgcctttgatgcaggcatagccacagccataattcagaactcttgaatcttgactgtaatagtgccattgatcaacagatatgcgttgcccccaatcattaacgccgtttcgcaagtcttcatagaaaacatcagtatccttaaaacatacaattccgctatcatagtcatacctgttgctgctgataatgtctgacaacgaggatatccggtctgtttgaaaagggcatttcacaacgtaaccataagcgtatatggttttattaggatgggttaacagcaatacgtcacctgcttttatctcttttaccaacttaagaagttgggtcacgatgtgatttgcctgtatacggtatctctgttgcataagccatagattattctccaaagcaacactccaataatcatcatccgataaacgggcaatccaatatctccggaacgtaacagcagataaagaaaccatatcctcgcgtctttctatgtagtcagttctttccatatctgtatgagtatacgactatttcatcattcataaacttttgccataccaagtgcttgttacaacaactataggaagccatacgatgaaggcggttatagtgtacatgcaacaaaaggcggttattgtaaaaccgattgcttaacaatgcttttgttatatttagcactatcggttttaaaacacgccttgtatcactgacaaaagtaatcataaaacattaaacaccttatatctaaacaataaaaaaaacgctgatgattggggtaacagaacttaataataactaatcccaacagttcaaattctgttcgttcgccttttttaaggcattggtacaaaaatagtaatccgccgctttgctgtttaatgtttaatgtttaaatttgcgtttgaatcataaccatttattggcagaggagataataaatatgaaacagatgtttcaatatgaagctgcacttaacgccttgctttttgccctttcaaagcttgggggtaagtctgatatgcacaagctctgcaagatattgtattttgcagaccagcgtcatttgtcgttgtacggccgtagcattacaggcgacacctacattgcgatgcaatacggtcccgtcccgtcaaatgtcgatgatattctcaaagccgtacgtggagacagcttcttttccggatatgttgatgagcttaaagacaaactggcatttgaaaaccgttatatcgtgaaggaacttgccgaaccggatatggacgagttgtctgaatctgatgtggaatgccttacatacgccatagatttgtgccatgacaagagtttcgggcaactcacggatttgtcgcacggcatggcatggacaaatacggcaagagaccgtgccatttccgtaaaagacatactgcgggaagccggagacgaagaagaatacgtagaatatatagccgaccaattgcggcttcaatctgctttactgcaatgatacttccgtcgtcgctccatgagaactttataaagcgtggcactatattgcactccgagatattcgaagacattgaccacggcaaattttttgccgtaatgggcatatcggatgatatggtagccggattcttcttcattaactcacatatacatccggtaattaaaaaacgccccgaacagtttgccatgcaatatccgttgaaacattctgactatgcttttctgaaatacgactcgttcctgtgcgccacggccattcagaaaatacccttagacaaacttgccgagactgttgctggaggcaagactgtccatgtcgggaatctgaccgaatacgaccttgccgccatgcttgaggcttgccgtacatcacggctgtttagggaaagcgacaagcggaagttcttctattgattccatccccgtcacccacacattacattattcaatcggaaaatccctcctgctcaagcagccgctacacgctaattgcctgagattggtacaactgtatcagtatatcgttagcaagatgcctatatgccgcattaaatacctgacgcatacaaattgaataggcggtaagcctttgcaaacgaaaagcataccgcctattttattgagtatcaactacatcgtgctattcctcgattgccgcctgagcagccgcaagtcttgcaataggcacgcggaacggagaacaactcacataattcagccccaccttgtggcagaacttcacggaagaaggctcaccgccatgctcgccgcagataccgcacttcagatccggacggatggcacggcccttttcggtagccatacgtaccaactgccctactccattctggtcgagcacctggaaggggtctactttcagaatcttcttttccagataaataggcaggaaggaagcgatgtcgtcgcgtgagtatccgaaagtcatctgcgtcaggtcgtttgtaccgaacgagaagaattcggcggaagaagcgatacggtcggccgtaagagctgcacgcgggatttcaatcattgtacctaccttgaactcgatgctgtcgcctgcttcggcaaacaacttggcagcttcggcacggataacctcttcctgctgcttgaactcgtacaggataccggtcagcggaaccatgatttcgggatgtgtctcaacgccctctttcttcagttccagagcagcgccgaggatggcgcgcgtctgcatctgcgtgatttccggatacgtattgcccaagcggcaaccgcggtggcccagcatcgggttatgttcgcaaagcgcttccacacgctgctggatatactgcaagcttacgcctatggtatccgccatttcctgctgccccttcaaatcgtggggaacgaattcgtgcaaaggagggtcgagcagacgcacggttaccgggcaaccttccatagccttgaagatgcccttgaagtctgcctgctggtacggcagaatcttagacaacgccttgcgacgtccttccgcgttttccgccagaatcatttcgcgcatcgccttgattttctcaccttcgaagaacatgtgttccgtacggcacagaccgatgcccactgccccgaagttacgtgccacctgtgcatcgtgcggcgtatcggcattggtgcgtacctgcaatttcgtatatttatcggccagttgcatcagttcggcaaaatcaccggacagctcggcggccttcgtttccacttttcctttgtaaacctcgccggtactaccgttcagagagatgaaatcgccttctttcaacacaacgccgtccacctctaccgtgcgtgccttgtagtcgatgttcaacgctcccgcaccggatacgcagcacttacccatgccgcgagccacaacggcagcgtgcgaagtcataccgccacgtgcggtcaggatgccttcggcaacggccatgcctgccaaatcttccggagaagtttcgatacgcaccattaccacgcgcttgccggcagcgtgccattcggcagcatcatcggcaaagaacacaatctgaccgcaggccgcgcccggagaagctggtaaaccgcgggtaagaaccttcgcctgcttcaaggccgccttgtcgaatacggggtgaagcagttcgtccagcttgttgggttcgcaacgcaacagcgccgtcttttcgtcaatcataccctggtggagcaagtccatggctatcttcaccatggcggctccggtacgcttgccgttacgtgtctggaggaaccagagcttgccttcctgcacggtgaactccatgtcctgcatatccttatagtggttttccagcttcgtctgcaaagcatccagctccttgtagatttcgggcatcgcctcttccatggaaggatacttggcggcacgctcctcctcgcttacgccggcaagttccgcccagcgtctggagccgataatggtaatctgctgcggggtacggatacctgccacaacgtcctcgccctgtgcattaatcagatattcgccgttaaagaggtcttcgcccgtggcggcatcgcggctgaagcagactcccgtggcggaagtgtcgcccatattgccgaacaccattgcctgcacgcttacggcagtgccccactcatcgggaattccttccattttacggtagaggatggcgcgctcgttcatccatgagttgaacacggcgcagacagcaccccacaactgttcgtaggcgcaggtggggaaatcctttccggtctgctgcttgacggcagccttgaagcgcttgacaagctccttgaggtcttccacttccagttcgttgtccagtttcacgcctttggcatgtttcacctcttctataatggcctcgaacgggtctacatcttccttgttcaccggcttcatgcccagcaccacgtcaccgtacatctgtacgaaacggcggtaggagtcccatgcaaagcgggggttgcccgtcttgcgaatcagcccttccaccacttcatcgttcaggccgaggttaagaatcgtatccatcatgcccggcatggaagcgcgtgcgcccgaacggacggacaccagcagcgggttttccacatcgccgaatttggagcgcatcagtgtctccacgtgcgcgatggcgttttccacttcctgtttcaacagggcaacgactttttcctgccccatttcataatattctgtgcaaacttctgtcgtgattgtgaagcccggaggaaccggaactccgataaggttcatctctgccaggttggctcccttaccccccaaaaggtttctcatgccggcttttccttctgcctggccgttaccaaaggtgtaaactctttttttgtccataatatcaatttaaagtttctgattgtgattttttcattttttctgctcgcaaatctaagtatatttcacagactagaaaactttttgagaaaaaactttaagtcaaaatgcaatttcgagattgcaaaatttaatattcccattcatagagagaaattacggaaaaatacctatttttgccgttgaatttattatactggtgtaaaagtggcaagaaagagaaaagaacttcccctgttggaaaaggtggaaattacggatgtggctgccgaaggaaaagccatcgcgaaggtcaatgatttggtaattttcgtaccgtacgtcgttccgggcgacgttgtagacctgcaaatcaagagaaaaaagcatcattatgccgaggcggaagcggtgaagtttcaccaatactcaccggtaagagccgttccgttctgtcagcactacggtgtatgcggcggctgcaaatggcaggtgctcccctattcggaacagataagatacaagcagaagcaggtaacggacaaccttacccgcatcggaaaagtggagctcccggaaatatcgccgatactcggttccgcaaaaacggagttctaccgcaacaagcttgagtttactttctccaacaagcgctggctcacggcggaagaggtccggcagaatgtggtgtacgagcagatgaatgcggtaggcttccacattcccaacgccttcgacaaggtactggccatcgagaagtgctggctgcaggacgacatatccaaccgcatccgcaacgccgtgcgcgactatgcctacgagcacaactatccgttcattaacctgcgcacgcacgaagggatgttgcgcaatatgattgtgcgcacttccaccaccggcgagctgatggttatcctcatctgcaagattgagaaggacgaggagatggagctgttcaaacagttgttgcagtacgtagcggacactttctctgaaatcacgtcgctgctatacattattaataataagtgcaacgacaccattaccgacctcgacgtacacacgttcaaaggcaaagaccatatcttcgaggagatggaaggcctgcgcttcaaggtgggtcccaagtcgttctaccagaccaactccgagcaggcatacactttgtacaaagtggcccgcaacttcgcagggctcaccggcaacgagctggtttacgacctttataccggcacgggaaccatcgccaacttcgtgtccggacaagcgcgccaggtcatcggcatcgaatatgtgcccgaagccatcgaggacgccaaggtcaactcggaaatcaacggcatcaggaacacgctgttctttgccggcgacatgaaggacatgctgacgcaggactttatcaacgagtacgggcgtccggatgtaatcatcaccgacccccctcgtgcgggtatgcaccaggatgtggtggatgttatcctgtttgcagagccgaaacgcattgtgtacgtaagctgcaatcccgccacgcaggcaagggacttacagctgctcgatgccaaataccgggtgaaggccgtccagccggtggatatgttcccgcatacgcatcatgtggaaaacgtggtgctgcttgagttgaaaaatccggcggaaaaagcagaggactgaggcagctcttcgggaacgtgaaagcataaggggctacttcgggaatgtgagtatcactttgggaaatttaaagggctacttcggaagtgcaaagggctactttaggagcgtgaagtgctacttaggaaaccgaagcagagattgagcaaccggaagccgcactcccgaaaagcggtacggcattccggtaagccgatgcaaagctttgttttagaattgaatcattaatcgcaaattattatcctcgtggcaaaagaaagaattatagcaagagcccgcacgcaatatacggactatatggtaaaagagcctatggagctgatggaatttctggcagcgaaaatgccggatgccagccgcaccaagttgaaggcattgttgagcaagcgggttgtatatgtagacagcgtcatcacaacgcagtacaacttcccgctgaagccgggtatgaaagtccagatcagccgtgagaagggacgcaaggagttcaacaacaaattactgaaaatcgtatacgaagatgcttacctcatcgtggtggagaagatgcagggattgctgtccgtcaatacggaaaggcagaaagagcgtaccgcctacaccattctgaacgaatatgtgcagcgttcgggcaggcagcaccgcgtgtacatcgtgcatcgcctggaccgcgacacctcgggactgctgatgtttgccaaagacgaaaagacgcagaatacgctgcgcgacaactggcacaacatcgtaaccgaccgccgctatgtagccgtcgttgcgggtgaaatggaaaacaatgccggcatggtgcgctcatggctcaccgaccgcaagctgtacgtatattccagccccacggacgatggcggcaaggaagcaatcacccactaccgcaccatcaaacgcgccaacggcttctcgctcgtggaactgatgctggagacgggacgcaaaaaccaaatccgcgtgcacatgcaggacctgggacatcccatcattggcgacggacgctacggactggaagagataaatcctatcggacgactggcgctgcacgccttcaagctatgcttccgccatcctgtcaccggagagctgatgcagtttgaaacgccgtatccgggagagttcaagaaattgtttctgaagaaataaataaatcaaaggggttacaaaaaccgcttatcaatcaatcgagggggatgtcaatactaaagcccgcttactgttggatgatttttaggcacggattacgcggatttacacggaaaaataataaagaaaatccgtgaaatccgcgtaatccgtgcctaaaaaaatcatcaagagtgttttaacaccctcacttgcctattctcaggatgttcggacatccatattcttaatattgcctttccagcatgacaggcccatccatgtgcccgtccacgtataatacgccggacagtctgtctcccgcaacatatacgtcgtagatttccagcaaaggataattgtaaccgtagtccagccgcagaatcctgccgtggatgtcccagcggaaaggcaggctgaatgccacctctccatacggatcgttgtaatacgcctgctcatctcttcccagcccgttgccttcaaagtaaagcccgctttccaacggagaattataggcatcggcaaaacctaaatctcctacccagataccgcccagcagggtatcgtaaatgtagtaatcctcaccgtcgtccggttcgcacgaactcaggcccaaggccagcgtgcacaggaacaatatattcaaaaactttctcatctttctcatttccaattctgattaaccatatacctggaagcggtcagcatcatgatttcaccgtccagctttccggacaggtaatgctcgcgcacccatacgttctcaaagattttcacatcgcccgaaccgtagttcagtatcagtccctcgcgtgagttgtcaatccatttccaggtaaagtcatgggtatctgttttcgtattgccggtagtggttacgataaaggtctcttttccggaaaggacttccttaccgccctgtttccctttggtgaattccaggatgtgcctgcacgccccttcttccgtgtcgtactcctctacccaactgtcgctgcatagcttctcgtcgctgttttgtatcgtatagtagttatcatccccgcaagaagccagccccgcagtcattacacacaacaacagtatcttcattaagttcaaaatcttcatatatatcgagcttagttaatattttacgggcaaacttacgcaaaaataatgatatgtttaatacctggactggaatttcttatagaagataacgaataagatgaaacccgtcagcgcaaagggcacgcctgccaaagccggatagcggtatccgccgccaagagccaagccgcctacgtatgccccgatggcgttgcccaggttgaatgccatctgcacgcaagcgccgcccagcatctcacccccgggggccacgcggataatcagcacctgctccggactggacaccgcaaacaagcccgccgtacagagcgccatcaatatggcggaacaccacggatggggcgaaaggaaaaatatcagcagcagcacaatgcaaatcatgccttgcaccaccatgcccaccctgcccggagtgtatttgtcggaaagccgtccgctcaccagattgcccaccaccatgccaaagcctgccagcatcattaatgccgtgacacttccggcgctgaatcccgacacattcgtcagcaacggcgtgatgtaactataccagcagaacacgccgccattgcccaaagccgtcgcccccaatatcagccagggagcgggagtcttcaggaaacggaactgtcccttgaacccggtatctttcagtccctccaccgcaggaacccaccgccatatataataaaggactatcactccccagcaggccaccagcaagaacgtgacacgccacgagagtatatggctcagggaagtacccagcggaacgccgaacagattggcaaccgtcatgcccgctatcataatggatacggcctcggagcttctcccctcgtccgccagcttgcccgccacaatggaagcgactccgaaatacgccccgtgcggcaaacccgaaatgaaacgcgccgccagcagcgaccagtagccggtggccatcgcagcccccaggtttcctaccagcattaaagccatcaatgccagcaggatatgcttcaacggacgcttgcgcgctaaaatcaacatgggagcaccggcacatacgcccagtgcataggcggaaatgaaatgtccggcaaccggaatgccgatgttcaaatcggcggcaacatagggcaaaatacccatcatcgtaaactcggcaatgcccaatcccaacgtgccgaacgctaatgcaataagactcttcttcattcgaaaaaatacaacctgtgaaacaaactttttaccgccgcaaaagtagtgtattcttcccgcagaagttctttattttataaaaaactaactaaaaatttgtacagcataaatataagatatacttttgcgccccgaaaaagcagggcatgccttgctttttcagcattcaacaataatttaaataatcaaaaggtaaaaagaaatgaaaaaaattgtatttttcttgtttgcaaccatgctggttgcatcggtaaaggcacaggtttatgtaggcggaacggtaggcttatggcacaacgacgacctcgacgccactttcttcaaactggaaccggaagtaggctataacctgagcgagaaatgggcagtaggcggtgtgctggcatttgcacacggcaaggcagacgaaggtaaatacaacgctttcgccctcgctccctatgcacgctactcctactatgaaaataaggtagtacgcctgtttgtggacggcggcttcggcttctccacccagaaggtgaagggcttcgactctgtaaacggctttgaaataggtttcaaaccgggcatcgccattaagctgaacagcaagttcagtgcagttgccaaatgcggtttcctgggctacagagacgattacatgaccggagacaacggctacggatttgccttcaccagcgaagacctctcattcggtttccactacgagttctaatcccggacaaagcatacatcacaagggagcggccgcctcacaaacccggcggctgttcctctccggatacggttactcccgtatataatggggcatctccccgggtatctccatggatatttccaccagtccgcataccacaccctcacgcttccacgcggtctgataaatcattttcctgcccccttttttctctatcgtataggtgtttacgccacccgtctccaggagttcgcgtatcttttcctgcgatttcggactgtggcagtcaaaaagattcctgcctatcaggtttccgtgcccggcaaacgtgcggcatgccttttcgttcatataaaggatgattccctgcgtgtcgcatacggttacggcacagttcatttcatcggcccattcatacatattcattacatttatcctgttgttgagggaaacaaaagtacagattagtttctaattattcaagcattataaatacgtacacccaaattattcgtatttttgcacatcgtttataaaatatgcaatcatgaagaagttcgtaaaaggagtccggtttgctcctaaaaactattccgatgaagtagaagccaagatacagcattataaaagagaaggatacaaattgccgtcacgccatctgctgcgtacggaagagcaactggcaggcatacgcgaaagcgcaaggataaacaccgccctgctcgattacatctcggagaatatccgcgagggaatgtctacggcagagatagaccacatggtatactgctttacgacagaccacgacgccatccccgctcccttcctgtacgaaggctttccgaagagcgtatgtgtcagcatcaacgatgtggtgtgccacggcatccccagcacaaaggaattcctgcgcagcggagatattgtaaacgtagacgtgtccaccatctataaagggtatttctccgacgcatcgcgcatgtatatgattggggaagtcagccccgaaatgcaacgcctggtgcaggtgaccagggagtgccgcgacatcggcatacaggctgcacagccctgggcacggttgggcgatgtgggcgccgccattcaggagcatgccgagaagaacggctacagcgtggtgcgcgacctttgcgggcatggcgtgggtatcaagtttcacgaagagccggacgtggagcacttcggcaaacgcggcacgggcatgctgatagtaccgggcatgacgttcaccatcgagccgatgattaacatgggcagctacgaggtgttcattgacgaagccgacggctggacggtgtgcacggacgacggtctgccttccgcccagtgggaaagcatgattcttatcaccgaagacggaaacgagatactgacacaatagatgcaagacggcaggccgcaagatgttccccggcgcggtacactccgtaccaacggttggtactccttgtaccacgctttggtattgtctgtaccaaccgttggtattcttcataccaactattggtatttcccgtaccgcccgatggtattgccggtaccgcctgccgaaactttatttccttatatgcaattatgaatatcatcctattacccgccgggattatcgcaggagccgttattggctatctgacggccggcagaaaagccgctgccctgaaaacccaggtagaagccgccggagagcgtgaagccctgctgaaccgcaccgccgaagaacgcatcgcccgcgaacgctccattgccgaggaacgtttgcaggaagccgcccgccaggcttcggaacgcctggatgcacaggagcggctgtttgccgaacgcctcgccgagcaggcacgcagtttcaacgaacgccttgcccagcaggaacattccttcggcgagcgcatcgcccagcagcaacggcaatgggaacaacgcctcgccgaacagaaagaagaggccgaagccctgcacaagcgtatgaacaccgagttcgagaacctctcgaaccgcatcttccaaagcaagaccgaggatttcaccagactgaatgccgagcatctgggcaacctgctgcgcccgctcgacgagaagattaaggacttcaaggaaaaagtagagcaggtgtacagcaccgaagccaaagagcgcttctcgctgggcgaacgcatcaaggagctggtggaactgaacaaccgcctcagcgaggatgccaacaacctgacccgtgccctgaagggcgactccaagatgcagggcaactggggcgaaatgattctggaacgcctcttgcaggcatccggcctgattgagggcgagcactatttccgccaggagttcctgaaagacgagcgcggcgaagcgattgtcagcgaagagagcggacagaagatgcagcccgacatcctcatcaggtatcccgacgagcgcgagatgataatcgactccaaagtctccctcaccgcctacgccgcctacacctccgccgaagaccgcgacgagcaggcgcgctggctcaaggcgcacttgcagtccgtccgcagccacatcgacgagctcagtcggaaggactattcgcactacgatatcaaggcgccggacttcgtcatgatgttcatccccacggagggcgcatacctgctcgctatccagagcgacgccaacctctgggagtatgcctacaacaagaaggtggtactgatgagccccaccaacctcatcagcgccctgcgcctctcgctcgacctgtggaagcgggaaaaccaggtgaaaaacgtgcaggccatcatcaagcgcggcactgccctgtacgaaaagattgtaggctttaccgacaccttcctcaccctcggcgaccgcatgacaaccttgcagaaggactacgacaaagccctcaaccagctctccgaaggcaacggcagcgtagtgcgccaggctgaaatgctgaaggacatgagcctcaccccgaagaagcgcatctcggcaaggctgctgcccaaagaggagatacaggaagatgctgaacaagaagacaataaataactcttaagacaagacttgatacattatgaaaactttaaaagaccgtattctcaaagacggaaaatgctatccgggaggcatactgaaagtggataactttatcaatcaccagatggacccgatactgatgaaatccatcggcgtggagtttgtaagacgtttcgcctctaccagtatcaacaagattatcaccgttgaggccagcggcatcgctcccgccatcatggtgggctatctgctggagttgcccgtagtgtttgccaagaagaagaaaccgagcacgatggagaatatgctggttacttccgtgtattcgttcaccaagcaacgctcgtacgacgtgtgcgtcagcaaggatttcctcgcgcccggcgaccaggtgcttttcatcgacgacttccttgccaacggaaacgcagccaaaggcatcatggacctggtgaagcaggctggcgcggaactggtgggcatgggattcatcatagagaaagccttccagcatggtggtgacgagctgcgcagccagggcattcatgtagaatcgcttgccatcatcgaaagccttgacaactgtgaaatcaaaatcagataacccggagcgatggaaaaacaacagggaaacggactgatttacggcttgaacgacaagccgccttttaaggaagctttcttcgctgcgctgcaacatctgctcgccatattcgtagccatcatcaccccgccgctcatcattgcgggcgcattgaagctcgatgcggaaaccaccggctacctggtttcgatggcgctgttcgcatccggcatatccacgtttatccaatgccgcaggttcggcggactgggcacggggctgctctgcatccagggaaccagcttttcgttcataggtcccatcatctctgccggaatgctgggcgggcttcccctgattttcggttcctgcatggcggcttcaagcgtggagatgctgataagccgggtgttgaaatacacaaagaagattatcacgccgctgatatccggcatcgtagtcaccctcatcggaatgagcctgataaaggtaggaatcacagcctgcggcggcggagccacggcacaggcggacggcagcttcggcagtttccgccatgtgggccttgcggcggcggtactgctgcttatcatcgccttcaaccggagttccaaccgctacctgcgcatgagttccatcgtcatcggactggtgataggctacatcgcagcctggttcatgggcatcatcgacttctcctcgatacaaagctacggcggcttcaacctgccgatgcctttccgctacggactggacttcgacctgtccaccatcatcgccctgggacttattttcatgattaccgccatcgaggcatacggcgacatcaccgccaactcccttatctccggcgaaccggtggaaggggacaccttcgtaaagcgcgcttcgggcggtatccttgccgacggcttcaactccatgctggcgggtgcgctcaactccttccccaactccgtctttgcacagaacaacggaatgatacaactgaccggagttgccagccggtatgtgggctattacatcgcagcctttcttgtgctgctcggcctgttccctgccgtgggactggtgttttcactgatgcccgaacccgtattgggtggcgctactctgctgatgttcggtacggtggcggcggcaggcatccgcatcattgcagcgcaggaaatcaaccggaaggctacccttgtcatggctgttagtttctcgctcggcctcagtgtggagctggttcccgaaatactgtgccaactgccggaaacgctgcggaacatcttcgcatccggcattacaacgggcgggataacggctattctggcaaatctgctgattcatatcaaggagtaatattattctattttaggcacggattacacggaatttcacggatttactttgttctttattctttcggacaacattaccttcttttacatttccatgaaatccgtgttaaatctgtaaattctgtgtagttcgtaaattctgtacaatccgtactaatccgcgtaactccctaaatccgtgtaattccgcgtaatccgtgcctaaaaatcccctccccgaaacaacccacctcacttctccctctccggcagcacccaattcagcaccacataccccagcaccccggcaagcaccgtccctacaagcaccccaaatttcgcctggttcagcagttccggatattcgtccgcaaaggaaaggttggcaatgaacaacgatacggtaaacccgataccgcccagcagggagacgcccgctatattcttccagttcatccccgccggcatcagcgctacgccgctcttcaccgccagccacgtaaacaggtatatccccaggaacttgcccagcagcaagccagccgccacagcgatgctcacatctcccacgatgctgccgctaccgctgaacaccacaccggcattggcaaaggcaaacagcggcagtatcacgaagctcaccgccccgtgcaggttatcttccagcgactgcaacgggctgataacataatccgatgcccgctccacctgcttcaacgtggcaatctgcgcattggtcagcacgatattatccgacttggaaaccgggaactccccgatgatgtcgcgaatccgctcgatgtatttgcccgcatccaagcgcggacgcgccggtatcacaaacgccagtatcacgcccgaaatcgtactgtgtatgcccgattgcaggaacaggtaccagataatcacaccgaagaagaggaagaatatcttctgcgttacgccgaacttacccatatagtagaggaacacgtacaggacagccgccgcaatcaggtatccgtatgccacgtcagcgctatagaacaatgcgatgaccagtatgccgccgatgtcgtccaccacggcaaatgccgtcaggaatattttcaggctcaacggcacacgcttgcccagcaaactgagcactcccaatgaaaaggcaatgtccgtggccatcgggatagccatcccccgggtttcgggagtgccggaagcaaccgacaacgcatagatgacaaccggaaccaccatccccccgcatgccgcaataaaaggcaaagccgctttccgcacagaggacagttcccccaccagcagttcgcgctttatctccaggcccactgccagaaagaaaacggtcatcaggcagtcgttaatgaattctatcatcttcagcggatgcccgccgtgcgaaaacagattgaagttgccgatgcgcagatgcagctcctgaagcaggaaatcctggtatacgggcgacagggacgagttggcaaccacagcggccaggatagccgccagaaacaaaagcacgctcgctgctatgttcagcgacgaaatgttttttacggtacgtaggataatcataagtatttttaattgaaggattcgttcattttcggaaaaagacaaaaaagggggcagccctatcatgaaagaacaacccccgaaagatatgattggttcggcagcaaaccgctaatccagtttcagcaccgccaggaatgctttctgcggcacttccacattaccgatttgcttcattctcttcttaccccgtttctgcttctcgagcaacttgcgcttacggctcacgtcgccgccgtagcacttggccgtaacgtccttgcgtacagccttgattgtttcgcgggagataatcttggcgccgatggccgcctggatggcgatgtcgaactgctgtctcggaatcagatccttcagcttctcgcacatgcggcgtcccagctcgtatgcgttgtcaaagtgcgtcagggtggaaagggcatccaccggttcgccgttcaggagaatatccagtttcaccagcttggacggacggaagccgttggcatggtagtcgaaagaggcatatcccttggagatgcttttcagcttgtcgtagaagtcgatgacgatttcgcccagcggcatgtcatagtatatctccacgcgattgccggaaatgtattcctgcttcaccagttcgccacgcttgcccaggcagagcgtcatgatggggccgatatagtccgtggcggtaatcaccgaagcacggatataaggctcttcgatgcggtctatcagggtggggtcgggcatgctgccggggttgtgcacctcggtcatgtgtccctgcttgtcgtagatgttgtacgacacgttcggcacggtggtaatcacgttcatatcgaattcgcggtccaggcgttcctgcacaatctccatgtggagcagtcctaagaatccgcaacggaaaccgaagcccagcgccagtgacgattcgggctggaacgtcagcgaggcgtcgttcaactgcaacttctccagcgaagagcgcagatcctcgaagtcttccgcctcaatgggatatacgccggcaaagaccatcggcttcacttcctcgaagccggcaatcgcttccttgcacggacgggctatgtgcgtaatcgtgtcgcccaccttcacttccctggaagtcttgatacccgaaatgatataccccacgtcgcccgtacgcagctcctgacggggaaccatatccatcttcagcacgccgatttcgtccgcatcgtattccttgcccgtattgaagaacttcactttgtctcctttgcgaatcacgccgttcacaatcttgaagtaggcgatgatgccccggaacgagttgaatacggagtcgaaaatcagtgcctgcaaaggcgcttcctcatcgccttcgggatgcgggatgcgctcgactaccgcctcaaggatttcctccacgcccatgcccgtcttgccggaagcgcggataatctcttcgcgcttgcagccgagcagttccacgatttcatcctccacctcttcgggcatggcgcttgccatgtcgcatttgttgataacgggaataatctccaaatcgtgctcgatggccatgtaaaggttggagatggtctgcgcctgcacgccctgcgaagcatccacaatgagcagtgcgccctcgcaggcggcgatggagcgcgacacttcgtaggagaagtccacgtgtcccggagtgtcaatcaggttcaggatatacttctcgcccttgtacacatactccatctggatggcatggcttttgatggtgatacctctctccttttccaaatccatatcatccagcatctgtccttcggttacttggatggtattggtgaactccaacaggcggtcggccaaagtagatttgccatggtcgatatgggctatgatacaaaagttacgtatattctttttcattcgtttctaaagtttttggagtgcaaagatagtgtatcttggacaaagatacgaaaaggagcgcacaaaaaaaatgcgttgataacatatccaatgtatcaacgcattttttataacattccaatcactttcttagttcagcttcacaaacagttcgccttcaacttcttgagtagagattttgtcctctctcaataaccatccaagacccaggaacaaatctttatccaccaattttgtagcttttttgatttgttttgcggttaaaccttcggtttcattcagtgcgttccaaatttttcctgcgatttcaccggctttttcttttaacattttctctttgtttttagttagacatgcttgaaaatccgtttccccccatggagaagaccgattttatttcggcggcaaagatagttatttttatgttatatagcacgttaactcttatttttttccattttcagccggagaaacggcacgatttgccctatttccgctgtttttccagatactccgcccatattgccgccgcctcttccaccattttggcgcagggacgcttggcgtaatactgctccgtgcgggcttcgggggtggaagagccttcgggcttcttcagtcccaacagttcggcgcaaatcatcgagccgttgcgtttcctgaattcctccgcaagctgctgcaccagcgcatagttggcggctttgccctcacgatccttgccgtctacggcacctttctccagtcccgccagcaggaacatgccgcaggcggcgccgcacgtctgccgcatccgtccgatgccgccgccaaacgaggcggacatgcgcaacgcctgttcctgcgtaaaaccatacatatctgcaaaggcagccacgacggactgcgaacaattatagccgctcttgaacagttcaacggctttttccactctgtctttcatcgtcatatcttaatctgttaattccaacatcatggggcaatgatccgaatgtacggcatcgttcaggatacgcgcctctttcagcatcggacgcaccgcctcgcttgccatgcaatagtcgatacgccagcctttgttcttcgcccgcgagttgaatcggtagctccaccaggtgtactcccggctgtcggggtgcaacaggcggaaggtatcgatgaagccctcgttcaggaaacgggtcatccactccctttcttcgggcaggaaaccgctgttggtggcattgcgcaccgggtcgtgaatgtctatcgcctcgtggcagatgttatagtccccgcacaacaccagtttgggacgggtgcgcagcagttccaccgcatagtgccggaagtgttccagccactccatcttaaaggcctggcgctcgtcgccgctcgttcccgaagggtgatagacgctcaccacggacaggtcgccgtaatcggcacggacaaaccgcccttcgctatcgtactcctccatgcccatgccgtattccacatggtccggctcgcgtttcgtcaggatggcgactccgctataccctttcttccgggctgaatgcagataatgcctgtatcccaatgcatccaacgcctccgcaggatactgctccggctgcaatttggtttcctgcaggcacagcacgtccggctgttcctttgccagccattcgggcagccctttggacacggcggcccgcaaaccgtttacgttataggttataatcttcatttccgtatatattttttttattatccgtccggcagcaatcgttcgtcaggttgcaatcgttcgtccgcttgcaatcattcgcccggttgcaatcattcatccggcaagcggcattcattacaaactcgatatcagcagcataatattcaataccgtcacgatggcggcaatcgtatagagcacgaatgtgctccatttgctgttcacatactgccccatcactttgcgggacgaggtgaggctcacctggaggaacaccgtaaacggcaactggatgctcagtatcatctgcgaaatcagcagtcccttgaacgggtcgccgatgaaacaaatcaacagcagcgcgatgcccaacgaaaggattacccccacctgcgagtggctgtccctgatgtggtacgactcgccgaagataccggcaaagatggaacctgccgccatgccgcttgtaattgtcgaggagatgcccgccatcagcaatgccagcgcaaacaccacgccggcgctgctgcccagcaacgggtccaacagcgacttcgcctgctgcaactcctccacctgaatcccgcccttgaagaaagtggcggcggccagcagaatcatcgcactgttaatggcccatcccacaatcatggagaagagcgtgtcgaacaattcgtacttcagcaccctgcggatagaggcatcgtcctgcttgttgtactcgtggctctgtatcacctccgaatggagaaacaggttatggggcatcaccacggctccgagcacactcatgataatgagcatgcttccctgggggaacgaaggagtcacccacccctgcaccgccacaggccagtctatcctgacaaggaaaagctcgtagatgaacgaaagccctatgacggacacgaaggcaatgatggccctttcaatcttcttgtaggagttggtgaaaagcattatggacacgaagaccgtagtcagcaccgaaccccatattatggggatgtccagcaacatttgcagcgcgatggcaccgcccaatatttcggcaagggaagtggatatggaagccagcaccgccgtacccaatatagggcgcgacacccatttgggagtgtactgcgtggcggcttccgacaggcacagtcccgtcacgatgcccaggtgcgccacgttgtgttgcaggattatcagcatgacggtagagagcgtcaccacccacagcagcgagtagccgaactccgaccccgccgcaaaattcgacgcccagtttccggggtcgatgaaacctaccgtcaccagcagtcccggtccgatatatctgaacacgtccagaccacccaaatagcgtttgtggtctttccgttgcaagtctttaaaaatattcttcattattatgttgttcttgttttgaggatgtaaaagtactcaaataaaaaacaaatgcaccataagttggttcaaaatggcagacacgttgccttgccaaccaaaaaatcatcccacgagacggataaattcatcccgcaagacaaatttatccacctcgtgggatgaatatacccgtacggaaaacacggcttttcctgatttcctttccgtgaagtccgtgaagttcacaaggtctctgaaagagagggtgttgaaatacacttgacgatttcttttaggcacggattacgcggatttcacggattttgataaaaaaagaataaagaaaatccgtgaaatccgcgtaatccgtgcctaaaaaatcatcaccccctcttacatcttcaaccagagcagcagaatcaatatcccatctcgtgcaatgccttacacaactggtcgggacaggaagtgggacgcccgccgcagcggataccttccagacgtgaaatcacctctttcaccggcatcccggcaaccaggcgcgacaacccttgcagattgccgttgcatccgccccagaacgcgatgttccgcacgatgccgtcttccacctcaagctcgatattggtactgcacgtgcctttggtcttgtaagtatacgtcattactcttcgctttcttccggcttcatattggtgtacaccgtctgcacgtcgtcaaactcttccaggcgttccaccatcttgtcgatggtctcgcgatgtgcaggctccacatctttcaggtcgttggcgatgtaggtaaactcgccgcccacatcctcaaagccgccctcttccaggtgcttctggatggctgcgtagctcttcgggtcaccgtagatggtgatagtgccctcttcctcgtcctcttcatagtcttcgtcgatgtcgaaatcgatcatgtcgaggatgaattcttccatatccatgccgtctttcttcttgaaagtgaacacgcatttgtggtcgaacaggaaagccagtgagcccattgtgcccaggtttccgccaaacttgttgaacacgctgcgcacatcggccaccgtgcgggtggggttatcggtcagtgtatccacgaatacggccacaccgtgaggtccgtatccctcgtaggtcatgctcttgtagtcgctctgatccttgcccattgcattcttgatggcacgctcgatgttgtccttcggcatgttctcgcgcttgcaggtagcgataaccgaacgcagtgcagggttgttttccggttcgggtccgccggctttcaccgcaatagcaatttgtttacccagtcttgtaaaggtcttagccatgtgaccccatcttttcaatttggcagcttttctatattcaaacgctcttcccattggattgtatattttaatttgttctttaattggtttctgtctttactgccgcgtcagtttccgatacctccaatatgacgcgccgcacagcagcagccatatcagaccgctcacccctgccagggcatttctccagccctcgttctcagggaagtgccaaagcacccttactgcctggaacaagaggagcagccctatggtcaggcccgtcagacactctcttttggctctgatatggtgatccggttttatatcatacttcttcatagcgggtcagcttgtttttaccgcaacacggctcccagtcggttctgcaggttggcaatcagcttctgcatcactttgtcaatctgcttgtcgttcagtgtggcattctcgtcctgcaacaggaaacttacggcatacgatttcttgccggcttccaggttcttgccttcatagacgtcgaagagggagacttctttcagcagcttcttctccgtttcgtaggcaatcttctcgatttcggcaaactgcaccttcttgtcaatcagcaaagcgaggtcgcgcttcacggccgggaatttggagatttcggtatagtttaccttcacgttcctgatggccttcatcagctctttccagttcaggtcggcatagtacacctcgttgtcgatgtcgaacgctttcaggagcttcctcgtcaccacgccgaacgtggcaaggcgcttgcccccccttgtctgcacggacagggcagcggcgtaaatatcgtccgtaaggttgcccactaccaggtcgtgcatctgcaagcccagacgggcaaatatgttttctacatacgctttcagctcgtacaccgaactgtcctcgtcctgatgcgcccatgagttggacactctcttgccggtaatccacaggcccaggtgatagtcttcggaataaggagcgagcgccttttcggggttacgcttctcttcgttgaagtaatagcagttgccgaattcaaagaatttcaaatcggcattcttgcggttggcattgtgcgcgatgctctccagtccgccgaaaagcagcgtctggcgcatggcgttcaggtcggcgctgagcgggttcatcagcatcacgaggttcttggcgggataagattccagtccgtcgtaataggcggcgcgtgtcagcgagttgttcaggatttcgttgaaaccgcagcccaccagttgctcggcaaccaggttctgcagacggttggacttgtcgcactcgcccttcgttgtcaggctggacttcaaggctgtgggaatctccacattattatatccgtaaatacggaggatgtcctctatcacatcgcagtcgcgctgcacatccacgcggtatggcggcacgtcgagcgtcagaccctcttccgtttcgcctacaatcttcatctccaggctcgtcacgatgctttttatcgtctctgccggaatctccttgcctatcagcgcgtgtaccttcccgtaagagagttccacccggaagtcgcgggcgggagcggcgcatacatccttgatgtcggaagagatggtgccgccagcaagttccttcaccatcagtgccgccagtttcaggcagtaaagggtggcgttggggtctacgcctctttcaaagcggaaggaagcatccgtattcaggccatgacggcgggcggtcttacgcacccaggtggggtgaaaataagcgctttcgaggaagacgtccttcgtggtttcggtggagcctgaatccagtccgccgaacactccggcgatgcacatgggctcttcccggttgcaaatcatcaggtcgcgtccgttgagtttgcgttccacgccgtccagggtggtgaagggagtgccttcgggcagggtctttacaatgacctcgccgcccttaatcctgtccgcatcgaagcagtggagcggctggccgaatgcgtggacgatgtagttcgtgatgtccaccacattattaatagggcgcaggccgatgatgcgtagcttgttctgcaaccattcggggctttcctttacggtgacgcctttcacggtgacgccggcatagtgcgggcaggcttcgctgttctctaccgtcacccggatgtcgaggtcgtggttatcgacggcaaaagcctctacagagggtttcttcaaggcggcgggcttgccgttctgcaccaggtaggcgtacaggtcgcgcgccacgccgtagtgcgagcaggcatcggcgcggttgggcgtgatgtccacttccagcacgtagtcgctcttgatgttgtaatagtccttggcaagcgtgcccggcactgctgtttcgggcagtacgatgatgcccgcatggtctgtgccgatgcctatttcgtcttcggcacaaatcatgccgttggactctacgccgcggagtttggatttcttgattgtgaagcattcatcaccgtcataaagttttgtacccaaagtggctaccaccactttctgtccggctgccacgttggctgcgccgcatactatctgcacaggttctccctgtcccaggtttacggtagtgatgtgcatgtggtccgagttgggatggggctcgcacgtcagcacttcgccgatgaccaggccttccagtccgcctttaacggtttgcacctcttccacgcttcccgtttccagtcctatggaagtgagcgcggcggctacttcatccggtgtcaggtcgaaatccacatactctttcaaccagttataagagatattcatatcattatttttttattgtttccaaaagtgacccgcaaagttaataagattttcctgtagaaagggaaaaattttaggaaatcttcgagagtatatacgcttttacctgttgccatgactgatttacaaacatatccggcatagggtctgcctctgcatcgtcaaaataggccaagcttttcattgccatgaaaacagaggagtcgttgtatttggctgcatagaaatgcaggatttcctctaatgaaaagtgatgcagcaagaaagcgatatctataaaatccttctttgtacccctgcctatgattgcagtaatcttcatagctgcaatatcgcttacactcgccaggcgaagcccctgctccaggacaacatcatcaagccaagggtatttataatttacaatatcaaccttgattccatctactatatagatgtgtatatggggagattccttcaaaatggtcagcgaagctattcccgctattgactcccgcaaatattcagcctcacaatctaccgtgccgaaaaaatccaaatcaatagatttgcgatgccccaattgcaaagcgagcgcagtgccccctaccaaccttgtttgctcaagcaccggcaaccgttgcagttttttcaggagttccagggttgaggattcaactgtttccaggtatagcatctgaactgttctttaggggtttttgaaatagcggcaatgtatgccagcgcgcggggttccaagctcctcaatccctttgcggtctctacgattttgggcaatccgtagtatgacttaatgagattccagtcgcccagcaaaccatattccagcactctctgtatcacatattgcgcatgtgcgtcgaggtcgatatcctctttgcgcacatcccagaacagatgcggagagaattgttccatatattcatttgcagacatagcctttacttcttttatttacaaaggtagcattctttttccgaaaatcaaccgattaatcatttataaaaagcccgcggttcaaagtttatccactatccggtgcgcccgtctccgcagcaattcaaactcttcatcgtccaggatggctttcatcgccttataccagcgtatgagcacgctgattttcacatccccccttttaaaagggtctgaatggtggtattactcatgccggcatggtcggcaatcattttcaaagacacgccggatgccttcaacagatagcggagctcttcacctatcataagatagggatattgcccgtcctcattttttacactcattttagtattaattttatttaaaacacaagggaaatatttaggtttattaagtttcgtacatacatgtgtgtacggtcatctgttttataatcacgaactttgaagggtatccctgaaagattcgggaattgcgatgcaaaattaacaaattaataatcagcaccaaaaaaacaagtaaacaaatgaatgaattcaaaatgtccctgttcctcgcccccatttcgccggtgaaggacggcggcacagggcaaatcatcaaacctgccaccctgaaaccctacaaaaccatgaccctgcaggaagtgtaccggacgataaccgccaacacacgcctgcaactgctcaccgaccgcgtgcgccgggcattcgacagcggcgacctatccgcctaccgcgccctcaaacaggagcttctgccctacgtcaccccctgcggcacgttcgcccgccggcgcagcgacagccttctcgaagcatcgggactcgtagtggtggacatcgaccacctcgactccgctgacgaagccgcccggctgcgccgccaactgtttgaagacccgtttctaaggccggagctggtcttcatcagcccctgcggacagggtgtaaaagccttcgtaccctacacccccgaccccgccctgccggatgtgcgccagaatgccgccgaaagcatccgatgggccatggactacgtgcagtgcgtgtatgccgacggcaaccgcaactccgccaaaggcgtggatacttccggcaaggacctcgtgcgggcctgcttcctgagctacgaccccggtgcgctcatagctacccggaataatctttctccggaaaataatccgctacaaaaccagtaattcataactcataatttataacagataaattatagtgcataattcgtaactcataacagataactcataacacataattcgtaactcataacagataactcataacacataattcgtaactcataacaaataactcataacacataattcataacttataacagataattcatagcacataattcataacttataactcataatttataaccccatgaccaatatcctatccgatttgcgccgcctcacggaagcggttcacgcagcgggcgccgacatcgcgcccacctacagagagtatgtacaactggcattcgccatagccaccgactgcggcgaagccggacgcagcgatttcctgatgctgtgcagcctctctgccaaatacgatgtgcacgcggcaaacaagctcttcagcaacgccctgaaaacaaacaacaacagcgtccacataggcaccgccttccacctggccgaactgtgcaacgtgcgcccccgccccgcagagaagccgcggcaggacgctcccgcgggtacacttggtacgccgggtgcaccgtatcccgccgcctcacacacgcatgcgcacggttattataataaggcagagatgcctgcggaagaatttccggaagcgcccgaagccagtcttcccgccgaagcagcaaactccggaacaacctaccccgggacaacctaccccgaagcagcagaccccgaagcagccgacgaggagacctgccggggcagcgaacccctcaccccgctgccctgcttcgacaaccggacgctctggcccgcaccgctgaacgaaattaccgcccacggcaccacccgcgcccaacaggacatcatgctgctgggcgccgtcaccgtgctgggcgccagcatgaacagccacgtgcgctgcgcctacggcggcaagatgatatcgcccagcctgcaaacgttcatcgtggccctgcctgcctcgggcaagggcgtgctctccctcgtccgcctgctggtggagcctatccacgacgagatacgcctgcacacggcagaagccatgaaacagtaccgcaaggagaagggcgcctacgactcgctgggcaaggagcgctcgcaggccaccccgcccgcactgccgcccgaccgcatgttcctcatctcgggcaacaacaccggcacgggcatcctgcagaacatcatggactccgaaggcatcggcctgatatgcgagagcgaagccgacaccatctccaccgccatcggctcggaacacggccactggagcgacaccatgcgcaaggccttcgaccacgaccgcctctcctacaaccgccgcaccgaccgcgaataccgcgaagtgaagcgcagctacctctccgtcctgctctcgggcactcccgcccaggtgaaaccgctcatccccaccgccgaaaacggcctgttctcgcgccagctcttctactacatgcccgccatccacaagtggcagaaccagttcgaccggcaggataccgacctcgaaaccgtattcaccggcctgggcatgcagtggcgcgagcaactgaaacgcatcaccgccggcggcctcttcaccctgcgcctcacccccgaacagaaggagctgttcaacaacctcttcgccaacctcttcatccgctcccaccttgccaacggcagcgaaatggcgagcagcgtagcccgccttgccatcaacatctgccgcatcatgcaggtagtggccatgctccgcgtactcgaatcggacgacatcgcccgctcgccccacctcacccccgacaaggacatctccggcgacaacctcaaggacggcatcatcacccgctgggacatgaccatcctccccgccgacttcaactccgtgctggagcttaccgaaagcctctaccgccacgccacgcacatcctctccttcctgcccggaaccgaaatcagccgccggagcaacgccgaccgcgacgccctgctgcaaagcatggaaagggagtttacccgctccgccttcctgatgcaggccgaagcaacgggcattaaacccggaacggcatccacatggctcaaacgcctggtgaagcatgggatgatagagagcgtggacggaaaggggacataccggaaacctctcccaaacgggatgtgacagtttttttgtctgtggttgttttgacatgttttctgtatatatactacacgtgcgtgtgtgcgaagccggcgacgggggtgattgttgtgtaccaattgtgacatttggaacggagggaaggtagagacagaagaataaaagaataaaagaataaaagaataaaagaacaaaagaataaaaggaaaagggcaaaaggactccgggaaaaatgttcgtgaacttcttcctgatgtttggaagttggagaagtctaatacgaatacaattggagtttaaatatttatgttgaagaaacaaggagggtgtgtcaaaactaacattcgcttgctatttgtttctttttaggcacggattacacggaaaacacagattttctttgtttttttccgtgaaatccgcgaaatccgtgcctaaaagaaatcatcaaatgtattttgacacactctcttttctatttatgaaaaagacaatgtgtactttatcggatacttacgataaaagaacagaagaatggaaaagggaggtgtttcggataagagggtctttggggcaagaaaggattccggacaagaaaggatttcggtcaagaaaggacttcagtcaagaaagatggaaggtaaggtggtgttgccggaaacgaccggtaacattactgaagataaaaaagaatgaaagattgcttcatgttttcccgggggctactccggcagcgtagcgtagaactttagcgttgcagagtagaactttggcggcgtaaagtagaactttagcaacgtggagtagccctttggcaacgcaaagcatccttgagtggacagagggggattcaggctatgaaaagcggtctttttcggttgtagatgcgggtggaatgtgccgggctgccggggggaggtcagttctcgcccggttctcccaacgccccgacaatcagccctacctgtgcgggcgtgtatgtcctcgattttggcgaaagtcctgaggcaagcagttcttcccgcaggttcggatagaggtctatccattggttcagtttacggaaagccgcttgcgggcacaactccggacagtaaagctgtgcaagttccgtgcgtccgaatgtgcgtattttaaaattcgtcataatccctgattctttggttcttacagagcaaagatacggaaatatctccacacttccgcatctctatccgtatataacaacctacaacagaccataacgtaccgaaagtgacaaaccctcttcccgcgcatcgtatcttcgtaacgtgatcacaaagagagttgaaaacaagaattaaaaacccaaaaacttaaagattatgattcgttacaagaagtatcaaatgaccggtgaaaaccaccccctgaaaggcttatggtatgcccgtcccctgattgaggacacgttcgacaccgagaagctcgccaagcacatgtcaaaccacaacacgccctactcggccggcttaatcaaaggcgtgcttaccgacatgatagcctgcaccaaagagcttatcctggacgggaagaacgtgaaactggacgacctcgccattttctccgtaggcatcgtcagccgtaaaggcgctgcctctgccgacgccttcaccctggcggacaacgtaaagggcctgaagctccgcgcccgcgccacgggtgagctgagcaatgcccaaatcaacctggaaggccaactgaaagaagcgtccaagtacagcccggacaacagcggcgcgggtggcagcacccccggcggcggcaacggcgaagaggagaatccgttaggataacagaagcaacagattatcaacattatcaacattaacaccagaagaacatgagcacaaaatcaaaatccgtatggggcattgtcctcaaaaccatcgtagcagtagccactgccctggcaggggtattcggtttcagttccttcacaggccgatgagaatcatcacgcttgccatcattcactgctcggccacgccccagggcgtgcgcctgagctttgacgactgccgccgcgagcacatccgccgcggcttcagcgacatcggctaccacttctacatcacgcgcaacggagagattcaccgcggccgcccgctggagaaaatcggcgcccattgccaaaaccacaaccggcactccataggcatctgctacgaaggcggcctggacatccgcggcacacccgccgacacccgcacaccggcacaacgggcatcgttagtggcactgctgcgcgaactgaaacggatttttccgaaaattctggtagtgggacatcatgacctgaatccgatgaaggaatgcccttgctttaatgcggtggcggaatatggggggctgcccaaactgaaatgagtgctccgaaaagattgtagctataacaatatgaaagggtcgtatcaaactccgtttggggagtgatgatacgaccctttcttgaatattttttgagtctttcttgaatattttttgaatctatttcacctctcctcaaaaactacttccatcccattctcccggccaacaaaccatacacttccccgttcggaatcatctgccccttttcacgggccgtttgcgtatattttatggcgtccacaagaatatcatcattcaaatagcctgcatcttccgccaccgtagagtatttcattgccattggttcggctacataatcttccgatacttcttgttttttataggatttcgcttcactcatggctctgtgtatttttcgcaaagatacggttattactcagataaacaatcttatacgtttttcttttctatttcttttgcgacaaagcatccagacattctttgtttctcagtattctttttttatcaaatatccatccccacttattaaaatatttgattacagagcagaggtgatatttaagtaatttacgattcttgtatgagcctttttcatattcatggtatacagccaccataggatagaacattgttttagacacctctcctattctgcggcacaaatccaagtcctccgcatacataaaaaagcgctcatcaaaaccatttacctttttcaggacatcgactctcataaacataaagcaaccggataatgaaggtacttccattactttatcatatcccgtaaaatgcaattcatatctatccgcacttctttcctgatatttccttataggaataaaacgccttccaaacaagtccataggagtaggcagcaatttacacaggtattggatgctgccatcgggataaagaatccggggcatcactaaaccgcaatcggagtttaaatccataaaatgtgacaaagcctctataacggaatcattccagtaaatatccggattcaacaccgcatgataagtcgctcccttttccacagcctttcttatgcctatgttatgcccgcttccatacccaaggttttcactatgtatatatactattttctccgacacatctttcaactcccgcaaactgtcattagaagagttgtctatgatataaagaatttcaatggcagaacgaacagcgcaattaataacacgaagcagttcgtgtgccgctgtatgataaacgacaatagatgcagtaatcataaatagaattttgttattttttctcaacagatgcagagcctgtattcagcaccctgttatacaaagccatatagttttcggccatttttccacgtaccagataatgcaaatagtaagcatacactttctccgaaaggacatccgcccgcttgtctgcacagacaagcgcatcgcataacgaatcaatattgcctaaccggaaaaagcaggaacactcttccggaatgatgctcttgaacactggtatatccgaacatacaaccggcaatttggcagcggcagcctcaatgaaagccaacggatatccttccgtgtggctgcacaaggcatacacatcgaaatatttcatataccgtccgccttcttttctgtttccgagccataaacaccgtccgtccaccccattttgccgtgcctgctgctgcaactcactcaggtgcggaccgtctcctaccagtatcagtgcatatcggggcagtttcttcaaggcatcgattaattgcgcatatccttttcttttggttatataagccactcctccgattatccgatacttctgcttcaggttcattatggcttgcctgtcgctgtcttctatatcagtatcgcaattaacgtcacgtccattgtaaataacctcgacattgcgcaagccacatttctgatagtatgccttatgatactcgctgagagttaccaaaacatcaaaccgccgcagaaaaagcagccaagtatgaatgacgaaagaggcctttgccgccggaaaatcaaacggcatctgctctgcaatatgttgatgcaaggttgtgataaatttagtacggcattttctcagtatcggcttatggaaaaaaacataagcatccgaacggtacatgtgcgagtgtacaatatcaaaggcattccaatcaatcggtctccaaaatgaaatccgctttgaggaacaaggcaattccacttccacaatatcatcaaaataaaaaacggaacactcatgtcccattttcttatattcaatacataaatctcttgcaaccaatatcggacctttattggcaagagaagggagaatcatggctatcttcatgaaaaataaaatctttataacactgataatcaaatgaaaatatctttcatttccttggctgtatattctatactaaaatgagctttttctatttcttccttatgagttctacgttcatagggcaatagctgtaaaatataatcagcccaagaatccgcccccgactgtaatggtaaaaaatgaagtaattctgttttttttgcctcttccggcacaccgtccgaagcaatacatagcaaaccggcacattgggcttcgatagaaaccaatgataatccctcatgcaaagaaggaattaataaaacatctgccccctgaaggagaaaattcacgtcgtttctaaaccctaaaaaagaaacattatccgataaagatagcactttgcacttatactccaacccacttcttaaatcgccctctcctacaaccagtaaatgcacattgctacatttattatgtattttattaaaaacatcaagagcaaatgactgattttttacttcgcacaaacggcccataagcaaaaaaactatcttggaaccaagatttaattctgcacggcacttcattctgtctgcatcagcatatccgaatttatcagcatcaatgccattatttattattttaatatcatttcttttatctccatacatccagatagctgcttgtttagaacaggcgcataaacaagaagcagcttttaaatattttttctgacaataataatgtagcatgagaatcagaaaatctttcaatccaccctgtttttcaaaagcgacagtgtgagaatgaattacaataggagcagtggaatatttacggagtactttaaaaagagtaatgttactcaagctggaaagatttaaccaaacataatcgaagttttcgtgctttaagaactccgacatttcctttctgaaattaaaaggattctttccccatgccgtcatacttacaatgcaaatattactcgaatggaatttatcactatacgagcattctcctttcggtaaaattatcgtaaagttatagtaatcaggcattctattgattattgacaatacgatgctctctacacctccaaaaatattggagagtccataaaccaatattctcttcttactcataagtatcagattctacagtttgcccattcttaacccaatgaaacagtaatccgtacaacaaaatcaaaaacaagtttacatcggcaagtcctttaaaattcaggaccaaaacatataaaaatattataaaaagaagtcttttaaataatggggaagaataagttgcaagtgtcttttttataatcatgtaaggataaataaaaaaacacaaagccaccggtattccaccataaaacagcaatcgtaaatatcccacatcagtttccatataataatggtctttcaaattgaaaaggccatcacctatcaaataggtctttaaagatgtgggatatacatacatctccttaagtctatcggtagaagcagaactcaagccggcatcagaaccatagttaataaacatttcaaacgcccacattacgactttcgcatctaaatacaagaaaataaaagatactcccgataataaaatcaagcacaccaaaagcatccatcgcattttcctctttatccaataagggttcttccacttccaggctaataaatagaaaagactgaacaaaaagcctattaacgtagtacgggctatcaatatacctattactaatataaacacgtacaagatagtaaagcaccatagcctacggacccttttattgagaaagagataagccatcaatataagggctaatccattgataattccggctccaaaaaagttagagccccagccctgaagcctcatcccataagtggagtctaccatttcatcctccaactcgtttaaccggataatggaatacatgaaatcgtgaagtgcagggaacaaaaacatcaataaagccaataatgactgaatccccaccacataaacaaaacactttaaaaaatcggataaatcaaagtttttcttttttctgccaaacacgtaaaccatggcatggcttgcaaaaaaaatagcaatctgggaaaatgcataaaacacaaaagtaaaatcaaaagtcagattcaaaatacccgacccgacagaacatagtgctacaggcaccaatccccaccatacagaaaataatctcttatctataaatcgctggcatataaataaaaagacaccgcccaacgcatataatatacgggtggacagaggcaaacctataaaaataataggataaatataaaaaaataatattagcaaattcattttcagctgtctgcttgtaatcgtctttttacattcttacaagtaatcaaaggagactgcaataaataaaacaatgctcgtatccgtacactaaaagaattacgtgaagattttacacaacacaggtaagcaagattttgatagagcagtgctgcttgctttaatgagcaggtatcaaaaatctttttatccatattctccatcataatttcatccgtagccttttttatagaaagcaagtctttttccgaagttctctcattccaatttgataataaaaacctcaaattataccagtaggcatctctacttaaaaagaaatccggatgttcttttaacagttccgaaagcttacctgacttttgggatgtatgagttattgttacattagtaccatgaattctatatttcaacaatatttccggaatatttgccaatcgtttacttttaactatcctaatccagtattcaaggtcttcaacaggcattatatccttatatcctccgacggactgatataccgtacggcgaaacattaccgtaggatgcgcaaaacaactgttgaataataacattaccttcaagtcatcatgcaaaagaggataaatgattttaccgatatgttttccttccgaatctatcttttcacaccatgttccgcagatatcggtctctttatttttctccagatagtcaacttgcttttcaatccttttgggcaatgcaatatcatcagcgtccatccgggcaatgtattcgcctgtagaatattcaagcccccggtttaagctacttgcaatcttcatatttctagaattatgaagcacttttactctggcatctctcgaagccagctcttccaatattgctaaggtactgtctgtggaacaatcatcaatacatattatttccaagttgggatatgactgatttattatagattccactgattcacgcagatacttttctgcattatagcatggaataatgacagaaaccaatttttcgtacatgatagttatatattacgataaataaaagcaatgccttctttctcttccaaagagtaatattttatattagaagcttcagactcgctgaagttcggatccggctgcataaaagtactgccataatgagcactcaaatatttatccgtttcagcaggaacattatacagactgtctttgaaaagcatttgtctaaatcccgtataagggaatctcacctcgcatactccgcatttattaggataattaagtttgctgattcctattatagaagtaaaaaaatgacctaatgtaaaatttccttccaattcataaaaaaataaatcaatagatactcctttgtatgcaaaacaatactcaactctgcgctcatcgttttttatctggaaacaacgtattaattcaaagccgtttttcaacatggcttttttggcaatctccgcatctttcagccacaacccgatatccagatcaaagtcatgcttaatgaaatcgtgttctctatatgccccaagtaatgtaccataatctaaccaaaatagcacattctcactatccagtgcattttttgctttttgtaaaacttcatttccacaagataaaaaacatctttttcttctccgaaaacaaatagcatcgtacttcttcaatataaatcgtcccaaactgcctatcaaaggaacttttcttaaaaaataaaaatattctatcatccttctattatatatttatacagattattcatctgttctttttatcctccattatcgttttagcatagataaaatttcgtgcaatgcttcaaaatgcagccaataggaaatgaacagatagcaactgctgcctattaaaatccccgccaataattgcaatgccggatgtgtgataaagccaatagaaataaaaactacacctcccatgaacagtgcaagcaaaagagacggataaatatccttaacctgctccataaagctcagccctatcagtgactttgtataataagaattcaaataagcagcaatcaatgagtataaaacacgtccccagcacattccttctattccgaaaggaatagaggcaaaaagtataagagttgctatagttttttttatgatttccatacgtaaagcccaatcggaacgcccctttacatataaaaggtttaaatttatgatgcttaaatgatcaaacatccaatcaaagcacagtatttgaagtaatactgctgccatcatccatttctctgtcaataataataaaacaagtggctgggccacagcggcaagccctaccattaacggaaaaatcagataggaagctaattttatatatttccgataagcagatgccaaacgtacattatcatcttggatattgctcagtatcggaaaagtcacacgagatattattgcatttatattactggaaggaagaatagcaaattgctctgcacgtgtatagtatcctaattcagcagatgaatatttacgacctataaccaatgaatataaattgtaatataaagcgtgaataagccttgaaaataacagttttgatccaaaagaaaaaagtctctgaaacgattcttttgaaaagactttcaatggacgccaattaatataataaaaaaacaacaatacagtcaaggaagcattcaacaaagactgaataacaagagcccatactcccaatcccttataggccattgttatacctacaatacccgaaataatagcagatattaaagatatcttggactgacttttaaaatctatccttatcgtcaatatcgttttaggaacagcggcaaaagaagaaaatatcaaattcagcatgataacccgagtaaccaatgttagttcgggcatccggtaaaactgagctatataaggagcaccaataaacaataaaatataaagcagtacagatattataatattgaaataaaaaacagttgataaatccgtttctgttctgtctttcttctgaaccaaagcatcagaaaagccactgtctataaaagtttgcgatatctgaagaaaaacagcaagcatcccaatcatcccataatcagaaggcaaaagaaggcgtgccatcaaaatatttatgataaactgcactccctgcaaagagaaacgctcgatagcactccataaaactccggaaacagttttactttttaggctctccgacataataaatcaaatccaatatattcttccctatagaaatactccataatacctatatactttccctttctcagcagtctaattctttcaatcttgacaacagcttattattatccgcttcattgcgaatcgctattcggatgtaattaccgttattaaacgcttgtttggtagaacaatcttttattagaatatttgaactatacaataataaacgagtcaacgctgtcgatgaatactttgcaataacctcacacaaaaaataattagcctgagaaggaattacccgaagaaacgatatagatgaaagttctttatagaaacgagtgcgctcagactggaaacgttcgcaagcttttctataatccgactcgtatttgccataaatctgcatatagaactctgcaaaagaattgatattccaaatagagacttcttttcttattctgtctataacttggcgattggaagatgccaatattcccaaacgcaagcctggtacgccataagacttggaaatactcttcaaaactatcaaatgcggataactgtctaagatactgtcaagcaataaagaactatccaatcctccttctgcaaaatcaacaaaagactcgtctacaatcaaagtaatacctttatgccctgcccaatctgccaatttcaatacatcatcacgtgaaataaagttgccggaagggttgtccggatttatcagcaataatgcagatagggacttatcggaaaaatagttctgtaagtcggaaacagaataagagaaagctgtattgtcgggcacatatgaaataatatgctggttgggataccgattgggatattcttcaaaagtaggatatatcacgcccaaattcccttccaaaaattccatcaacacttttatcaactcagcagctccgttgcctacacatacataatccctgtttaaattgaaatatttgcttatcagcaaattattaaccgacatacctgaagggtattcggtgagtaaggtcgcaaaattagatttcatctcttctaccatccgttgaggtggaaaataaggattgaccaaatagcagaaatccaataaagtaggaaaacgccaataacctccatagcgcttttgataaagcgaaagaccctcctctgcaaaaagagtctctgctatatccaaatcctgcacatcatctatttcataccacttttctccttgtaatggaagagctttcaaatcgcatttgtcaagtagagttatgacacgcaacacttgttcataatattcattattacccaatgctgtaatgtatgcttccaaaaacggaatataattgctggcaataaatttcttatcaaacttataaatatttactgtcttataataataagctatatcattataattaaaagctttctttggtacaaaatttacaatattatcatcctcatccaaacgcaccattgttccgtccatccaagtttcatatttggctactaatgctaaattcggataagaattatctacaattttatgaaaaagagcatcatcgaatatcaaatctgattctatcaacaaagtatcgtcttctacaaaatactctttcgccaaatataatgaatagatattattggttttgttatatacagtattatatacatactgaatatgcaaatcaggataacggtttccaatatattcgcgtaatttatcacctttatatcctaccactatcactacacgagataactgtaatgatgaaagctgaattaagagtctatcaatcagggttacgccatttaccttaatcatacattttgtattatctttagtaagagcccccaaacgcttgcccattccggcagctaaaataattgcttgcatattttttatataagtataatcttagattgtctttgctgtaaaagatttgcgcttatggcaccaatagtgacataaaacgaaacttacaaaccaatgtcgtttaacaataaaattgaaataaaaaaactgatgaaataaaaaacaaggactgtcttggcatcttattaatgcttccgatagtccgaaaggattcaaatacaaatacaaagccgctatcaatgcttcatcatcgtagcataaattgtcacaatataaactgttgtttttgaaaagcgatagacaatgcgatatttaggatgaaccaaaatgctgtaatacttcgtctttaccgtactgcgtctcttctccaaaacccctatacggggagaatgagacaggagcataaccgttcttctgacatcttcagagaaattcatggcagctttagcacccatattgcaagaataccacgtagcaatcctgtcaaactgactctgagaatgcttgtgccactttactttcaaattctccatttcgcaaacatggcagctacttcttcgtcggtagcaaagccgcttgcttcagacaatctgatttcttcatccaattcttcttcggtgaaacggcagggcatttcgtcctcgctcagcaattccaagcaacgctgcagtttctcttcatcaacagcagtgtcaagagattctataatcctattcttcaatccttgaagattaggagtgttatatgctaccaacggttccgacgcctctgttctcatgatgtatctctattctaacgtgttaacgcaaagaacgggattttattcgtaacaaacaaatcttttacttcctatctctcaaataatcccaccacagattcaatcctacccaaatcacaatatcggcaatcagcagcaccgtattgtttatataaggaaccaacaggatattggccgcactgaaagcgcaggacatggagagcagactcagcatcgcccttctcggcgacagccctatcgccagcagtttatgatggatatggttcttgtccggctcgaaagggctgtgtccctcgcggatgcggaccaggacgacacgcaccacatcgaacgccggaataatcatggtgctgaaagcgatgagaaaggcgccttcggtgtaaggcatgatatccgtgttgtgctggctgtactttatggcaaggaaactgagggtatagcccaaggtaaggcttcccgtatcgcccatgaaaatcttgcgggcacgctccacactgccgaacacgttgtaatagaagaacggcacaagcacgccgaaagtaccggccgaaagcatggcataactccacagacccttgctgatgaacaggaaggtgaaaaccagcaatgccacactgctcaagcctgaggcaagaccgtcgatgccgtctatcaggttgatggcgttggtgatgaagaccaccgtaagcacagtgaaaggtatgccgacataagccgaaagctcgtgtatgccgaacaggccgtacaaatcgtttatccaaagtcccgacaaggggaaaaggcaggcacagaagatttggatggcaaacttctggcggtagcgcacgccgacaaggtcgtcggcaatgcccgtcagatagagcagcgtcatgccgcaggcaaacagcaaaagctccggaagcagatagctggcatagagcgtggaaatgctgtcgccgtccagcaggcggaaagcatagacaaggcagaaagcaaacagggtggtggggaaaaatgatacgccccccaaccgcgggatagctctcttatgtatcttacgatcatccggtatgtcaaaaagttttttgcgcagggatatcaataggatacgcggtatcaggatacgggcaataacagccgatatcagaaaggtaagaataataaaaatgaagttcacggcaataactgttgtttagtaattagcggttgatagctgaaaaacataaacgcttactgacagggagagagaggaaaattgtcaggcagaatcaatctataatctcgaaagggtattgattctcttccatattcttcaactcgccgatgatttctttctgctccggcgtcaaagaagccatatcccaggtattgataatggagtgggcctcagcggcaagtttttcttcgtatacctcgctgtagcagtaagttagaagacgcactttcagaagcgaatccggaagcttgtcgagaacattcaggcaacggtcgagcaggcgctggatatactgctgcttgcggccattgtcgtagaatgtggcattcagggctacgagaatggagaggcaaagttcggcttcctcttccggcgtgttgccttccaaggtgttgtacaaatcaagcgcttgctcgtaaacttcgcgattcagacgggcaaagtgatcgctgtaaatgggactgccgtccatgcccagattcaagagttcatgggcacggacgtacaaagatgaaacgtgttcgttcatttttatactgataaataaattattgaattacaagtgtttcagattacacctatcggttctataagcgaagagtgaataaatgtagtggctactgccatgacgccttctatgtttaccaccacacggcggtcgtggcgcagacggacaaattcgcccacggctccttcaaaaactccgcccgtgatgcgtactttggttcctttcaccagtttcagttcttccggctccacgtagatgacggcctcgtcgtacgtgcctgcaaccagtatgaagctgcgcatctgcgcatccggaataataaccggctgatgggtctcacggttcatgatatagcgtaccggtatgttcagaaccggattgttttttatttcatcgatacgggaacgggtggaacggagaaataccaggttgtgtatggcgggaacgagcttgcggacgcggcgttcgttccttatgacatactcgtagcgcatggggatgaaattctctatattttccttgtcgagatagtccttcaaggacaattcgcggctgtatgttacgcggacggcataccagtgcaactggcaatccttgtgggactgacacacaggggcgtgctgcaattctgcttgattattgtctgacggaccgggcattacaaaatacggattgtaagagtttgaggaaaataccaccttgtgaaaaggacattctttggggacaccggttcaagagcactctttccggtcaattcatgtaatgcaattatagtcaatagtttagtctgcatccatattatcccaaagctccccactatcacagaaagagaacgttgaaacagttatgtgatcaataagcctttgggaagccgcaaacggatgaaacagatacatttccggacattcccgattaatgaatgcaaagatatggcagttttttgtattggcaaaacatttggtggaaattcttcggtttaccgcctgccttcaagcatgcctttcagttcaaggcaaagccgctgtttcacttcgtctgccggcacttcccgtcccagctccttttgaagtgaagtcacccctttgtctatgaacccgcaaggatggatatagctgaaatagcgtaaatccgtattgacattgagcgccaggccatgcatcgttacataatggctgctgcgcacaccgatagcgcagattttacgggcacgcggcgaatctccgtccagccatacgccggtggctttctccacacgtccggcggttatcccgtaggaagcgcatacgcggattacggcttcttccagcagatgcacatactctttcaatcccagagagaactcctccaggttcaggataggatagcacacaagctgccccggcccatgataagtgatgtcgccaccccggtctatgtgatagagcgaagcgcctatggcacgcaactgctcttcgcccagcagcatattggtttccttaccgctgcgtcccaatgtatatacatgcggatgttcgcagagtacgatacggttcacatactcctctcctgcctgcttggcatgcacaagcgcatcgaaacacgccgtctgcctgtcccacgcctcggcgtagggaacggttttccaatcagatatttccagtttcataagacaaacatactattttaccgtccaaccgcacgtggcatgattggagcacatgcccggagcttcatccggtctatgcaaagatacgaaatcccggaattatacaagcatcccgggcgcaggcttttttcataatctgaccatcgtcaaggcacggagattatttttcggacgaaagcatgcattacctcccccttattttataattttgttgccacattatatatataatataaattgaagagcatgaagaaaatcattgtagcaccggactcgttcaaaggctccctgacttcggccgaagtggccgatgccgtggaaagaggaatcaaggatgttttcccgcagtgcaatgttgtcaaagccggtgtggcggacgggggcgagggaaccgtagaggccattgtcaaagcggtgggaggagatatgtacgcagcctccgttacagaccccttgggcagaccggtaaaggcagcctacggcattgtaaggtcaggcggcgtgaaaaccgccgttatggaaatgtctgccgccagcggactgccgctcctgcttcccgacgaactgaacccgtggattacttctacgtacggaaccggcgagatgatttctgacgcgctgaacaggggatgccgcaaattcctggtcggaataggcggcagcgccaccaacgatgcgggcacgggcatgctctccgcattgggagtgagatttctcgacagccgcggacaaaggctgaaaggctgcggcagggatttggaatccattgcccggatagacatgtcgtctctgatgcccgcagcacgggagtccgaatttatcgtggcttgcgatgtcaacacccccttttgcggaccggacggagctgcccgtgtctttgctccccagaaaggagcggaccctcaaaccgcggaagccctggaccgcggcatgcgttccttcgcccgggtgatagccgaacagttccaaaccgacatagtccccctgagcggagccggtgcagccggcggattaggcggcgccttcaaagcctttttaaatgccaggctgaccgcagggattgaaatggtgctcgacgccattgcattcgactcgcttctcgaaggagcggacctcgtcatcacgggcgagggacggatagacgcccagacagcagcgggaaagacagcagcaggagtgctgaggcatgccgcacggaaaggaatccccgtcatcgccataggcggatccgtggcaatgtgccgggagcttaaagagatgggatttatcggcatatattccatcataaacgctccggtgagccttgaacaagccatgcggcaggattgggccacagcccgcatccgatgcacggtagagcaaatcctgaccaccatgaaacattgcgccgggacattgttgtttcaaaaaggcggagattgaaaaataaaagtgtaactttgcacagaccaaaaacgacaacgcttatggaatttccacacgtcgacctccccgtagacctgattgcatggacagatgtcacggaagacatcctgaacatctacaagcaatcgtgccggctgaaggcatgtatcttcgccttgtgcaccgaaggttccatcacggtatccatcaatcttatagataccgaaatcaagcaaggcgacttcatcatactgcttccgggcaccatcatccagtttcacgggcagaaggagaaagtgcgcatctgctttgccggattttccgaacattgcctcaacggagtcaacatcatccagtccaccatgagctcgtactccaagattatagaagctcccgtgataccgctcaacgaaaccctcgcttcctatttccgggattacttcgcattgcttgcccgcatatccaccgggccgtacatgcccaagacgcgaatggcgcagaacgtgctggacaccctgctttatggtgtcaacgagctatacagcaaccgtcccgactcccaaaacaggattaaaagccggaaagaggaaatctgccgtgagttcatacaactggtcatcgagaactacaccaccgaacgccgcgcgcagttctatgccgcgaagctgggcatatcgctgcaacacctcagcaccaccatcaagcaggtgaccgggaagaatgtgctggacctcattgcgcatgtcgtcatcatcgacataaaagccaagctgaaatccacggacatgaccatccaggagatagcctattcgctgaacttccccagcgcctcgttcttcggcaagtatttcaagcggcacttgggaatgagcccgctggaatacagaaacagctaaccccctaccccttcaccggcatgatgcaggagagcgctatgaccgttacagccagtatgggcgtcaacagtattccgtacaccggatagagaatgcccgcagctaccagcacgcctgccagatgaaaggccattgtccggaaaaagttacggcgcattagccggagcgtatggcgggacaggccgaagagccgggggagcgactgcaaatcggcggatttcatcactatcatagccttgtccgccagcccatcaccggcacttgcacccgcggcaatacttacatcggcggcagccagcgcctgtgcgtcgttgacgccgtcgcccaccataaccaccttcttcccctgcaagcggagttcgcggataaaggcctccttatcctccggctgggcgtcggacatgtaacggatgatgcccagcttccccgctatggccgaagcggtacgctcaccatcgcccgtcagcatacagatgtccagcccctgccccctcagctctttgactacaccggaagcggtcgctttcagtctgtccttgacggctattatggcaagcagctcatcctcacgcccgaagtaaacgatgctgtttccctccgattcatactccaccagcatatctcccagcacatcggaaagataagcccgatagtctttcagcagcttatggctgcccacccaatattccgtaccgttgcagagggatttcacccccttgcctttcagcaccccgcagccgtccagcggtgcgggagttatgcgttcttcgcgcagggcggcggtaatggctgctgccagcgggtcgggcgagttcatttccgtagccagcaatatccgcttgaaatcctcttcctgatactgcgcccacagccaggcggtgaccgtaggctgcccctcggtcagcgtgccggtcttgtcaaagaccactacatcggccttgtccagccgctccagcgccagggagtcctttatccggatgtgcatatcggcagcccggcctatgccgcgcgtcagggcaagcggagcgaccagtcccagcgcacacgggcaggcgacgataaaaacggagacgaccgcatagaacgcatgcggcacagcggtcataccgccccagaatatccagataaaaaacacggcaaccgccgttcccgccaggacgggaaagaaaatccgggctatgcggtctgcaccgtgccgctcttcgggcaggaagcggaacaccttgccggtgagccccaccgctacaaccagcaccgccacttcgtagtagacatacgggtgaagccccaccctgagccaatagtccggaaagaacgtgttgaacaggctgaaaaggaaagcaacggaagcgccgaaggcaatcagcgtatccagcccgatgcgccccgcacaaagctgcttccgggcggccgcatagaaagcgtttcccggaaacagcagcacaagggcagccagcgacatctgtatttcgttgacatagggcacctcaccgccgaagacggaaagcagcgacagcaatacggcaagcgcccacgcggcggcggccttcatcttcaggcagcggtaccggctgttccgttcttccatctcacgttgttccatactaccggcatgttccgcgccgtgcagtttctgcgcagaacatacgttcttcaatatattgttcattctatataaactttagggggttgttactctaaacttagtaaacaaccggaatggagcgtttgttcaattcctccttcccctccggcctgcgtgcaagctgtggcgcgcattgcggaacggaaatatccgtcttgtgaggcgcacgggcggggattgccggagataggaagttttaaccgcctgccgggattatttttttcctttttatgcgtggagttcactaataagttctatatttgtcgataaagtttcctgaatgaaatgttgttttataaacgaaatccaatatgaaaaaacaaactgtcagcctacttgtccttctgcttgcggcaagcggctttttcttttcctgtggtaacaccatgaacaaaaacgccggagcgctggagttcgacagcatacaagtgaacgaaaccgcccatctcttcggtgataccgccaagccggcatgcaaccttatcatcaaccttgcgtatgcttcccaatcttcggacgggaagatgaaggacagcctgaacacctatttcctctccgcctgcttcggcgagaagtacatgggcatgactcccgaagaagccgtaaagaagtacaccgaaaagtacgtgggcgactaccgcaaagacctggaaccgatgtaccgcaaagacgagcaggataaggagaatgccggagagataggggcatggtactcctactataaaggcatcgaaagccatgtgcaactgtacaccgggcatctgctcgtttaccgcatcgactacaacgaatacaccggcggcgcacacggcatctatatgtccaccttcctcaacttcgacctgcgcacactcgctcccatccgcctggacgacctgtttgccggcgactacaaggagcagctcaccgacctcctttggaaccagcttatggcggacaacaaagtagccacccgccaggaactggaagatatgggatacgtcaccaccggcgacctcacgcctaccgagaacttctacctgggcaaggacggcatcacattctactacaatgtctacgacatcgccccctacgtaatgggccccgtaaagataacactaccgtacgaaatgatgcagcacctgctgagcgacgaaacaatggcgctgaacgacgtgcgcaacccataacccataacttttataactcataacacaacaatggaacttatcctgaaatactttcccgacctgacagaggagcagaaaaggcagttcgccgccctctacgacctctatacggactggaactccaaaataaacgtcatctcgcgtaaagacattgaaaacctgtacgagcaccacgtgctccactccctgggcatagccaaggtaatccgcttcaagccgggtacgaaagtcatggacttaggcacggggggcggctttccgggcatcccgctggcgatactctttcccgaagtgcagtttcacctggtggacagcatcggcaagaaagtgcgcgtggccaccgagatagccggcagcatcggactgaaaaacgtaaccacccgccacgcacgcgccgaagaggaaaagcaactgttcgacttcgtggtgagccgtgccgtaatgccccttaccgacttgctgaaaataatccgcaagaacatctcgcccaaacagcagaacgcactgcccaacggactcatctgcctcaaaggcggagagctggagaaagagacgatgcccgtgaagaacaaaaccacgatgtggaacctcaaggaattcttcggggaagagttcttcgagaccaaaaaggtggtgtacgtggcaaactgaacgagcactccggaaagctaatgtggcactttagaaagctgaagtggcactctggaaagctaatgtagcactttagaaaccgtaacaaacaacctatcgaattaaacgcctatatatacgccatgaagataaagagatttgaatttaacatgttcccggaaaactgctacgtgctgtgggacgaaaccctggaagccgtagttatcgatcccggctgtttctacgaagaagagaaacaggctttaaagaactttatcatcagcaacgggctgcaagtgaagcacctgctgaacacgcacctgcacctggaccacatcttcggcaaccccttcatgctgaaagaattcggactgaaagcggaagccaaccaggcggatgagttctggattgacgaagcacccaagcaaagccgcatgttcggttttcagttgccggaaccgcccgtaccgctgggcacttacctgcacgacggagacatcatcaccttcggccatacggagctggaagccatccacgtgccgggacactcgccgggcagcctggtgtactactgcgcggcagagcactgcatgttctccggcgacgtactgttccagggcagcatcggccgtgccgaccttgccggcggcaacttcgacgaactgatagaacatatatgcagccgcctgttcatactgcccagcgaaacggttgtctatccggggcacggagcccccacaaccatcggcaccgaaaaggcggagaacccgttcttcaggtaagcctcccccccgttctccggataaaaaagcccgccgcaggcagcgcaggacaccggtccgcccgtagcagacgcaagtaccggcccgccccctgcggcgaaaacaataaacttctaaatcattaccgttatgaaaaacgacctattggctaaccgccacatcggcatcagcaaaaaggacgaagagcagatgctccgcaaaatcggagtgagcagcctggacgagctgattgataaaaccatccccgcgaatatccgtctcaaagaaccgctggcactgcccgaagccatgaccgaatacgagttcggacagcacatcgcggcgctggcagccaaaaacaaactctacaccacttacatcggcatggggtggtacaacaccgtgacgcctgccgtaatccagcgcaacgtgttcgagaaccccgtctggtacacctcctatacgccctaccagaccgaagtgtcgcaaggacgcctggaggccctgctgaacttccagaccgccgtatgcgacctcaccggcatgccccttgccaactgctccctgctggacgaggcaaccgccgccgccgaagccgtgacgatgatgtacgccctgcgcccgcgcgatatgcagaagtcgggagccaacgtagtgtttgtggacgaaagcgtattcccgcagacacttgccgttgtcaccacccgcgccatcccgcagggcatccaaatacgcacgggcaagtacgacgaaacggaactcacgcccgacacctttgcctgcatagtgcagtatccgaatgccggcggaaacatagaagactaccgcgcattcgtggagaaagcgcacgccgcaggctgcaaagtggcggttgccgccgatatactgagcctcgccctgctcaccccgccgggagaatggggagcggacatcgtattcggaaccacccagcgactgggtacgccgatgttctacggcggcccgtcggcagcttatttcgccacacgcgacgagtacaagcgcaacatgccgggacgcatcatcggctggtccaaagacaaatacggaaaactgtgctaccgcatggcgctgcaaacccgcgaacagcacatcaaacgcgagaaggccacttccaacatctgtaccgcacaggcattgctggccacgatggcaggcttctatgccgtataccacgggccggaaggcatccgcaccatcgccggacgcatccacagcatcgccgcattcctggaacaggaaatcaataaattaggatacaggcagatgaacgcccaatacttcgacacgctccgcttcgccctgcccgacaatgtatcggcacagcaagtgcgcaccgttgccctgagcaaggaggtgaacctgcgctacttcaagaacggtgacgtgggcatgagcattgacgaaaccaccgacctcgccgcagtaaacgtactgctctccattttcggcatcgccgccggaaaggactataccaaagccgccgacatccccgaaagctgcaccattgcggaagcgttccgccgtcagagcgcgtacctgacgcacgaggtgttcaacaaataccacacggaaacggagatgatgcgctacatcaagcggttggaccgcaaggacatctcactggcgcactccatgatttcgctcggctcgtgcaccatgaagctgaacgccgccgcggagatgctgcccctcagccgtccggaattcatgggcatgcacccgctcgttcccgaagaccaggcggaaggctaccgcgagcttatacacaacctcagcgaggaactgaaagtgataaccggatttgccggcgtaagcctgcaacccaattccggcgctgccggagagtatgcggggctgcgcgtaatccgcgcctatcaggagagcatcgggcagggacaccgcaacaaggtgctgatacccgcttcggcgcacggcaccaatccggcttccgccgtccaggccggtttcaccaccgttacctgcgcctgcgacgaacagggcaacgttgacatggccgacctccgcgccaaagccgaagagaacaaggacagccttgccgcgctgatgattacctacccctccacccacggcatctttgaaacggaaatcgtggaaatctgccagattatccatgcctgcggcgcgcaggtgtatatggacggcgccaacatgaatgcacaggtggggctgaccaaccccggatttatcggcgccgatgtatgccacctgaacctgcacaagacattcgcgtctcctcacggcggcggcggaccgggcgtaggccctatctgcgtggcagagcatctggttccgttcctgccgggacacggactgttcggcaatgccgccaatgaagtagcggcagcacccttcggcagcgcgggcatcctgcccatcacctacggctacatccgcatgatgggtgcggaagggctggcacgcgccacccaaacggccatcctgaacgccaactacctggctgcatgcttcaaggatacctacggcatcgtttatcgcggggcaaacggctttgtcggccacgaaatgatactggagtgccgcaaggtgcacgaggaaacgggcatcagcgaaaacgacatcgccaagcgactgatggactacggctatcatgcgcctaccctctccttccccgttcacggcacgctgatgatagaacccacggagagcgaaagccttgccgaactggataacttcgtacacgtaatgctcgccatctggcaggagattcaggaagtgaagaacggcgaagcggacaagaacgacaatgtgctggtaaatgccccgcatcccgaatatgaagtggtggccgatacatgggagcacagctatacccggcagaaagccgcctatccgatagaaagcgtacgcgacaacaaattctgggtgaacgtggcacgggtggacaatacgttgggcgaccgcaaactgctgcctacgtgctacgggtgcttcgaatagggtagtgaaatatacccgatgatttttttaggcacggattacacggatttacttgattttttctgtttctgcgaactctgtgtaattcgtgtaatctgtgtaatccatgaaacctgtggaatccgtgtaatccgtgcctgaaaaaaatacataccatttgtttctttgtttatatatcctcccctgcttttatgccacaaataaatctatgagtaccactcacaaaagaaaaagaaacggtctcttctacagcagaggcgaagaaacggtcaacagcctgtctcacggcataggcatctcgatggcggtcattatcgggggattcttcctgatgaaatgctaccgggcacaagacccgtgggcgatactcggcatgtggctctacctgttcggtatgggcggctcctacctgtcctccaccctttaccactccctgaagcaccataacccgtggaaacggcggttgcgccattgggaccacgcggctatctactggcacattgccggaagtttctctcccgttacgctgattgccttgcgcgatgaggggctatggggctggggactgttctgctttgtctggttgtgcgccgttgcgggcactatcatcagcttccgcaaaatgaaagaacacagctatgtggaaacggtgtgctacatccttatggggctgtccgtgctggtggtgttcaaacagctttttgccgttgcgcccgtatcctgctattggattatcgccgaaggggtatgctatataggcggtgcggcgttgtattccatacgcagcgtgcgctatatgcactcggcttttcatttcttcgtactggcagggtcgggctgccaccttgttgccgtatggtacatcctggcggggatataaacaggctctccgcctatacatgatacatgcaccgtcagcggattacggttaccgtgcctgccgccagcttcttctctttcacgggagcgtccgcaggggcatagcccaaggcggcacagccgtacacacggtgattttcgggaatgccgaggcgggtgaggaaagcacgcacgtcggggtcgtcgcaggtctgccccaattggttaatccagcaagagccgatgcccaaagacttggcggcaaggaaaatattctgcaaggcacatgcgcagtccataggcgcccaccagcgggtaggctcgttggagacgatgaccagcgtcggagcatggtaataacaacaataggtttcgctatgtccgcgctcctgcaaatgagggtcgtcgctcttggcaaaagcgccttttatcttttcattcagttcggtcagcacggcagcattctggatggcggtgaaatgccacgtctggaagttcatgccgctgggggcatacgctgccgcttccagtataaggttcaaatctccggcggaaacctgccgttccgtataagtacgcacgctgcggcgcgacttgatgttttccaatacttcgttgctcattgtcaggatatatgtttttttatgtaaggagagttaatgcgttaagtttcagtctgccgttccgcctatacggcgctaaacagacggtcagcgcttcaccaatcctatctttacgttcagtttaaagtaatacacaccgttctcccgctccaggaagccgtatttgtccttatctaccgaacccttctcgaaacgggtgttccggtaaaggaagtcggcaaaggtctgccggtcggacttatggtagcaaagcaccccgccgtctccattggtcagcagcatgccttccacggcagagtccgtaccgttgtaaatctttgccggacgcatgcccgttgcaagcgccagcaggaactgtttcatcttgaattcgtagaagcggtgcttgtttatcagttcatccttgattttcaggggattcatctccttaatgcgttccgtcagttcggcaacacgggtaatgccgtccagatgcatgatacgcaccatctcggccagcatacgggggaagtggaggtctatcatcagcaggttgcagcggaacacacggtcggcaacgtcggaatacttcaacacgccgcccaaacgctcaatcatcatcatgcgttcggcaacttccataggcgattcgggcaaggcgttcaccttgtttaccgtgggcacggcaaacttcacgccgctctgctccagcttcagattggccgtgcgcccgccgtccagcaaaggattcatgcggctgagacgacaacggacggtgaagcccgtgagcggagcgtccgcactccagaaagctacggagaagtcggtacggtcatcggttctggactccaagtcgtagatgttcacagcatccagaaaggcttccagcccttcggaaacttccacctcctcgccttgctcatttctgagcagatggagtatgatttccgccgcatcgccaaagtccgcacggggaaacgaaagcggctcttttcctgccgatgcggtaaacgtaccgtccttctccaccgtaccgctgacaatgcgcacatcctcttccccgatataatagcggcgcgtgccgtcatgttcctctctctgtatcagcgccacaggccaatacttcctatcatctctctgcgcgtccggcgttcccggaaagacttttccgtccgccagcagacggaagaaggtatacagttcgcccagctcgcgcttggttgcttcaaatgccatatcaactcgattttgattaaa

SEQ ID NO: 4104 - DNA, 63360 bp, Unknown
  gut microbiota DNA sequence
tacttgctcaaagcagtagcaacgtctacagcacaagccactgtacatcctaccatcgggttgttaccgatacccaggaagcccatcatttccacgtgagcaggaactgatgaagaaccagcgaattgagcgtctgagtgcatacgacccatagtgtccgtcatgccgtaagaagcaggaccggcagccatgttatccgggtgaagcgtacgacctgtaccgccaccggatgctactgagaaatagggcttacctgcaagaacgcgttctttcttgtaagtacctgcaacagggtgctggaaacgggtcgggttggtagagttacctgtgatggatacgtctacgccttctttccacatgatagccacaccttcgcgaacatcgtcagcaccgtagcattttactttggcacgaggaccatcgctgtatgcgatttcacgaacaactttcagttcacctgtatagtagtcgaattgagtctgaacatatgtaaagccgttgatacgggagatgatttgtgcagcatccttgcccaaaccgttcaggatacaacgcaaaggttctttacgtactttgtcagctttagctgcgattttgattgcaccttctgcagcagcgaatgattcgtgacctgccaagaaagcaaaacacttagtctcttcgcggagcaacatggcagccagattaccgtgaccgatacctaccttgcggtcgtcggctacagaacccggaatacaaaatgcctgcaaaccgataccgattgcttcggcagcatctgcagcgttcttgcagcctttcttgatagcgatggcacaacctacaacataagcccattttgcgttctcaaagcagataggctgagtctcttcacacgtcttataaggatcgagtccggcagcttcgcagatggcgttagcttcctctatgtctttgatgccgttggcgttcaaggcttcgatgatacctttgatacgacggtcttgactttcaaattttacttctctaatcatagtttctttcctccttatattattcgtgacgtggatcaatgtgtttaacagctccctgttctgcagtgaagcgtccgtaagtaccggttactttcttcaaagcttcgttggcatcagtacctttcttgatttcatccatgaatttacccatgtgaacgaattcgtatccgcagatttcatcgtttttgtcaagagcaatagtcttgatataaccttctgccatttccaggtaacggggaccttttgccaaagtaccgtatagagtacctacctggctgcgcaatcccttacctaagtcttccagaccggcaccgataatcaaaccgccttcagagaaagcagactgagtacgaccgtaaacgatttgcaggaagagttcgcgcattgctgtattgatagcgtcgcaaacgaggtcggtgttcaatgcttcgaggattgtcttgcccggaaggatttcagcagccatagcagccgagtgagtcataccggagcagccgattgtttcaaccaatgcttcttggatgacaccttctttaacgttcaaagtcagtttacaagcaccttgctgaggagcacaccaacctacaccatgtgtcagacctgaaatatcaactatttcttttgattttacccatttgccttcttcgggtatgggagccggtccgtggttaggacctttctttacaacacacatgtgttccacttcgtgtgaataagtcataattagctcttttttaagttataatttaaaaaacgtagttctatgttttattaaacggtcacaaaggtagtcgttttcttgctttctgccaaccgttcaatttgacttttttattaaaaataggtaataataagttgtaactctgtggaatgtaaagtagactttgcagtttttgtattaactttgcagcgttaattcaatatacatactattatggtagaagttactgatgcggctttgcaacaagctgcgggcgagggaatggatgctttcatccaagtatttacagatgcatataaaagagtgataggcggcgaacttactgccgatacgatgccgttgcttaccggagaacagcattcgttgctggcgtatcagatattccgcgacgaactcatggaaggtggcttctgccaattggtacaaaacggatatggtggctatatctttgccaatccgtttgccaaagtaatgcgtttgtggggagtgggcgatttaagcaaattggtgtatgccgccaaaaagatatatgatgtccatcgtaaagatttggaacgtgagcgtactgatgacgaatttatggcaatgtacgagcagtatgaggcttttgatgagttggaagatgagtttctggagaaagaagaggagtatacggctttggttgcaagctatgtagatgaacatttagagtcgtttgcgaaaataataaagtaacagttgcagtattttttaagtttctgcatttaccttatgtgaattgaattttatatctttgcaaactctaaaaaataatgtttatgaaacaattgaaattcttaatggttgcctttaccttattaatgggcgtttcttttacttcgtgtcttaatgatgatgccggcgaaagcatgtatgatggaataggatatgtacgcactgtaatggggagttattttgttgatttatatggcaatacatatcatccgacaatggcttccgttacagaaatggaagctcagggctttaaaatgtcgggtactgatttagctcagattgcttttaaatatgtggaagatactccggcaactaaagctgagggtagtacttttactccgcaggattatcgtataaagttagtcagtgcaattgctgtggattcttattctaccaaacatgtaagttctgtggaaaatatggagatggaggctataccagaaactgctcctattgtgactttggagccgacagacaattacggacagacttataagccttggatgtatggtgctgaaatgctcgtgttgcctatttcttggaaaatggagaataaggaggaaatgttgaaacagcatacaatggaattggtgtatataaatgatgaatctaatgaaagcagtacagaacttgtcttttatttgagacataacaaaggaactgataccaagacagatgtttttgctgttagaaacaaagcttacgatgtaaaacaaatcatgtcggattttaaaggaaagcacggcagctatcctacaacgataagaattaaagcaaaaaccgatatggatggtgctaaattgcctgagaagtatacagattatacaattgaaaattttaaatggaatccttcaaatcaataataattaattgaattacaaagaactgttccatatagcaatgcaactgatttcctctccggcacgtgcctgggaggaaattagtttagaggataggcgaaaagtctttacagcttttgtctatcctatgattggtttatgcgggttgtccgtctttataggctctttggtggctaagggatggggtgggccgcaaagttttcaatatgccatgacgcaatgttgtgcggtggcggtatccttgttcgggggatattttttggcagcctatctcatcaatgggctacgtgtccgtatgtttgctatggacaatgatatacctttggtgcaacagtttgccggctatgcgttggtagtgtctttcatgctgaaaatcataatcggcatattgcccgatttcagtataatagccctgttgcttcaattttatattgtatatgtggtgtgggaaggaagtgctattctgatgaaaatagcggaaaaagaccgtttaaggtttaccattctttcttccatgttgttaatagcttgtccggcagtgatagaattcgttttcaataagctgacggtagtgctgaactgattgattttatgaaacaagctcctataaatattaagaataaacgtgccacattcgattacgaattggtagatacctatacggcaggcattgtgctcaccggtacggaaattaaatctatccgtttgggaaaggcaagtctggtagatacgttttgctacttcgccaatggcgagctatgggtgaagaatatgcatattgccgaatatttttacggttcgtacaataatcataatgcacgtcgggagcgcaaactgctgttgacaaagaaagaactggacaagttgcaacgtggttctaaagaccccggctttaccataattcctgttcgtatgttcatcaatgaaaaagggctggcaaaggtagtcgtagctcttgcaaagggtaagaagcaatacgacaagcgcgaggctttgaaagaaaaagatgacaaacgcgatatggcgcgtgcattcaaacgataagcagtacgtatagtaagtataaggtctgaagtataagcaggtgtaatatttatatcttgataattttatcggttgtattttaacttcatacctcgtatttaatacttcatacctcatactttaaaaagaatacctcatactttatacttaaataaaagtggcttctattgaaacgttggtgcgtgagcgcattcttattctggacggtgctatgggcactatgatacaacaatacaatttgacggaggaggacttccggggtaaacgttttgcgcaaattcccggacagttaaaaggtaataatgatatactttgtctgacgcgtccggatgtaatatgggatattcaccgtaagtatcttgcggcgggtgcggacattatcgaaaccaatacttttaattctacaagcgtcagcatggccgattatcacgtacaggagtatgtgcgtgagataaattttgctgctgtaaaactggcgcgtgaagttgccgatgaatttactgctttaactcccgataaaccgcgttttgtggcaggctctatcgggcctaccaataagacttgctccatgagtccggatgttaacaatccggcttttcgtgcattgacttatgatgaattggctgctgcttatcgcgagcagatggaagcgatgctcgaagccggtgtggatgcgttgctgattgaaaccatatttgatacgttgaatgctaaggctgcgatatatgctgcggagcaggcgatggaagctataggtgtccgggttccgctgatgctttccgtaacggtttccgatataggcggacgtactttgtcaggacagacgctggaagcatttctggcttctgtgcaacatgcggatattttctctgtcgggcttaactgttctttcggagcccgtcaattgaaaccctttcttgaacagttggctgctcgtgctccttattatatcagtgcctatcccaatgcgggattgcctaacagtctgggtacatacgaccagactccggctgaaatggcagatgagatcagggagtacattcatgaagggctggtaaatataataggcggttgttgtggcactaccgatgaatatattgctgcatattcgtctttgatagtaggagctgtgccacgtataccggcttctctgcccgataatctttggctctccggtttggaactgttggaggtaaagcctgaaaacaactttatcaatgtgggcgaacgttgcaacgttgccggttcacgtaagtttctgcgtttaatcaatgagaaaaaatatgatgaagcgctaagtatcgcccggcagcaagtagaagacggagcgcagattatcgacataaatatggacgacggtttgctggatgcggaaaaggaaatgaccacttttctcaatctgatagcatccgagccggagatagcccgtgttcctgtaatgatagattcttctaaatgggatgtgatagttgcagggttaaaatgtatgcaaggaaagtccattgtcaactccatatctttgaaagagggcgaagaaaagtttcttgaacatgcccgtactataaagcgatacggtgctgccgcagtcgtaatggcttttgatgaacagggacaggcggatacgtacgaacgcagaattgaggtgtgcgaacgcgcttatcgtctgttggtagacagggtcggtttcaatccgcaagatataatttttgacccgaatgtacttgcagtggctacgggtatggacgagcataataactatgcagtcgattttatccgtgctaccggttggatacggaagaacctgcccggcgctcatgtcagcggtggagtcagtaatctttcattttcctttcggggtaataattatattcgtgaagcaatgcatgcggtctttctttatcatgccattcgcgaggggatggatatgggtatcgtaaaccctgccacttccgtactttacaccgatatacccgccgatattctggaacgtatcgaagatgttgttctcaatcgtcgttcggatgctgccgagcggttgattgagactgccgaacggttgaaagccgaggcggaagcggccaagaattctctctctaacggtaactcccagctttcaagcctcagttctcagcttgcctggcgtgaagataccgtagaggaacgtttgaagtatgctttgacaaaaggcatcggagattatctggaagaagacctcgctgaagctttgaaagtttatcccaaagctgtagatatcattgaaggtccgctgatggccggaatgaaccatgttggcgatttgttcggtgcgggtaagatgttccttccgcaagtggtgaaaacggcacgtactatgaagaaagcggtggctgttcttcagcctgtcattgaatcagaaaagcaggaaggggctgcctctgccggcaaggtgttgcttgctacggtgaaaggtgatgtgcacgacattgggaaaaatattgtttccgtagtaatggcttgcaacggatatgagataattgacttgggagtaatggttcccgctgaaacgattgtgcagcgggccatagaggaaaaggtaaacatgattgggttgagtggccttatcactccttcgctggatgaaatggtacatgttgccattgaattggaaaaggcgggactcgatgtaccactgttgataggtggcgctaccacttctcctttgcacacggcattaaagattgctccggtttatcatgctccggttattcacctgaaagacgcctcgcagaatgcaacggtggcagcccgtttgatgaatcctaaccaaaaggaagagttcgtgaagaagctttctaacaagtatcagcagttgcgcgagaaaaatcaggagaaacaagttgaaacggtatctcttgaagaggcaaaggctaatcggctgaatttgttttgaggttttcactgtcgtattgcagatataagaacaagagaacagaaaaatatgcagcaaaaagtatacattgcaacatactctattctcttgtccttatgtctgaaaacgctgtaatttttatgtcctatcccgtgaatcagctttttatctttttcttatactgttcaaaccttgccgttatatccctcacgaagttataagtttctatcccacggaaatacccgttcttgcaaaccggatcggtaaagtactcttcattgctcttcaagaggatgaagttttccacgttatcccgccacacatatttgtttttgccgtatttttcagccaatgccatagcatcgaatacatgtcctataccggagttatatgatgccagaataaaattaatccgttcttcttggggaattttcgagaagcttttggctgtggcggcaatatatttcgtggcagctttaatgctttcttcggggttttgttcttttcccggaggaactcccatggcacgagctgtggcaggcatcagttgcatcagtccttttgcacctgcccatgaaacggcggtagtatcaaagttggattcagtataagctaaagatgccaataaacgccagtcccaattaatgtctggtgcatatttcttgaatagatggtcgaagtgtgatattttcccttctcgcagagatagaataggagagtgtgggatagctttgccaatttcaaaataccgcttcatactcgcggtataagccggagaagtcatgtttttctcatgccatttattggcagcttctgcaagctgcggacaatctttacgtacagcccacgaagcccgttggtcgaaactgatagaaagcccgatgttgaggttcgggtagtaggtggtattgaggcgggctacatcattgtccgctacggtatacggtattttgccttgtgaaacttgcataataaggtcttcaatcgtgatgctgtcattgctgaccttatggatatggatgccgccacccagctccttgtccaggttgacaagccgttcataatactttccgggttttacgtacacatcctttccgataagttccgttacatctttcaacggtttgacgcggccgcctgtacgttgtacgatgacctgatgggtaatcacctcctcaccgcagtatgtcagactgtctttccattctttggtgatgggcaggttgtaggcaatgagatcgccttcgcctgcaagaagtctttcaatcaggtcgtgtatgtttttggcaacttttatttttaacttgacgccgaggcttttggcaaactgttcacccaattcatattgaaatcccatgtcctggccgcggtaaataaaataggatgtagaactgtataaagtcagcactaccagttctccgttatcttttatctgttgtaaatcaacagcttcttcttgttcggctgctgcattatgattgccgcgacaccccataacactgcaaagcaagactaatgcaatcagtaattgacagtggaaagctggcaaattgcgcccggttggggaagtacgctcggccatatgtactgttcgaattatttataaatgttttttgatatacattgtgagaatatcgattgctacctgattgtttccgccttccggtacgataagatcggcatatcgcttgcaaggctctataaattgcagatgcataggtttcagaatacgcgtgtagcgttccattacagcctcggccgtgcggccacgctctacgacatcgcgctggatgacgcggataaggcgttcgtccgggtctgcgtcaacaaagattctgaggtccatcatgttgcgcagcttcttgtcacatagggcaaggatgccttcaatgataatgacttcccgaggctcgatgtggattgtttcgggctgtcgcgtgcaggtcaggtaggaataggtaggttgttcgatgcttttgccttcgcgaagcatggatacgtgtttggacaaaagtccccagtcgaaagcatccgggtggtcgaaattaatattctgccgttcttctactggcacatggctgctgtctttgtaataagagtcctgaggtaataaaactacttcaccagccggcaggctttcaacaattttacgtacgacggtggtctttcccgacccggttccgcctgcaattcctattattaacatccgtttaagtatatatttgaaaaaaacgagtatttttgtgtcttaaaaatgttattgtttcgattgacaaatatagattaaatcatttaaataacaaagttatggtaaagcatattgtattatttaagctgaaagacgaagcttctgctgacgaaaagttagcggcgatgaatgattttaagaaagctattgaagcgctacctgctaaaataccagttatacgtaagattgaagtgggattgaacattaatccggctgagacttggagtatagctctttacagtgagttcgatactttggacgatgtgaaattctatgctgcacatcccgatcatgtagctgccggtaagcttatagccgaggttaaggaaagccgtgcttgtgtagactatgaagtataaataaaatatgggataataacatgaagaaaagtatattctccatacttctgttgctgtttgccgtagtggtacaagcacagatacaagagccggttaagtttaagtcggaattaaagactttgcaggctggtgaagcggaagttgtctttaccggaactattgataagggctggcatgtgtactcgaccgatttgggcgatggcggacctatatcggccacattcaatgtcgagtttatttcaggtgcggaacttgtcggaaaattaaaaccggtagggaaagaggtggccgcattcgataagttgtttgaaatgaaagtgcgctattttgaaaataccgctcagttcgtacagaagttgaaactgaccggtggcgaatataaggtagaaggttttttggaatatggcgcatgtaatgatgagaattgtttaccgcctacacaagtgccgtttaagttttcgggcaaggcggaaggtacaaccgttaatggaccggcagccgataaggctgcggatgccggaaatgtagaattggaaaaatcttctgataccgctcaaaccgcagctatggccgttattggcggtgcggaaagcaataccggaataaatgttgccggtgatggaaccaccgatctttggaagccggttatcgatgaactgcaagcattaggcgaaaccgtttcacaggaagatatgtcttggatttatatttttatcacaggatttgtaggtggactgctggctttgtttacgccttgcgtatggccaattatccctatgactgtcagcttcttcctgaaacgcagtaaagataagaagaaaggtatccgcgatgcctggacatacggtgcgtctattgtagtgatatatgttggtttagggctgttggttaccgggatatttggcgccaatgctttgaactcattgtcgacgaatgctgtttttaacatcttcttctttttgatgctggtcgttttcgcagcttctttctttggggcttttgaaattacgcttccttccaaatggagtaatgccgtggattcaaaagcagaaaaaacaggcggtttgctgagcatattcttaatggcatttacattgtcattggtgtcattctcatgtacaggtcctattatcggtttcttgttggtacaagtgtccactaccggtaacatgatagctccggctattggcatgttgggctttgccattgccttggcactgccgttcactttgtttgcattgttcccgtcctggctgaagtcaatgcccaaatcaggcggttggatgaatgtaatcaaggtaacgcttggattcctggaattggcgtttgcgttgaaattcctttccgttgctgacttggcttacggttggcgcatactcgaccgtgagacattcctggctttatggattgtgctgtttgccctgcttggattctatctgttgggcaaagtcaagttcccgcacgatgatgatgacacaaaagtcagtgtaccccgtttcttcatggcattggcctcattggcgtttgccgtatatatgcttcccggtttgtggggagcgccgttgaaagctgtcagcgcttttgcgccgcccatgcagactcaggatttcaatctttacaataatgaggtgcatgccaagttcgatgattacgacctcggtatggagtatgcccgccagcatggcaagccggtgatgcttgactttaccggttacggttgtgtgaactgccgtaagatggaacttgccgtatggaccgaccctaaagttagcgatattattaataatgactatgtactcattacactttatgtagataacaaaactccgctttcttcaccggtgaagattatggagaatggtacggaacgtactttgcgtacggtgggcgataagtggagttatttgcagcgtgtaaagttcggtgcaaatgcgcagcctttctatgtgttgattgacaatgaaggcaaaccgctcaataagtcatattcgtatgatgagagtattccgaagtacattgagttcttgcagaccggattggagaactacaaaaaagagaaatgataaattaaattggaaaaaggatgctgtataagcgtccttttttcataatccgttttttatttatgaaacacattatcgacattgacacttgggaacgtcgtgacaattacggctttttccgaacgtttttaaattcatggtattcggtgactaccgagatagactgtacggaggccagtgctgctgcaaaacagtccggacactctttttttctttattacctgtatgcggttctccgttcagccaacgaggtggacgaactccgttaccgtacagacaagaacggacaggtcgtttttcatgatcgggtggacattatttctccgatagctgttccgggaaagactttttatacggttcgtattccttatcatgaagacttcaaacatttttatgccgaggcctatgcactgattacaaacatccctgaggacggagacccttataacgctgaaagggtattgatgcaacaaggtgattacgatgtggtgcatttgagtgcggtgcccaagatgtatttcacttcaactacttataccgttgccgaagccggtaacggctgcagccatccgttgatgactaccggtaaagtggtgtcccgcggagagcgtctggtctttccgctttccatatatgtgaatcatgcttttgtagatgggtcgcatctggcgtccttctttgaaaagatagagaagcatttgaaagaaatttcgcacgggcaagtcgttttttagccataattccgctatcctgaaaaaacaacttggattttttgccgtaacaatcggttttgtgtaaagaaatctgatattacagttttgttacagaattaatctttagctttgcacacgtgaaatcaatgttaaatgatatattcaggaacagttatgataaaaaaggattcttatacgtggaaaatctatggtttggtagtagtggtattatgtattgtacctgcttttctgcatgcacaggagaaagactttactacatgggcaagtgccggttttaaatataaagtaaagccggcatttaccttgtccggaaaattggaatggcgtacaaaggatgatttgggtaagacagaccgctggggattggatgtgggtggagcctattctgtgcttccttttctgaaagtagcggccggttacgaaatccattaccgcaatcgtggagaagccggttggaaattccgtcaccgttatcattttgacggaacgctttccacgcgtgtacaaagactgaaggtttcacttcgtgagcgttttcaacatactttcgacagcagtggcgatgagtttcgttggcgttcgcgtgttaaattggcgtatgatattccgaaatgcaagatagagccttatgcttctgttgaaatgtataacggattgaaccgtggagaacggtttgatgtacagcgtatgcgttatcgtggcggagtggtgcttccgttgttttctgattgttgggaagcggacgtcttttattgccgtcagtgggagagtaaggcgcgaaaaaatatagtaggagtggcttgtacttattctttctgataagaacgggctgtcattgttttttcttgcggtgttcctttttcaagcagaagttaaagcctgcatacacttgcagtgtcccgaagccgttgttcaatgagaaattgttccggtaataatcgtatgttctgcctacgaatgaagtacctgcaaaatatttgctgttgttgtacacgatacctacacgcaggatgaagtcgatattgaagtttttgtaccattcgtctgtttcttcttccgcttttctgatgcgtgaggttttgtaggctactgccggattaagtgacaagcaggcaaggcagttgcgtgcaaatacccagttataggcatagccgaagttaaggctgatattggtgtattttatatgatttactttcatgcccggattcatcgtttcctgaatgatagggggcaattgggtgtaatcaaaatccagattatgcgcagatacggaaaatccggtaataaaagagccggcactgcgccgctggttggtggactggctgaaagcggcaggataagaaaagcgtctgttattgaatatataatatagattcaaccctttcatctttactttcagcccgttgaaatcttcagaataatcggttggaatacggtcggagaaccctgttattttgtgtattttgtaagagtttccggtacgtttataaaaaatatccacacctagtttagaactgtaaagactgaggtcgaactctctgcctcttttttttccgtttttctttccgtaaagtccgtctgcatcgacagcccatcctagaaaaagccagcgccagccaaagtaaacgcctattttattatgtggttttggtgagaaacgcaaacgttgcggttcgggggtaccgcttcctacggaatagtattcgtaattagtgaaatgatcgagcattaaggcgtagttatatcgattggggctgatatatgctgtgtcgaaatcgctgaaatcgaggaatttttttattgctcttttgataatttccgaacgtttatggacagtacggtcaggtgcaataaaattgctttcttcattttgggcaaacaaagaaagcatcaccgacatacatatgcaaaagcagattcctcttagcattctattattgctttattgatacgaagatagtgaatttccgtttaataaagagtagaatacgtccttttccttttttatttcctgaattttacataggtttgtaacatcataacgatacctttgtcgcaaaatctaaaaatacagtatgtacgcaaccaaaattcctagtgatgaacgttctttggtacttcgtttgattgaaggagaagaagatgctttttgtgagctttatgctgcctataagaatcgtttgatatactttgctatgcgctttttgaaatcgcgtgaatatgcggaagatatttttcaggatgcttttacaatagtgtggcagggacgccgtttcatcaatccggatgcttcattttccgcttatctgtatacaatcgtgcgaaaccgtatactgaatcagctacgcgatttgtcttatcaagataaattaagggaacagatactttcacaagctgtgaattataccaacgaaacaagagatgaaattatagcaaacgacttgcggcaatttatttcctgtgcattgcaacagttgacccctcgccaacgtgaaatattcgagatgagtcgggagcaacaaatgtctcatcgtgaaatagctgaagtattaggtatttctgttaatacggtacaagaatccatttccatatcattgaaaacactgcgtgcttatttggaaaagaattcgatagtaggttctgatttgattttgattcttatttgtttgaatttataaaatgataaattcaggtatttattcgacaaaaaatattgatttgaacttgcttatttatgtagaatcactgactttattttgtacttttctgtgttttcagttattgataatcatgattttattattaataaaggcttttggttaacagtgtatattaaaaaatattaatcacaccccagtcattcttttcttatgtgtatatcttaatgtcaaagggttatttttaataatcttgcttcatttagaattatattttatgaaaaatagtgaaaataataaatcactgctgcgtcgttatttggacgatctgtatacaatggatgatgcccgtaagttgttggatgagttacagacttcggagtatgatacagatatgcttcaggatctggctgctgaagtatgggaagaaacttccctgcaatcaccgcagacagaccttgaacgcgaacaatataaaaaagaggcgcgactgttattaaagcgtatagagcataagaaacgtatgtggattcgtcgggctgcattggctgtgtcaagtgtggctgcgatggtttgtcttgtatttggcagtattagttacattcgctatatagatagaacacaggtatcttatttagaggcttctacttcttttggcgaacgcaaggaagtacagcttcccgatggtacgacattgatattaaactcttgttcgcgtgttcactatccagatcgttttaccggtaaggaacgtagaatagaactggaaggtgaagggtattttcgcgtatatcataatgagaagcagcctttcatagtggatacccgccacttcgatgtgcgtgtcttgggtacttgttttaatatcaaatcttattcttcggacgaggtagtatcagtagatgtggaaagtggtaaagtccaggttgatttgccggaagcgatgatgcgtctacgtgctaaagagcaggtgcttatcaatactgtttcaggagaatataataagaggcgcgaagaacgcactatggcggtttggcgaaaaggtaatttacgtttcaatagtactccgatacatgatgtggctaaagaattggagcgtatgtataattgtcgcattacttttgctgagggacagaattttgacaatctcatttctggtgaacatgataataagagtttggacgctgtattacaggctgtggagtatacaagcggtattcattacaagagaatggggaatatgattcagctctataaatagtgaaaaaatataaaatacacccctgtctttgagaactacagtgtattatatttgtattgttaaacattagtctatatcggatatgaaaccaccatcttaatctgccaaaaaataggagctatctctcagagcagcccctatactagtaatccggacagatattcattcgtttcgacccgtgtgaatagcgtctcgtgtattacaaacctttgttttaaataatttattacaattactaaaacgcacaaatttatgaataatcttcctaatacaaaaaggaaatctgaaaatgtacattcatttttagcttttttacttttcatatgcttttcatttacaagttattatatacaggcgcaagaagtgaagggcataacattaaatgttcagaacgaaacggcagaaaatgtctttaatcaattgagtatacaaacaggactgaagtttttctatgatcaagaaattgttaattcagctccccgcattaccctcaaagtatcaaatgcctctctacaggatgttttggagcgtattactttacagacaaaattgtatttcaatagggataatcatacaatatctgttggtaaacagaaaaccggacaaagcacttcgaaaggtataaaactgagaaatctcaagggaagagttgtcgatcaagatggtgaacctatcattggtgccagtgtattggtaaaaggcactactaatggtgtaattactgatatggatggaaattataatttgatagacgtgccggaaaatgcattacttgccttttcatatatcggttatcagacagtagagttgaaagccaatggcaaaggacttgataaaataatgatgaaagaggataatgaattgctggatgaagttgtagtagtaggatatggtgtacagaagaagcgcgatgtgacaactgctattgccagtatacgtgccagtgatttgaaaggacagcctgtaacttctatggctgaagcaatggttggcaaaatgccgggtgtacaagtttcacaatctacaggtgcaccgggttcttctttacaaattaaggtgcgcggtacaggtactattactgctggaacatcaccgttgtatgtagtagatggagtacctcttgccaaagagcaactgaatactttcaacatgaatgatgtggagtctattgaggttctgaaagatgcttcctcttctgctatttatgggtcgcgaggctctaatggcgtagtgctgattactaccaagaaaggacaggaaggacgagctacggtttcttataatggatattatggttggcagactgtatctaaaaaaatagatatgctgaacgcttacgaatatgccgatttggtaaacgacgctcgaaataatacctatgtagataaaatggaagcggtaaaccgtaagcgtatcgctcaaaataaacagcctttggcctttagtattactgatagtaatgccatacgtttacaaaataccggtaatgattataatacgattgttccggttgaaatcttaccttatctaaggggtgaaaagggattggttgatacagattggcaagacgagatttttcgtacggcaggtatgcagaatcattctgtttcggtatctggtggaagtcagaagataaaatattatgcttctgtagattacttgtcacaagacggtgtaattattaacagtgattttacgagatatagttctcgttttaatctggatgttactgaaggtatttttaagtttgggctctctttaaatccgtctgtaacgatagagaatgcagtgaactctgatggtgcttataataaggatggtggtggcattattgcttcagctttgcatagtgctcctatatttcctgtttacaatgctgatggttctttttgttttgcacagaatgcttggagtccgaatacccagacgacactagaggatggttctgttaaaaaaggaaatagccaaactcaagtgtggaatccggtagcattggctttgttgcaaaaggatgaaacaaaagcttcccgtatatttggtaatgtttatggagaagtagcttttatgcccgaattaaaatatcgtgcaaattttggtatagatatttacaacagctcacaagatacatttcgtccatctactattcctgttgccaatacggaaggtaatccggaatctgagcctgaagcaacagccaaaacggctaagatgtataattggttgtttgagcaaactgtaacctataataaggatattaaagggcattctatttctgcgttggcagggtggactatgcaatatcagcgcgatgagagtacatacgcttttgctaatggatttataacaaataatgtgcctactctgaatgccggtactgtaacgcgcggagactctcatgcttctgagtgggctttgctttcaggacttgctagagtccaatataattataaaggtaaatatatggttactggagcacttcgtgcagatggtgcctctcgttttggtaaggataatcgttgggggtggttcccttcggtatcggcgggatggcgtttaacggaagagccttttatgaaatcattgacctttattgatgatttgaaacttcgtgccagttatggtttgacgggtaatttccgtattcccaattatggggctcagggagaagttgcttattacagctatgtattaggtgggaatagtgcagatgttgttaagggagctgcccccaagagtatgcctaatcctgaactacattgggagaagacagctcaagttaatattggttttgatgcatcattatttaaaaaccgtctgactttgggtttggacttatacaatagtaatacttatgatttattattggatgttccggttccgatgacaacagggtataaaactcgtctggaaaatattggtaaagtcaataacaaaggtgtggaatttaatattgctaccaaccagaagatgggtgattttaattggagtgtatattttaatatttcgaaaaacatcaatgaagtaaaggaactcgggcctggtaatgcagatataatttcttccggttcagtgagtaatgcttattttataacccgtgtaggtgagcctattggaagttattatttacctgtagtagagggagttttcaagaatcaggaagaagtggatgcaaccttgcactatatggattctccaacaaactacggcttagcagacacgaaacccggagatttcaagtttaaagatgtgaatggtgataaagtgcttgatatctcagatacagaccgtgctattgtaggtaattatatgccggactttacttacggctttggtgcaacgttagcttggaaaggtattgactttggcatcgtatttcagggtgttcaaggaaatgaaatcttgaatctttctcggcgctatttttataatcatgaagggaatatgaataattataagggtgctttaaaccgttggaagtcggaagatgagccgggaagtggaatgaacgtgcgtgccaatcgtgttagcaaaggacagaatggtactacatctacttggcatgtagaggatggttcgtatttacgtatcaagaatatttcattaggatatacattacctgaaaattggataaagaaggtttatttaaaatctgctcgtatctattgctcactccaaaatccatttacattcactcactatgaaggttataatccagaagtttccaatcgtagtgcagtgactaccaatggtgaggattatggggtttatccgttggcaagaaccacctctataggtgttaaccttacgttttaatcttaaaaatactataatatgaaaaaaataataatatctatttttacagcgattgctctttctggttgtaatgattttatagatttgaaacctgttgattttcctacagaggaaactttttatacggatgtcaagggattagaaggggctattattggtatttatgatgagttgcaatcgagtgatcaatatggttctaagttcatgactttaatggaagttcggggggataatgttaagaatgacaattctggtgccagtggtggtattacctatcaaatagaggtatttaccgaaactccggctaattccaatttgtcgggtgcatggctttctttatataagactatttatcgttgtaatcttgtactccaaaatatggagaaagtacaaatgactgaagaacaacgaacgcaaatagcaggacaggcttcttttgtacgtgcattgtgttactttaatctagtgcgtttatggggagaggttcctattattacaaaaacgcagactgtagctgaagcacgtaacaacaagcgttctcctgttagtgaggtttatgacttgattatcaaagacttgattgtagctaaaggtttgccggaagtgtgggatgaatcagagcgagggcgtgctacatcttatgcagcacgtgctttgttggcaaaagtatatttatacatgaaaaactatcaagaagtgattaatgaattgacttctgtagttgctgatatcaatgctaagcggaatttatctttggtacctatgcctcaaacttttcctaataatttaaagactagtaaagatataatttttgcagtccagtatctgaaaggtggtgtaggagaatccgttcatcagaataatcgatatagaaataatgataacggtaatataatatctttggaacaggctgaatttgaaaataatgacgataatcggaaagcgttagtagctccaacgggaagcggtcagcggccgggtaaattcgatgctcccgcaacaaataatgaaacaagtgcggatttccctgttatgcgttgtgccgaagtgatgttgatgtacgcagaagctgccaatgaactttctgccattcctacacaggaagctttggatgctttaaatgcagttcgtattaatgctaatctcatgggaaagacattagaagagctatctacaaaagaaatttttcgtcaggctgtatataaagaacggcgtttggaattggctttggaatgtgaccgttggtttgatatcgtacgtaccggacaaatgactactgtatttccgggaatagctgcttatcgtcagttatatccgattcctcagacagaaatagagaatgtcagtgataagggcggctggcagaatgaagggtatacggttgagtaattaataaactatcctggagagataactctctccaggcttttaaaaataatagaaatgaaaaaaatatatatattattgtatgctgtctttgttgcattgcaactttcagcacaagatcatgttgcgcagattcgtgaaaagctgatgagtcgcgattcgacttctgtaattgtagtggctcatcgtggagattggcgtaattttcctgaaaattcgttggaagcaatagataacgctattaaaatgggagtagacattgttgagttggatgttaagaaaacgaaagacggcgaactgattcttatgcacgaccgcacattggatcgtactactaccggaaaaggattggtttctgaaaacacattgagtgatattcgtaagttgaatttgagaaatggttgtaatatccgtactattcacaaagtgccgactttggaagaggcattgttgcatgctaaaggaaaaatcatgataaatttggatcaggcagacctttactttgatcagatttatgagcttatgaagaaaaccggaactaccaaacaaattataatgaaagggagaagaccggttgccgaagtgaagaaacaatttggtgattatttggaagatgtaatttatatgccaattgttgaccttgatgcttctggagccgagaaacacatagaggcttttattaaagatatgtctccagttgcttttgagttactatttgtaaaagatacaaacttgcttcctaaaaaacttgcaactaccctgaatggacgttctctaatttggtataatactttatgggatacaatggctggcgggcatgatgatgatatgtctttgcagaatccggattcaggttatggctacttaattgatacattaggatgccgtatcattcaaactgacaggcctgcttacttgctggactatttacggaaaagaaaactgcatgattgagatgtaagggttacttaaaagtatgttgaagaatataataaacttttacagggtttcacaaccgaaaccctgtaatgaagaatctttgtccgaacagaaacagcgtttgaaacgttttcagtggtctacttttcttgctgctacacttggttatggcatgtattatgtttgtcgtttgagcctgaatgtcgtaaagaaaccgattgtagatgagggcgttttctcggaaacagaattgggcattatcggtgctgtgctgttctttacctatgctgtaggtaagtttatgaacggttttcttgctgaccgtagcaatatcaatcgttttatgtcgaccggtttgctggtgactgctttggtgaacctctgtttgggatttgtacattcttttattctgtttgccgttctttggggtatcagcggatggtttcagtctatgggtgctgcttcttgtgtggtcggcttgtcccgttggttcacggacaagaaacgtggttctttttacggcttttggagtgcgagtcacaacatcggtgaggcaatgactttcattatcgtagcctctattgtaagtgcactgggatggcgttacggttttctgggtgctggccttgtcggtctgattggcgctttggtagtctggcgttttttccatgatactcctcagagcaagggacttcctgctgtcaatgctcctgaaaagaaaaaggagatggatgctttagagacggaggagttcaatcgtgctcaaaaagcggtattgagaaacccggctatttggatacttgcacttagtagtgctttcatgtacatcagccgctatgcggtaaatagctggggtgttttctatctgcaggctgagaagggctattctacgttggatgccagtttcattatttctataagttcggtattcggcattgtaggaacaatgttttctggcgttatctcagataggttttttggcggtcgtcgcaatattcctgccttgattttcggtttgatgaatgtgtttgctctatgtcttttcctgcttgttccgggtgtacatttttggatggatgctttagcgatgattctctttggcctgggtatcggtgtgctaatttgctttctgggtggattaatggctgtggatattgctcctcgcaatgcttcgggtgcagctttgggagtggtaggtattgccagttatatcggagcaggtttgcaggatgtgatgagcggtgtattaattgagggtaataaacgcctcgttgatggtgtagaagtttatgattttacgtatatcaattggttttggataggtgcggcattgttgtctgttctgttggcgttgttagtatggaatgcaagaagtaaagagtaatatattctgtaatattggtaacagtgtgaaatcggaaaaacttaaccgcttattccgattttacactgttttttgtattcttactaatattccattttaaagatttcgtatctttgtgaaaagtattgtgaatgaaaaacagatgtaaaggtattatggattttcataggatatatctgttaataacagttgtactatctggtttagttgccgctcgtgcacaagtcgccttaataaggtaatgtatatgtataacgatttacaaggctatacagaaagatatgatgtggcagaagagttgtgaaagaaatatataataaagatatcgtatgaagaagattatcaacccatggaaaaacatggaaggttataattgttttggctgttctcccgataatgaggcaggtgtaagaatggaattctatgaagacggcgatgagatagtaagtatctggaaaccccgtccggagtatcaggggtggttgaatacgttgcatgggggtatccagtccgtattgctggatgaaatttgcggttgggtggtgttccgtaagttgcagaccggaggagtgacctctaaaatggagactcgttttcgtaagtccatatctaccaatgatacacacttggtgttacgggcatcgttgcgtgagcagaaacgtaatattgccgttatagaagcaagattgtataacagcatgggcgaactctgtacggaggctacatgtacctattttactttcccgcaggaaaaggcggaaaaggaaatgtgttttcatcattgtgatgtagaaccggatgaaattttaccccttgtttgatgaaaatgaaagaaaaatcaaatttttcgtgataaatccttgcttgtttaaaacaaatcgtttacatttgtcgcattagaaatagaaaaagtatgaagaatatcgttgcacatcatcaccattattatcctgaggaataatccggtgggcgtatgaggatatgtgcataacgaagaacatataatgaacgaggcttaccgaacattggtaaacctcgtttttttatttgcaaaccataaatataaataatatcatgttaagaattgcagtacaggccaaaggccgtctttttgacgaaacaatgtcgttccttgaagaatcggatattaaactaagcgcaacgaaacgcacgttactggtacagtcttccaattttcctttggaagtattgtttttgcgcgatgatgatattccgcaaacagtagctacgggagttgccgatttgggcattgtcggtgaaaacgagttcatggaaaaggcggaagatgctgagattgtaaagcgtttgggattcagcaaatgccgtctgtcattggctttgcctaaggatattgaatatacgggtccgcagtggtttgagggtaagaagattgccacttcgtatcccggcattctttcccgatacctcaaagaacagggggtgagagcggaaatacacgtgattaccggttcggtagaggtctctccggggattggcctggctgatgcgatttttgatattgtaagctccggctctactttggtgagcaaccgcctgaaagaagtagaagtagtgatgaaatccgaggctctgttgattggcaacaagaatatgagtgaggagaagaaggagattctggatgaattgttgttccgtatgaatgcggtaaagacagcggaagacaagaaatacgtgctgatgaacgcgccgaaagatagactggatgaaattattgccgtacttccgggtatgaagagccctacggtgatgccgttggcgcaagagggctggtgctccgtacatacagtgctggatgaaaaatgtttctgggagattatcggtaaattgaaggcattgggagcggaaggtattctggttttgccgattgaaaaaatgatactttaaatgttaatggtatgaatttaattactaatcctgataaatctcagtgggcggaattgctgaaacgtccggtgatgaatacggaaaacctttttgatacggtacgggctattatagaccgtgtaaaaacggaaggcgaccgtgccgtattggaatacgaagaaaaatttgataaagtggctctgaccgcattggctgtgacggaagcggagcaggcggaagcggaagcgttggtaggcgaggaattgaaaaaagccattcgtctggccaaacggaatatagagacgtttcatgcggcacaacgcttcgaaagtaaacgggtagagactcagccgggagttacttgttggcagaaggcagttgccatagagaaagtcgggttgtatatccccggtggaacagcaccgctcttttccaccgtgctgatgctggcagttccagccaggattgcaggatgtaaggagatagtgctttgcacgcctccgggcaaagatggaaaagtacaccccgccgttttgtttgcagctaaggtggcgggaataaaccgtattttcaaagccggtggtgtgcaagctattgcagcaatggcttatggaacggaaagcgtgccgaaagtatataagatatttggcccgggcaatcaatacgtaacggctgccaaacagttggtgagcttgcgtgatgtagctattgatatgcccgccggtccttcggaagtagaggtactggcggatgaaacagccaatccgtcttttgtagctgccgacttgctgagccaggcagagcatggggcagacagtcaggcgatactgattaccacttccccggcattacagcaggctgtgaaagaagaagtggagcgtcaattggctttgttgccccgtaaagagattgcggaaaagtctcttgccaatagtaaactgattgttgtgcgcaatatggacgaagctatcgaactgaccaattcctatgcaccggagcatctcattatcgaaacagcggattatatgtccgttgcggagcgggtggttaatgccggttcggtatttttgggctctctgactccggaaagtgcaggagattatgcttcgggcactaaccatacgctgcccaccaatggctatgccaaagcttatagcggtgtcagccttgatagctttatacgtaagattactttccaggaaattaagccggaaggaatacgcattattggccctgctatagaggaaatggcagccagcgagcatttggatgcgcataagaatgcggtaactgtcagacttgataaattgagagttgaaaattaaaaatcatactttatcattgataattcataatccgtaaattaactctttctgtccatgagaaccttagaagaacttacccgaccgaatatccggcgtttgaaaccttactcttcggcacgcgatgaatataatggcgctgccgcatccgtttttctcgatgcaaatgaaaatccgtacaatatgccgcacaaccgctatccggacccgatgcaacgggagctaaagaaagaactgtcgaaggtaaagaaaatctcccccgaacgcatatttctgggaaatggcagtgatgaggcaatagaccttgtatttcgcgctttttgcgaaccgcgtatagacaatgtagtagctatagaccctacgtacggcatgtatcaggtatgtgccgaaataaatgatgtggagtaccgcaaggtactgttagacgaggattttcaattttcggcagataagttgctggcggctgcggatgaacatacgaagctgatttttctttgttctcccaataatcccacaggaaatgatttgcttcggagtgagattgagaaaatcatccgcgaattcgacgggctggtgatattggatgaggcttataacgatttttcagaggcgccttcttttttggatgaactggacaaatatcctaatctgattgtactgcaaactttctccaaagcatggggctgtgctgccatacgcttgggcatggcttttgcttcgcaggaaatcatttcgattttcagcaagataaagtatccttataatgtaaaccaactgactcagaaacaagcgatggagatgttgtaccgttattatgaaatagagcgttgggtaaaaacattgaaagaagaacgtgagaatctggaaaacgaatttgtgaaactgccttgtacggtgaaaatatttccttcggatgcaaacttttttctggtccgtgtgacggatgcggtgaagatttataattatctggtggctgaaggcatcattgtgcgtaaccgtaattccgtatcgctttgcggaaactgtctgcgggtaacggtaggtacgagaaacgagaatgaaaggctggttgaggcgttggagaaatataaagtataaagtagtagggtatgaagaaagtacttttcatagatcgtgacgggacgttggttatagagccgcccgtagattatcaattggattcgttggagaaactggagttttatccgaaagtaatgcgtaatcttggttttgtccgtagcaggctggattttgagttcgttatggttaccaatcaggacgggttgggtacggcatcttttccggaagaaactttttggccggcgcataacctgatgatgaagacgttggaaggtgagggaattgccttcgatgatatttgcatagaccgtagcatgcccgaagacaatgcgccaacccgcaagccgcgtaccggtatgctgacgaaatatctcgacaatcctgaatacgatttggcaaatagttttgtgataggcgaccgtgctacggatgtggagttggctaagaatctgggatgccgtgctatcctcttacaggaagatacgaatatgctgaaaccgaaatcggccggtggtgaagctgcgtgtgagggcttggaggacgtctgtgttttggcaacaaaggattgggataaggtcgccgaatttctttttgccggtgagcggaaagcggaagtgcgccgtactacgaaagagacggatatttacgtggctgtaaatttagacggtaacggtcattgtgatattcataccggacttggtttctttgatcatatgctggaacagataggcaagcatggcggcatggatttgaccattcacgtaaaaggtgatttggaagtagacgagcatcatacgatagaggataccgccctcgctttgggtgagtgcctgtatcaggcattgggcagcaagcgcggcatagaacgttacgggtatgcactgcctatggacgattgtctgtgtcaggtatgtctggattttggaggacgtccctggctggtatgggatgccgcgttcaagcgcgagaaaataggagagatgcctacggaaatgttcctgcacttctttaagtcattaagcgatgcagccaggatgaaccttaacatcaaggcggaagggcagaacgagcatcataagatagagggaatcttcaaagcactggcaagagccttgaagatggcggtgaaacgcgatatttatcactatgaattgccaagctcaaaaggggtactttagtgtttgactcgggactgagtcattattaaccgtccgcaaacgaacagggggagtgtccgatttcggacactcccccttgcgtaatactttcctgcctgcttggcacactctttgcttttctgtcaacgacaattttaaagaccgaacatgaaaaagaatattttacttgccgcttgttttgggatatcactgtttgcctcggcacagaatgatactttgacgcacgaacgtgaaatcactttagcggaagccattgcactggcgcgtacccaatctgtagatgctgccgtggcgctcaacgaattgaagacagcctattgggaataccgtactttccgtgcagacctgttgcccgaaataaattttacgggaacattgcccaattataataagtcgtacagcacctatcagaactcggacggttcctatagctttgtccgtaacaatacattggggttgtccggtgcactttccattgaccagaacatttggttcacaggcggtaagttgtcgctggcttcttctctcgattacatcaagcagttgggctccggtggcgacaaacagtttatgtccgtgcccgtaagccttgaattgacgcaacctatattcggcgtgaacagtttgaagtggaatcgccgtatcgaacctgtccggtacgcagaggcaaaggctgcctttatttcggcaacggagcaggtaacgatgaagaccattacttattttttcgagttattgctggcaaaggaagcgcttgccacagcgcagcaaaacaaagcaaactcagacaggctttacgaagtggccattgccaaacggaaaatgggacagatttcggaaaacgacttgctgcagctcaagctgaactctctgcaaggcaaagccgatgtaactgaagccgaaagcactttgaacgccaagatgtttcagctacgttcgtttctcggtgtgtcggagagcgaggggctgaatcctgttatacctgcttccgttcctggtattaaaatggactacgaccgtgttctgaacaaagctttggaacgcaactcgtttgcccagaatatacgtcgccgccagttagaagccgattatgaagtggctacggcacgtggaaatttaaggagtatagacctgtttgccagcgttggctataccggacaaaactatgagttctcatctgcctatcaggatttgctggacaaccagattgtcaaggtcggtgtaaaaatacctatcctcgattggggaaaacgtcgcggcaaggtgagggtagccaagagcaaccgcgaagtggtactttccaaaatccgccaggaacaaatggacttcaatcaggacattttcctgctggtggcaaacttcaacaaccaagcccagcagttggaaatagccgaagaggcggaccagatagccgaaaaacgttacaagaccagtgtggagacttttatgattggtaaaataagtacccttgacctcaatgatgcgcagaactccaaagacgaagcccggcaaaagcacatctccgaactttattattattggtattacttctatcaactccgtagcctgaccctttgggattttgaacggaacatggagttggaagccgactttgaagatataatcaaaggctgatgccggtagaaattatgccgatttgtacgattataaaggaaataacaaaaaaatggtgcaaatctgtatgacctgtggctaaaaaacttacttttgcaagtaacaaactacaaaatactatgatactgatagtcgatgatgatagtgccgtacgttcttcacttagttttatgctgaagcgtgccggttatgaggtaaaaacagcaccgggaccccgtgaggcgatggatatagttcgtgcagaatctcccgcactgatattgatggatatgaactttacactttccactaccggagaggaggggcttacgctgttgaaacaggtaaaggtcttccgtcccgatgttcccgttatactgatgacggcatggggaagcatccaacttgccgtacaggggatgcaggcgggggcttttgactttattaccaaaccgtggaacaatgccgcccttttgcagcgtatcgaaaccgccttggaactgagtgccgctccgaaagaagtgccggaagagcaagcggagggtttgaaccgcagtcacatcatcggaaaatcgcaaggactgatggaggtgctgaataccgtagcccgcatagcccgtaccaacgcttccgtactcattaccggcgagagtggtacaggtaaggaactgatagccgaagctatccatatcaacagtcagcgcaccagacagccttttgtgaaagtcaatctcggcggtatctcgcagagtctgttcgagagcgagatgttcggtcataagaagggcgcttttaccgatgcaagtgccgaccgcatagggcgttttgaactggcaaacaaaggaactatctttctggacgaaataggcgacttggatttgtcctgccaggttaaactattgcgtgtgcttcaggaccagacgtttgaggtgctgggcgacagccgcccgcgcaaagtggatgtgcgtgttgtctccgccaccaatgccgatttgcgcaaaatggtttccgaacgcacattccgcgaagaccttttctaccgtatcaatctgataaccgtaaaactgcccgccttgcgcgaacgccgtgaggatattcccctgttggcacgtcactttgccgaccgtcaggctgccgtaaacggcttgccgcgtaccgaattttcagcggatgcgctgaacttcctttcccgtttgccttattcgggtaatatccgcgaattgaaaaacctggtggagcgtaccattcttgtcagtggaaaacaaaccctggatgcttctgattttgaatcgcagtaccaacgtcacgacgaacctgcaaaagccgcagatggcacttcctttgccggcatgacgctggatgagatagaacggcaaactatcctgcaagccttagaacagcataaaggcaatctcagtcaggttgcattggcactgggcatcagcagggctgctctatacagacgactggaaaaatataaaatagcgattagtgattagcgataagtgtttagtcatttaaatcttgaccgttagtcgtcgcttaccagcccctaatcgttaatcactaccccgctaatcattaacccctaacccctaatcgctaatcgttaatcactaacccctaatccctacctcacgtgcgtattaaattttatttttttattcttgtattgtttttgcttgggctgggtggagcgttgatatatttggcaggcaaaatgcagaccacgcatctatatgttgtggagggtattattgtattcatactgctctatctggcggtgttctatcgtaagattgtcaagccgatgagtacgataggaagcggtatggagttgttgcgcgagcaggatttcagcagccggctcagcagggtggggcagtatgaggccgaccgtattgtgaacgttttcaaccgtatgatggaacaactcaagaatgagcgtctgcgtatgcgcgagcagaaccattttcttgatttgctgattcaggcatcgcctatgggggttgtcattatgacgttggacggtgaggtgtcacaactcaatccgatggctgtaaagatgctgggcgttcgtctggaagaggcgcagaacaggaaactggataaaattgattcgcctttggcggaagagctggcatccattcctaaagaaacgacttccgtggtgcggttgaacgatgcgaatatctacaagtgtacccattcttcgtttatagacagagggttcaagcatcctttcttcctgatagagcgcatgacggatgaagtgatgaaagcggaaaagcgtgcatacgaaaaggttatccgtatgattgcccacgaagtgaacaataccactgccggcattacctctaccttggatacggtggagcaggcgctttctacggaagaaaatatggaagacatttgcgaggtgatgcgcgtgtgtacggagcgctgtttctctatgagccgtttcattacccgctttgccgatgtggtgaagatacccgaacctacagtagcgcaggttcaactgaacgaattggtatccatgtgcaagcgttttatggagggaatgtgcaatgaccgtaacattattctccgtttggaatgcgaccccgaagtagggcaggtgcgtctggatgcttcgctgttcgagcaggttttggtaaatatcattaagaatgctgccgaaagtatagagagcgccggagaagcggcaggcaagcagggcgaaataacggtaaggaccactgcccccgctcttatagaaatcgtagacaatggtcccggaatcagcaaagagaccgaagctaaactcttcagtcccttcttctccaccaagccgaacgggcaggggattggcctggtgtttatcagggaagtgctgagccgtcacggttgtgcattctccctgcgcacatacaatgacggattgacccgcttccgaatcttgtttaattgagaattcccaattctcaacttctgtttttcctccattcttctgcgtactcatccaatatccgcttgattccctggccgattgtaacataatcactctcgttcagattggcaagggaagcacgtacgctccattcgggtccgtcgaagccgccaccgttcagaagcactaaagatgtttcctgagcaaggcggaatactacgttcagcggactgtacgtttttttgaggtattccacaaacttctctccatagaacttttcggcccataccagcatgtctatttccgtataatagcctacccgtaaggggtcttccactaacgtaaacccggtattgtcccaaagagcctgcaagcggcgccggataatttcctgcatcttctgcttgtagctgttctctttgtccagcagggcaaaggcggcgaataagctcatctgcatctgttgaggcaatgaaagtcctgccgtatgattcaaggctatctgacggctgtccgctaccatgcggtctatgaacttcaatttttcgggatgcagggtcagcgtggcatagcggcggttgagggcttcgcgcttctctttcggcaatcgggatatttgtctgtcgaatacattgtattcgtgcagcgctatgacggcattgcgccagccggtagcgccgaaatatttggagaaagagtacacgcaaagcgtattgtacggaatttctgccataaacgagcggaaatgcgggctgaaagtaccgtacacatcgtccgtaataatcatcaggttgggattgtcttcctttacgatgtttacgatgcgcgccattgtttcggggctgagcgtatagctgggcgggttgcttgggttggtgacaaacaaagcctttatggccggatttttcagccggtctatatcctcgtcactgtattgccacagatgcagcccgtctttgctcatgcggttggcatgcagttcggtcaccttgaaccggtaacggtccagttggggaatctctatgtaaggtgtaaaggcgggaaccatgagggcgataccgtcgcctttgtccagcaggaaattctcttgcagcgaatcgaagatataacacatggcagccgttccgccttcggtggcaaacaggttgaaagctccgcgaggcggacggttgtcgcacatttcctgattcaggtagtcgcataccagcatttcggtgaattgcaggatgcggtcgggcacaggatactggttgcctatgacgctttccgcccattcgtgtacgaggctgtcggggtcgacggcatgctgcatcagcatgtagtggtaggtttgttccagcagtttggctccgggctggtaggtattgcttttgaggaattgctcaaagcgggcggcaataccttgtttttcggggatgccggcgatgccttcggggagaaacatgacgtgacggcattcttccagtccgaattttcccagaaggaaaaaggcttcgcgtggagtggttgcaatccagttgggattaccgcgcccggcgttcaacatggtacgggcggtctttttcaggctttcatctgccatgtcgataagacggtttttcagttcaaagggactgatattctccatcttcttttctaaaagttttgtattcatataatctgaagtttagtttttaaaaagcgttataattaaagtgacagtcggcataaactaattccaggtatgctaaaatctattcgtccgataattgttttccattcgtccgacagctgttgaattatcgtccgacaattgttgaattttcgtccgacagctgtcggacggaaagattttagtaagcttgaaaacagtttttacttattaggtaatctgcttaaagtcttcagggcattaaatcagcaggacgataaccactccccatataatcagcagggtgttgcctacggcatacgtcacggtataacccagcgcaggcgtttcactctctacggcatcctgtatggctccgagggctgccgtagtggtccttgcgcccgcacagcatcccaatgcgatggccggatgaaacttgaacagatacctggcaagcaacagcccgataatcagtgggaaagtggtggctgctgcgcctacaaggaacaggctgatacccacatcgtgaaatccctgtacaaaaccggggcctgccgatatgcctactacggcgataaacatgttcagccctacattgttcagtacccattgcgacggttcgggaatgcgtccgaaagtgggatgcttgctgcgcagccagccgaagagcaatcccgctatcagcgctccgccactggtgctcaggctgattggtacgccgccgatgtggacggatagtgcaccgaacaacccgcctacaaggatgccgagccctacgaaaatcatatcagtctgattggtaggacggtctatatagcccaaacgtctggcggctgtttccacttcctgcctggttcccactacctctaccacgtcgccggcatctacggtggtctgagccatgacggggatgtcgatgcccgcacgcctgatgctgcggatactgacaccgtgcatgaacttctcgttgcggatggccgaaacggtctttccggcaaaggtcttttgggtaatcatgacgggcagtttttctgcggggaagtccaatagttgctggtcttgtatttcaggtcctatccaatcctcttcgccgataacgtattcccggcgtccgcttagtacgacttcatcccctatttccagttgcacgttggggctgacctcacggatagtgcctgccttgcgtatccgctccacaaacaggcgcttgtcctgttgctggaagtacacttcaaggtctacgacccttttcccgtttttgaaccattcgttttcgatgcggtaggcgcggaaagtgacggggcgtgcggcatgaataaagccgggttcatctgcctgagagttgcccatgcggacttccaaatccttgcaggcggctttcaccttatccagtccgcccagcattttcggtccgatggacgatagcacccaagccgagccggcggtaccgaaaatgtaggttacggcataggatacggggatgatgttgatgtagctctgccgttgcgcttcatccagtcccatgtttgccattgtatcttcggccacgccgatgacggccgatatggtttgtgagccggcaagcaatccggcggcttctcccatgttatatcccatgagtagggcaagcagccaggttactcccaaaacagatacgcacatcagcaccgcaaaagccacttggggcaatccgtcttttttcagtccgcgaaagaactgcggccctaccttgtagcctacggcaaacagaaacagcaagaaaaacactgacttgacagggccgggtacggcaatattcagttgccctaccactacgcctaccaataacacgctggtgacggttcccaaagtaaacttaccgatacgcagcttacccagccagaaccccagaaaaatggtgaggaaaatggctaattcgggacgttctctgagttggttgaaaatccattccataattaagtatttaggtcggtttgtacgtcttttgtaagtcgtattcgctatacaacgggttttaacgggaagtgttttgaataaaagtggttttttagaacatttattccgcaaaaccggacttttagaaaaagttttcttccgtacctttgcgcactgaatgatagatgggtaaggtatgaggttgtttattagggtatttctgctgttgcagataattgcacttcctgtgagggcgcaatatatagtgcaaggtgttgtcacggattcgctgacacgggagccgttgccatatacctcggtctatctgaaaggaaccacagagggggggatgactgatgacaagggggtattttccttcaagacctatcgcccggaagcacggttggtaatctcggccgtgggctataatgaatacacccggctgattcatccggcacgcggggagcgtataaaagtggcgcttgcccccaccacttatgcactgaatgaagtggtggtgaagccgaaacgcgagcgctacaagaagaaaaacaatccggcagtggagtttgtgcggaagatgatagagcaccgggatgattattctccggatgagcgcgacttctggcagcgcgagcgttatgagaaaatgacgtttgccattaacaacttcgacagtgtgaaacagcagaagtggctgtatcgcaagttcaagttcctgaccgattatgtggatacttccgccgtgacgggaaaaccggtactggcggtgtccaaccgcgagttgctggctacggattattaccgtaagtcgccgcacagcgaaaagcaatgggtgaaggcgcggcggcaggcgggagtggacgaaatgctgtcacagcaggggatggagcaggccatcagcgtcactatgacggacgtggatatttatcagaacaatataacgctctttaccaataagtttgtcagtccgttatcttctttaggcccttcgttctacaaatactatctgatggatacgctgaccgttgccggaaagccttgcgtggacttgactttcgtgcctttcaactccgagtcgttcggctttacggggcatctgtacgtcatgctggacagcacgtatttcgtgcgtcgtgtagtgatgaactttcctcagaaaatcaatctgaactttgtggattacatgaagatagaacaggacttcgaccgtgcggaagacggtacaaggcaacttatgaatgaaagtatcacgacggaattcaaattggtggacaacagcgacggcatctatgccaaacgggatgtctattaccggaattatgcttacgaatctactgccgatgccttgcaggcgttccgaaaacccgagaaggtgattgaaggcatggactcttccgctcattccgacgcttactgggatgccaaccgccttgcggaagtgagcaagaaagagacttccgtagacaagatgatggcgcaactgcgtagttatccggtttattattggacggagaaggtgctgaaggtgctgtttaccggatatattcccgcacctaaggagaaagctcctttgttctatatcggcatgatgaacaccaccatcagcggtaatgcgctggaaggagtgcgtgtgcgtgccggtggaatgacaacggcatggcttaatccgcatttgttcggcaggggatatgtggcgtacggtttccgcgacgaacgtgtgaaagggttggcggaactggaatattctttccataagaaaaaagagtatgccaatgagtttccgattcactctttgaaactccgttatctgtccgatgtcaaccagtatgggcaacattatctctataccagtcaggataacgttttcttggcgttgaaacgccagaaggacgaccgtatcggctatcagcggaaagcggaactgacgtatacgaacgagtttcattcgggcttctcctttcaagtgactacacgtctgcggaaagatgaatcttcgcatctcattcctttcatcaggcaggatgaagataagtcgtttgtaaaaagtatttcgaccagtgaactggaacttaaactgcgttatgctcctaatgagaagttctttcagacacagtggaaccgttttccggtatctttggatgctccggtatttacgctgacgcatacaatggccgccaaaggagtgttgggtggagactatacgtatcattatacggaggcaggatttcagaaacgtttctggttctcggctttcggctatacggacgtcatactgaaagccggtaaggtgtggaataaagttccttttccgctgcttatcattcccaatgccaacttgtcctacaccattcagccggagtcttactcgctgatgaatgcaatggaatttatgaacgatgaatatgcctcgtgggatgtgacttactttttgaacggtttccttttcaaccgcattccgttgttgaaaaaattgaaatggcgcgaagtgttgtcctgtcggggaatttatggaaatctgagcgacaagaacaatccggaattcagtgaaggattgtttgcctttccggcaggaagcactactatgggacacactccgtatgtggaggtaggggtaggtgttgagaatattttaaaagtgctccgggtggattatgtatggcgtttgacttaccgcgatttacctaatatagataaatccgggcttagaatcagtctgcacatgacgttttaacttaaatcttactaacagagtattaaatcggataaaaagactaatctatattgggtaaaataccctaaatttgagcaattttttaaactaaaataattcaatggcaatgaaagaaaacattaagccggcaaccggtcgtttaggcgtactggtagtcggagtaggtggtgcggttgcaaccactatgattacaggtacattagcagcccgtaaggggttggcaaaagctataggctcaatcgcacaaatggctactatgcgtatgcaggacggcaaagaacatctgattaaggatatagtgcctttggttgatttgaacgacatcgttttcggcggttgggacattttcgctgatgatgcgtatgaagctgcaatgtatgcagaggttttgaaggaaaaggacttgaacctcgtaaaagatgagttgaaagccattaaacccatgcctgccgcttttgaccacaattttgcaaaacgcctgaacggtacgcacatcaagaatgccgctacacgttgggacatggtagagcagttgcgtgaggatatccgcactttcaaggcaaacaacaattgcgaccgtatcgccgtgttgtgggctgcaagtactgaaatttatgttcctctggcagaagagcacaagtcgctcgctgctttggaaaaggcaatgaaggaaaacaatacggaagttatttctccgagcatgtgctacgcttacgctgcaatcgcagaaggtgctccgttcatcatgggtgctcctaacctgtgcgtagatactccggctatgtgggaattctccaagaaaatgaatgtgcctattgccggtaaagacttcaagagcggtcagactttgatgaaaactgtacttgctccgatgttcaagacccgtatgctgggtgtaagcggatggttctctaccaatatcttgggtaatcgtgacggtgaagtgcttgaccaaccggaaaacttcaagaccaaagaagtcagcaagttgtccgttatcgacaatatcttcgaacccgaaaaattccccgatttgtacggtgatgtatatcacaaagtacgtatcaactattacccgccccgtaaggacaacaaggaggcatgggataatatcgatatcttcggctggatgggttatccgatggaaatcaaggttaacttcctgtgtcgcgactctatcttggcagctcctatcgcactcgacctggttatcttcagtgacctcgctctgcgtgccggtatgtgcggtatccagacttggctgtcattcttctgcaagagcccgatgcacgactttgaacacgaaccggtacatgacctgttccaacaatggagaatggtgaaagaaaccctgcgcaatatggtaggtgaaactgcaccgagctatttggactaaaataagaaaacggtaaggtaataaaagtgataaggcgatagagtgattggcaagtttctgcttgaaatttcatcactttactgccttaccacttttatgactttatcaccgcattatcttgtcacttttattattctatcactttttatcaatgaagaaaccctcttttttcccggttatcatcggtacgggcttcggttcgggcttttctcctttcgctccgggtacggcaggtgctttactggccgtgcttatctggttcggaatatctttcattgtttcggaaatatgcctgatatggctgacggtggctcttattctcttttttacggtaatgggagtatgggcaaccaatcgtcttgaacctttctggggagaggacccgtcacgggtggtggtggacgaaatggtaggagtgtggattgcattgctggcagcaccgtctggaaatgtctggtatgcgttgggggcttttgccctctttcgtctgtttgatatattcaaaccgttaggcatccgccgcatggaaagttttccgggcggaattggcgtgatgatggacgatatcttggcgggaatttatagctttgtagtcttaatcggagtaagatggctgataagctgaaaggaaaaccgggatttgcaggatggcgtcatgctgtttgggtctttatcaaggctcagctttcgtcatacgtggcaagtctcatagatttcttggtgaccattctgctggttaaactatccggacttttttatttgtatgctacttttctgggctctgtagttggcggcgtggtgaactgtgttatcaattacgggtgggtatttcatgcggacgactgcaaaaagacgcatgttgcactgaagtatctttttgtctggggaggtagtattttattgaatacatggggcacgtttgccctgaccgagtggctgacgggtatgcactgggtggacggattgctgggacattatataaacgatgtgtttatcctgtccaagattatcgtagccattctggtggcgttcttctggaactatcatctgcaacgggtattcgtatatcgtaatcataatttcgggaaatttatacgacaatattttagagactaaatagaactgatatgaattatagagattggctgcaacagttgatttataagattataaatccggttgtgcatggaatgatcaaggtaggcattacgcctaattttattactactaccggattggtgatgaacatcgtggctgcatgcgtatttgtgtatgcgggcatgtataaaccgggtgagcttgcttatgtgggctggggaggaggtattgttctctttgccggtttgttcgatatgatggacgggcgcgtggcgcgtgtaggtaatatgtcttctacgttcggagcattgtatgactcggtgctcgaccgttatagcgagatggtgacgctgttcggtattttctattatctgattttgcaagggtatctgtggggatcgatgattacttttgtcgcattggtcggttcgcttatggtgagttatgtgcgtgcacgtgccgaaggattgggactggaatgtaaagtaggcttcatgcagcgtcccgagcgtgtggtgctgaccagccttggtgctttgtgctgtggaattttcggagattgcaaggcgtttgacccgatgctgatactgattgttcctatggccgtgatagccgttcttgctaatctgacagcattcgctcgcattgcgcattgctataaattattaaagaaacaataatgagaaaagatatttttccttctgtcaaagaagcgttgcctgttgttgtccttacagcactgttcttgttgttgacagccgtgtgtatagggttgcgtacagagcatcttttaatgacgggactgtttctgatactcttttttgcaggaaaaacaacccgtaaattggcggtagcgctacttccttttatcatctttggcatttcttacgactggatgcgggtgtatcccaactatgaggtgaatcctattgatgtgcagggattgtatgaggcggagaagtccttgttcggtatctcgattgatgggacaaaattgattccctgtgagtattttgcacagaatcactgtacggtaggcgatttctttgccggtatattctacctttgctgggttcctgttcccattgcattcggtctgtggctttatctgaaaggcgaacgcaaggtatatcttcgctttgccatggtctttctgctggtaaatcttatcgggtttgccggatattatattcatccggcagcaccgccctggtatgccatgaattatggctttgagccggttctcaatactccgggcaatgtagcgggactggggcgctttgacgaactgctggggtgctctgtctttcattccatttatggacggaacgccaatgtatttgccgctgttccttcattgcatgcggcttatatggtggtggctgtagcatacgctattatgggacgttgcaagaaatggctgatagctttgttctctgttatcatggcgggtatttggtggacggctgtctattccggacatcattatctgattgatgtgatgttgggcatttcctgtgcgttgctggggattctggtatttgaacaagggttgatgaagtggggcgcattcaagcgtttctttgaaagatacagtcggtatataggataaattataaggtgtggattaacgcaaatttacgcagggggcattctttatattgaaactctgcgtatatttgcgttaatctgtttttatgttataggtatatgaataattttgtcttttacagtcctaccgaatttgtattcggcaaggacacggaaatgcaagtcggtgccttggccggtaagtatggggcacggaaagtaatgattgtgtatggtggcggttccgtgctgcgcagcgggttgttggacagagtgaagcaatctttgcagaaagccggtattcgttattgcgagatgggtggtgtgcaacctaatccggtggatacgaaggtgtatgaggggattgaaatttgccgtcgtgaacaggctgatttactgctcccggtaggaggcggttctgtaattgatacagcaaaggctatcgctgccggtgtaccttatgagggtgatttttgggatttctttataggtaaggcaaaagtgacggaagcattgaaagttgctgttgtgctgacaattcctgctgcgggtagcgagggctcgggcaactcggtgataacgaaagtggataccctgcaaaagctaagcttgcgtgtgccggaattgttgcgccctgtcttttccattatgaatccggaattgacttatacattgccgccttttcagacggcttgcggcattgccgatatgatggtgcatatcatggaacgttattttactaatacgcaggatgtggagattagcgactgtctttgtgaaggtacgctgacagctatcattaaagaagcttatcgcataaaacaaaatccgggagattacggtgcgcgcgccaatattatgtggtgtggaacgattgctcataacgggacttgtggtgtgggttgcgaggaagattgggcttcgcattttctggaacatgaagtcagtgcgatttacaacgttacgcatggcgccggactgtctgtaatagttccggcatggatgacttttatggccggacataatccgaaaaagatagcccggtttgccaaccgtgttttcggtgttcccgaatcggaggatttggaagagatggcattggcgggtgtgtcccgtttgaaacactttttccgttttatagggctgccggttaactttaaggaactgggtatcgagaatcccgatataaaccgcttggcggatagcctgcatcgcaataagggagagtttgtgggcaattatgtgaaactgactaaacaggacagtaaggaaatctaccgtctggcactgtgataaacaaaaaaaaacggcgaagtattttatctgacttcgccgtttcttttatttgatttcgatttcttccttcatgtcaatctcttctccctgcggatcgtagaaaacatattccagaaatgctaatttctgacttggaataatcttgattccgaatccgtatttcatttgccatttccgtttcagtgagagaactccctgattgatgtaggcagcgatatacggatggatgtgtaacgagaatttctttatcttcagtttgttgacaaggtagtcaattttactctctaaagtgtccgtaaagaggatggacgatttaatagtgcctttaccaaagcaggttggacaggtttccgtagtattcacatccattgccggacgtactcgctgacgcgtaatctgcatcaatccgaatttgctgagtggcaggatgttgtgtcgtgctctgtctttctgcatattggcacacatacgttcgtaaagcttttgtctgttttcggcttcattcatgtcgatgaaatccaccacgatgataccacccatatctcttagccgcaattggcgcgccagttcatcggcggctcccagattcacttccagtgcgttggcttcttgcccgttggcattcttgatgcggttaccgctgttcacgtctactacgtgaagcgcttcggtgtgctcaataatcaggtaagccccgcttttgtatgaaacggttttgccgaatgacgattttatctgtttggtgataccgaaattgtcgtaaataggaagttgtcctttgtacagttttacaattcctgcccgttcaggggcgatgagtgttacgtaatccttgatttcgttgaatacagcttcgttgttcacatagatgttttcgaaagaaggattgaacaagtcgcgcaacaaacctacggcgcggctggtttcttcgtaaatcagtgtcggaaatttggtggctttttgtactttgacaatagcttcttcccaatgttttaatagaactttgagctctccgtcaagctcggccacgcgtttaccttcggcaacagtgcggacgatgacaccgaaattcttgggtttgatgctcatcagcagttgtttgaggcgggcgcgctcttcacttgatttaattttttgtgatacggaaaccttatcattaaagggaatcaatacaagataccttccggcaaaggagagttcggaagtcagtctcggccctttggttgagataggctcctttacgatttgcaccactacttcttgtcctaccttgagtgtgttggatactgttccgtccttttcaaggtcgggaagtatggttgctttggtaattggattaagcttttttttgtcgcttaaagtttgctttacgtatttttctaatgagttaaattgaggacctaagtccagataatgaagaaaagcatctttctcgtaacctacatccacgaagcaggcattcaggcccggcatcaatttcttgacacgtcccaaatacatgttgcccacagagaaggaaatgtttcttccttcgctttggagttccaccaggcttttgtcttcgagtaaagcaatggaaacttctttgggatgtacgtctacaacgagttcgcttgtcacaataatttgcttttacatttttgttatacagatgttttctgttcagatttaccggtacatcaatcttttttacattgacgaaccggtttgatacttaaacaaagaacaaacccgcgagacaattagcttcacaagtttgttctttattttgtccttcagactaaaaattactttttgcttttatgtctgttctttcttagtctttttttacgcttgtgcgtagacattttatgtctttttttcttctttccgcttggcatagcttcaaaattttatgggttaatactaattgtttattattttttcacagcaatggtgaatgtcttggcaggtttaaaagccggaatgttgtgttccggaatgatgatagtagtgttctttgagatgttacgagctgttttttgagctcttttctttactacaaaactaccaaacccgcggagataaacattttcatctttagataaagatgccttcactgcgtccatgaacgcttcaacggttgcaagcactgttactttgtcgattccggtgttctttgtaatttcgtttacaatatcagctttagtcatttttttcttaaaaaaaatattattactatagttttctaattttttggactgcaaatatatagctttttggcggctctaaaaaatatattttggacattttttgaaaaaagtcaaagcattaggttttgttagactgaaaaactgtatttttgttcttttgaaaaaggatgtgtgtcctttgggggtatgaaactatatatgaatagattgactgaagctttattggattggtacgcggataataaacgtgatttgccttggagaggcactactgatccctaccggatatggatttctgagattattttgcagcagacgagagtggtacaaggatatgagtattttcttcgttttatccgccgttttcctgatgtgagaactttggcttcggcttcggaagacgaggtcttgaagtattggcagggattggggtattattctcgtgcccgtaatctgcatgctgctgctaagagtatgaacggtaagtttccggaaagctatcaggaagtgcgggctttgaaaggggtaggggattatacggctgccgccatttgttccatagcctataatatgccctatgcagtagtggacggaaatgtgtatcgagtgctttcccgttattgcggcattgatgtacctattgactctacggaaggaaagaagctctttgctgctttagctgatgaaatgctcgataaatcccgcccggctgcttataatcaagctataatggattttggggctattcagtgtacgccacagtctcctaactgtatgttttgtcctttggcggatagttgttctgccttatcgaaagggcaggttatgcaacttcccgtgaagcaacatagaacaaagacgtccaaccgttattttaattatatatatgtacgcatgggcgcgtgtacctttatacataaacgaacggctgatgatatttggaaaaacctgtttgaattgccattggttgaagcggatagaaatctatcggaagaggaatttttatcatcggcatcctttcgctcacttatagcggaaggagaggtaccggaagtacgtttggtgtttcgaaatgtgaaacatgtgctgtcccatcgggtgatatacgctaacttttatgaagtcgttttgccggagaactcccgttctttttcggaataccagtgtatcagaatggaagatttggagcagtatccggtatctcgcttggtacatgcttttttggagaagtatttataaaagttggctgtattcttgcatgatgttgttattctcgctaattttggcaacaaattttaaaattgaaagcgtatgtcagtaaataaagtgatattattaggaaatgtaggcagagaccccgaggtgaggtatctcgataccggtgtggctgttgctactttccccttggctacttcagaccgtgcctatacattggcaaacggaacgcaagttcctgaacgtacggagtggcataatcttgtcctttggcgcggactggcagaaacggctgagaaatatgtgcataaaggagacaaactttatgtggagggtaaaatacggacccgttcgtatgatgatcagaccggtgcaaaacgctatgtaacggagatttttgtagataacatggaaatgctgtctgcaagaagtgcagcgcccggaactacaccgcaggcaggtatatccggacaaacggctgctcctgtacagtcaacacactcgcaggctgctcctgcacaaaataatccaacggacgatttaccgttctaattgtttaactaaaaccaaaatctttggacccagacgcttatttatgccaattggcagatatttttaacagtataaccgtacatactccttctgtttcggctattatagctattgtattggctggtgtgcttttgcttgcttccggttttgcttcggcttccgaaattgcatttttttcactctcgccgtccgatttgaattctattgaagaggggaaacatccttctgatgagaaaatcagaaatttgttggatgatacagaacgactgctggccacgatactgattacgaacaatttcgtgaatgtgaccattatcatgctctgtaatttcttttttatgaatgtattccaattccattcggttattgcggagtttttaatcctaacggttgtattgacttttctgttgctgcttttcggtgagattatgccgaagatttattcagcgcagaaaacattggcattttgccgttttgcagctcccggcattctggcatgccgttccatattctatccgttgtcgtcgatattggtgcgttctacatcgtttcttaacaagcattttgtgcgtaaaaatcataatatttcagtagatgagctttctcatgcgttggagttgacggataaagccgagctttcggaagaaaacaatatcttggagggcatcattcgttttggaggtgagacggctaaggaagtcatgacatcgcgtctggatgtggttgacttggaaattcgcacttcttttaaggatgtgttaaagtgcatcgtggagaacgcttattcgcgtattcctgtttatgcggaaacacgtgacaatataaaaggggtgctttatatcaaggatttgcttcctcatttgaataaaggagataatttccgttggcaatcattgattcgtccggcttattttgttccggaaaccaagatgattgatgatttgctgcgtgattttcaggcaaacaagattcatatcgctattgtggtggatgaattcggagggacatcgggtattgttacgatggaagatattattgaagagattgtaggggagattcgtgacgaatacgatgatgaagaacgtacttatgccgtactcaatgatcacacatgggtatttgaggctaaaacacaactgacggatttctataagataaccaagatagatgaagaaacttttgatgaagtggcaggtgatgccgatactttagcggggcttttacttgagttgaaaggggaatttccggcgcttcacgagaaagtaacttatggttattatgaatttgaggttcttgaaatggataaccgccgcatcttaaaggtgaaatttacaataaatgaaccggtacgggagggttcagaaacagagaagtaatgcctgtttttaaacaatatacagagagttcatataagtggggtatctggaaagcaagtgaaagtttggaagaactgcttgctttacttcctcataaagaaaaatatgaagagggcattggaaaatttacagccgtttctcgtaagttggagtggctggctgtgcgtgtattattatatacaatgcttggcgaagagaaagaaatacactattattccaatggcggaccctatttggcagacggctctttttccatcagtatttcacataccaaaggttatgtagcggtcctgttaggtgaaccggggaaaagagtcgggattgatattgagtgttatagcgagcgggtacggaaagtggcgcataagtttatgcgtgaagatgaaaaaaaatccttattcaaaggtacggaaacctggtcgttgttgcttcactggtctgcaaaagaaaccatgtttaaatgtatgaacgcttccgatgtcgattttcgggaacatttgcatgtaatgccttttacgcctgacgaacaaggtgtgttctccgccgccgaataccgtacggcggagaaacagatttttcaaatttactactatttgttttcagactttgtcctgacattgagtttgtagttacagcctttccaattgtactgtaaagtgacgcattaacggagcttcccaagtaatacgtactcctcttgtaattgtttcgcgtctgtcatatacatttttgagcgcagcggctattacattcatgtggttatcggtatacacgcggcgtggaatagccagccggagtaaatccagtccgttgaagcggttttcacgggtaacgggatcacggtcggcaagtaaataaccgatttcacatccgcgtatgccggcttccagatatagctcgacggttaaagtctgtgcaggaaactcttctttaggaacatgtgttaaaactttgggagcatctacaaagattgcatgtcctccggcgggacgttggtacggtattccgtattcatctaattttttagccagatattctatctggcgaatacgggtttcaagattattaaattcggtgttttcatccaagccgatggcaagtgcattcatatctcggccattcataccgccataagtaaggtaaccctcgaattgtacgcagaatccttttgctccttcataccagtcttgtcggcgggttgcaataaatcctcccatatttacgatgccgtcttttttggcgctcattgtcataccgtctgcaagggcaaacatctctttggttatttcctttatgctcttatcttggtaaccttcttcacgtgtctttatgaaataggcattttcggcaaaacgggcggagtcgaatatgacaggtttattgtatttatcggcaatattccggacttcccgtaaattttgcatggaaacaggttgcccgccggctgtgttattggtgatggtaacaatgataaatggtatgcggctgtgatgttcttgtaatgctttttccagctttgcaggatctacgttgcccttaaagggaatttccagttgcgtttgccgtgcttcatctatcgtacagtccagtgcaattgcctttcggctttcgatatgacctttggttgtgtcgaaatgagaatttcccgggataatatctccttcatgaaccagataagagaatagtacattttcggcagcacgtccctgatgtgtaggaatgacatattcaaaaccggtcaggcgggtaatgacttctttcaatttgaagaaagaagaagccccggcgtagctttcgtctccgagcatgataccggcccattgccggtcgctcatggctcctgttcccgaatcggtgataagatcgatataaacttgttctgattttagttgaaaaacattgtaatgggcttctttcaaccactgttcacgctcctggcgggtacttttacgaataggttccaccattttgattttccatgattcggcaaatggtaattccatagattattttttataagttagacaatgggtcaacggataaatccgtttttgtgttttatgtgccgaatataatgattttatagatgatgaacaatgtttttgatgactttctgtaaaacaaatgtccgggcgaatcacttcgaccggacatcatttaaataaacttggcagagtttattctcttttactttctttgaaagaggtttgatgaatgaaatgattggatagaatttatcccgttcattagactcaacgctttttcctcgaaagcaatgataagataatgcatggcaggtcttctgacttgtttctgttgcaggctgccttcccggaaaacgtttccagtggcatggagagagaattcattgtctgcaacattatgtaaaacttacagcagcgggactgttcaggacttgcacctgattcccttttaatcgcttcctttgaaaaaaggcggcaaaccaatgcatcgcaaagataatgaaaaaagtaacaaaccaaaatgaataaaagaaattatttctcctttgccaacgtaaaaacgaattccagtccgccaccttgattattcttggcggagattgttccgccatgaatgatgacggcattttttacgatggcaagccctaagcctgtaccgcccaattttcgagaacgtcctttgtctacacgataaaagcgttcgaacaaacgattcagatgttctggtgaaacgcctactccggtatctgcaaaactgaaataatagaagttctcatcctcacggaaacagttgatgttgatgtagatattggttcctgcataagccatggcgttatccatgaggttacggaatatggagtagagtaatgaatagttaccctttaattgtattttgggatgtagaccgttgactaccgtaatatgcttttcttccagttccaatgatacttcgttgactatattggtgacaagcatgctgatgtctactttctccatatcaatcatgttggctgcttcatccatacgtgtcagtacggagatatcccgtaatagacggctcagccggttgctttgggcataacaccgttcaaggaaagtctgcatcttttcgcgggggatgctttcattgctgacaattgtttccagatacccttgaatactgcttacaggggttttcagttcatgtgcaatgttctgtgtcagttggcgtttcaaacgtacttgttcttcttcctgtgtgatgtcattaatggatatttcaaaactcagatcctggaagatgatacattctacaatgaatatgcgcccgtttttattgatgttgatggagagacgcttctcttctttatccgaaggttttctttgtgccttactgataaaatcggtgattttttgaaattcgtaaatggaaaatatctcctcggtagtttgcaagttggaatcggagattaaattgccgtattgtgtaaagaggttattgactaagatttcttttttgtctttagtaaatacacccaatccttcgcgagaagtctgtaggtgtgtaatcagtttctcacgttcgatatataacgcttctttggtttcccgcaaacgtttatatatctgtataatgtgctgggatatttcgccaagttcattatgcgggaaagcagattgtatatcggtttccaccggttcgtttttatcggcgcgtttggcaaattcccgcagatggttgattgccgtacccagtttggatgtaaacttatagaaaacgaatatcagcaataaagtaacaatagctgtaaaccagaggtaatgcggatcggcagccagactatttaccaggtttacatcatagggtaatgccgagcgaatgatatactggggatagagagttgccgaatagaaatagggtatgcctgttgtttcggaggtgcgccttaaatcatatcctttgccgttctttaatgctttttggacttcctgacgattaatgtgattgctgaatgcttcttgggaagtttcattgtaactgtcataaaggacgcggccttgtaaatttacgatagtgacacgaaggtctctgtatgaacctttggctatataccggtttaaagtagatgtccatagactgtccggaatacttcgcagctcctgttgcaggcgttcgttatagtcttggagttgcgtgtcgagcagttctactttatactctttctcccgttgatattgataagcaataaaacaggctgcaaagacaagaaataatgagattaccgaaagaaataacttccggctgaatgacaggaaatgtctgtcattattcggcttcgaagcaataaccatatcctaagcgagttacaatacatttgccatatattcctatctttttgcgcaggcgggtgatgtttacgtctatagtgcggtccaacacatatacttcgtcactccagatgcggctcaatatgtcttcgcgggaaaatacgcgtcctttgttttgcagtagcaagagcagtatttcaaactcttttttggtgaggggggcttcctctccgtctatgcttactttctttttgatgatatcaagcactaatgatttataggcaatttgttcaggtgcgcgctccgtttcagtttgccgggtacggcgtaatacggctttaacgcgtgctgctacttcgcgtaaggagaaaggcttggagatatagtcgtctgctcctatattaaatccggttaccgtatcattttcggtgtctttggctgtgataaagatgataggaatcttggccgttttcttttctttctttagtatacttgccattttgaatccggaaatttcccccatcatcacgtccagtaatagcaggtcgtaagtactgatgtccattttcaaggcatcttcggcagagtttgcggtatctacttcgtagccttcattctcaaggttaaactttaagatttcgcataaatcttcttcgtcgtctactactaaaatccgatattcgttcattgtatttctgaattaatgtaatgagagacgtatagagtctctttattacaaagttaaactttatttcttttcttcgacaaaattgcggcgtttttgttacgatggaatgaaacaagtattacattgcgattacaaaatctctcttgcaactaattaagtattatctttgtattgttttaaaaagggtttctatatgaaagaattaatggatataaagaggtggggacaatctaagtggcgtatgccgttaatagtggctgtattggctgttgtaattattggttcgatttggttgaacgttgctcctttccgttccggttttgagataacggatgaattgggtgggaatatttttccttccagcattttgtctgttgcaacgacagatgcccaggtgattgtgccggctgattcgatgtttgtgggaaacccaaaatcttgtatcgctgtgaaagtccggtcggcaaaggcttatagccgggtgaggatagaagttgcggaaacccctttcttttcccgttccgtttcggagtttgtattggcaaggccacgtaccgagtatacaatctatcccgatattatctggaactatgaagccttgaagaataataatcaggcggagccgattagcgttgccgttacggtagagatgaataggaaagagttggggcagcgggtacgtactttttcggtgcgcagtatcaatgagtgtttattggggtatgttacgggaggtacgagatttcatgataccggaatattctttgctgcttatgtcaatgaagaaaatcctatgatagaccatttgctgcgggaagcattgaatactcgtattgtgaatcgtttcctcggttatcagggtagtcctgaggctgtcgataatcaggtttatgccttgtggaatgttttgcagaaacgtaatttccggtatagttcggtttctaatacaagcctgtccagcaatgtggttttctctcaacgtgttcgtacattcgatgatgccttggagtcatcgcaaattaattgtgtggatgggagtgttctgtttgcttctttgctgcgtgccataaatatcgagccgatactggtacgtacacccggacatatgtttgttggttattatactgatgcaaatcataaagatatgaaatttcttgagaccaccatgattggggatgtggatttggacgatttctttcctgatgaacggctggattctactatggtgggaaaaacgcagaatcagatgtcccgtataacctttgataagtctaaagagtatgcaagtcggaaatataaagagaatgaaaagggcattcattccggcagattgaattatatgtttttggaaatatccaaggatgtaagaaggcggatacaacctataggaaaatagtaaaggttgaatagtttataagattaaatagtactttgggaactttgtttccaatcactcacgttttctaattgcttgcacttctgttttaatattttttttattttatgtgttttgtgtatataaatgtttgtttttgattgttaataataccgccgctttttcagcaattttctattttccaaaaatgtgataaaagaattaacagaatgataataaacgtgtagtcgtttattatatatgctacttatccgataagaaataataatgtttattgttttatatttgccaatattttaaaatcataaaagcaaatgtattaatatttatttaatatattttaaatatatccctctttgatttgctgaattaatttataaatttgcaaataaatccaaataaaaagagcttatgaaaagaaattattgcttatcattagtgttgcttgcattgcttgggatgtctgtgccatattcggttgttgctgctgataatgcgctaagttcccaaagtactcagcaagccaaaacaatcacaggtaaagtagtggatgttgcaggcgaaccgattattggagccagtgtattagtgaaaggttccagtacaggttctgttactgacatcgatggaaaattctcggtagaagctccagtgggtagcacattggtagtctcatttgttggatatgctacggaagaagtgaaggtaggagcggcaagcgactatacggttaccctgaaagatgatacccagtcattgagtgaagttgttgtaacggctatgggcattaagaaagagaaaaaggcgttaggttattctgtttcggatattaattccaaagagttgatgaagaacaagcaaacgaatgtggtaaactctttggctggtaaaatccccggtgtaaatattacgcaggcaggtggtgctgcgggtgccggttccaatattgtaattcgtggcggtaactctgccagcgaatctcgtgataaccagcccttgtttgttgtagacggtattatctatgataactctacagtaaataccggtaattccggtacggatggcatgacgaaaactgcaactactttcagcaaccgtgtaatggatattaaccctgaagacattgagagcatgtccgtgttgaaaggtgctgcggctgctgcgctgtatggctcccgtgctgctaatggcgttattatcattacgaccaagaaaggtgaagagggtgctgtaagggtgaatgtaagcagtaaatatacctattcatgggctaataaattaccggaagttcaaaaactgtatggccgtggagaatataacacttccggtgcttttattgataagacgatggattcctggggagatcggattgatggtatggcttatgataatatagatgatttctttcaaggaagtagtgtttgggataatagtgtaagtgtgtccggcggtagtaagaacggttctttctatttatccggttccaattatcatcagtccggcattatccctacaactggttatgacaagacgactttccgctttaatggtgaacagaaatacggcatcctgacagtaggagccaacgtttcttattcgcaggcaagtactgataagacactgaccagtgcaggtttgtacggacagggcggtaacggtgcaatgaccgctgtttacggatggcctgtcgacgatcagatgagtcgctatctgaatgatgatggtagtaaataccgcatattggagggtttgcaggatttggaggatgatgttgaaaatccgtattggattctgaataaaaatactttgacggacgaaacatcccgttttacgggtgcagtcaacgcaagcctcaaactgacagactggtgggatgtttccgcacgtgcgggtattgataaatacactaccagttccaatacgcttcggcgtccgggtggtgcggtcaagcagatatatcagaacggttatatgtccaaaggtgatgtgaattaccaatacattactacgaatgtgatgtctaacttccataagactttcggtgattttgatttgaatcttctggtaggtactactacagaagctacgaagacaacgaataacacccgttggggatataattttgtaacggaagggctttacagtttcaacaatattattaaagccaaccagtatttcaaagagagtacggtacgcaaacgcatggtaggcctttacggtgaattccgtgcttcgtacaagaatcttgtttatctgacagtgacaggacgtaacgactggtcttctacattgccggtgaataaccgttcttatttttatccttccgtaagcggttcgtttgtgtttaccgaactgctgccgaagaacaacgtactttcattcggtaagatccgcggttcatgggcacgggtaggtaaagatgctgatgcctattctttgggatactatatgtggccggtagctacgctgaacggtggcaaatatggtatgggcaacagttggacaggcggtagtgtcggtttgaaacctgaaatacaggattcttatgaattgggtttggaaatgcgtttcttcaacggacgtttgggctttgactatacttactatcaaagcaagacgaaagaccagatttgtgcaccgcgtttggcacagtctacgggatacattttccttacgctgaatggcggttcggtagaaaataagggtatggagctctcgattacaggtaaacctattgtaacgaaagacttccaatgggaaacgacactgaatctttccggtaaccgtggacgattgggagattttatcgacggtgtggatattttctatgtgacggatgcgcaggttggtgcagccaaagccggctcaatacccaatggcggttattttttgggattgacgggtaataagtatgaaacggctcaagggcccgacggcaagatgtacaatgttatcgacccgtctacaggtttgtataaggatacgcaagttgaaaccaatattgtgggtaaccgtgaaccgaagctgataggtggttttaataatagtttcagctataagaatttcaacctttctttcttgttcgatatccgtctgggaggtgacatctataatgggaccgaatactatctcgtgacgaaaggattgagcacaaagacaataaacagagaatccgtatcatttacgggtgttgtcaatacgggcactgctgcaaaaccgtcttatgaaaccaaaacaattacctataatgccaatgaaacttatcaggttggtaactctacccgttccggcaagtatatgattcaggagtattataagaattatgccaagaacgcctataactttataactgacaccaattggctgcgtttgcgttctatttccttgtcctacgatttcaaggatttgttgaagaaacaaaatataatcaaggggctgactgctacaattacgggaactaatctgtttgtttggacaaactacaagggtatggatcccgaaacatgcgtttcaggttccggtacaggtggttccggttctgcaggtatcgactattgcggtgttccggccacagccggcatgtcgtttggcattaatcttacattctaataacagatttaaaaagataagagtatgaagaaactaatacatattgcatttggcttggcgcttgtgttcggcatgtcttcttgcgaggactacctggatgtgaatacagatccggataatccggtttccgaaaccgtatcaccgcagcttcgcctgccgtggatacagaactattatgcttacgcatggggtacagccagtatgcgtaccaatacgattgccggtatcatgacacagaccgggggcacggctgccaacagcctcttgtcatcatggaatcctgcccaaagttcatgtaccactatttatcagaatttttatctgggtgcaggtgtaaatatcgatcctttgatagagaaggcagaaacggaaggagcttatcattatgaaggtgcagcttattgcattaaggcgatgggatttatgatgatgctcgacttgcatggcgagctgcctgttcaggaagcgtttaccggtaagaccaatccggcctatgatgacggtaaaaccatgtatgaactctgtatggggtatctggacaaagctatcgagaattttggcaagcagcagaacaccacggctcccgcattgagtgcaggcgatttatggaatggcggagaggtttccaggtggctgaaattatgttacggtctgaaagcccgttatttgctgaaattatccaagaaagcggatttgtatgatccggaagctattttgacggcattgaactctgctcctcagtcgaatgatgacaacaccattatgaaacattataatgtggaaggggatgaggttaattttacggtgagcgacccttatcaggcttccgttatttgggattgtaccggatatggttcgacacaacgtctgacgcgctggtatgttaatctgttaactaataaatttacaggtggttcgggtgcggaagacccccgtttgtcaaagcttgttcctgccatgatgacaaatgtgaaactgaatgctgatggtaaaataacggctaatgaatggattcgtgatgccggggtggatgtgatacattccactacacgcgcagaaggcggtccggtagctgctttgtttgtaacgggtggagaaaccggttataataaggaaaaaggcggatttatgataacttatgatttatccaaagcggataatgaaacaaagacgaaatttattgctgatgctcaggccatacatcagacaacggtcgacggcaacaatgtgaccgtgctttatcaaaagggttctgcatattgcaataataaggattataagcgtgcaggtgatactatttatgtaaatttacgttctaacggtatggccaatagcgggcgaaacactacggatatgtattactataccgatgcgaaatcagactatgtgggcggtacgggtacattctatgcacgtcctaattcagattccgatattcttacttattcggaaatgtgctttatcaaggcggaagtccttttccgcaaaggagataccgatggggcattggatgcctatcaaaaaggcataaaggcaaactttgaccgtatgcaggctaaattgaaatcatgggaagccgaaggaacaaagaatccggatcagaagccgatggatgaaggtgaaatcagtacttatatggcaagtccttccgtatgtcagaatgctgccagtctgaccttgttcgagattatgcgtcagaagattatcgcattgggcatcaataccgaaaattggaatgatatgcgccgtttggattatgactatgtggattatgaccgtccacaggatttcacggctgtcagcaagattgtaggtacttctaagaatgagcctacttattggttccgtcgtttcagccagagtactcatgagagcaactataatctgactcagctaaaggcatccaacaaacaagccatgacagacccgatttggtcgtgtccggtttggtgggattgtgcgacagataatgagtattacggttacattaagtaggtcataaccttattagtttatagaatgttaatttaaatatcttaaaatcttgatgcacatattatttcattgattatctttgcactcgaaatatggatttataagatatattaaaatattggagacctaaacagtcttcattcatagatgatgattggaacgaaggtgtgtcgtaatgcacgatgcaccttc

SEQ ID NO: 4105 - DNA, 50472 bp, Unknown
  gut microbiota DNA sequence
ccctcaatatacgtttcgttctgtgccccataaaacgctggttcgaactggtacgtttggaaaaagtaaaagaggtgcgtgctgaagaatgggatgcttccactttcaacacaaatcaccattactatttcccggtaccttatcaacaggtagaccttgccggctggaccaataatgcaggatattaatataccacaaaacttctaaccttatttttatttgcaataatctgataaacagaccttaatcaatttaacatgtaaagagggaaggatcgtgagattcttctctctttttcttataaacaatatacccggtatacgaaaaacctgtatctttgttcacatccaattaacgctataacattatcacattcatgaaaagatataagctgatacttttctttaatattttcattcttctgacagcatctgcgcaaaaaatagaaaacctggttgagttaaaacaacagtcggaaaaccgtttgtttcaccgcctggataaagccccacgcacacctgcctttgcatccgaaggttattgggtatggggcagctcaatagtaaagggagatgacggtaaatatcacatgttcgtatcccggtttcccaagaaattaccatttcatccgggatggatggtcgcgtctgaaattgtacatgctgtgtccgatataccgcaaggaccttatcgtttcagtgatatcgcacttcccgcacgcggtgcacagtattgggacgggcgttctacacacaatccgcgcatattgaaacaaaacggtaaatattatctcatttatatgggatctacacacccgtttgccgaaccgacatacgcgcagctcaccttagacagcccctggtgcaccgttgcccgcgccaataagcgcatcggactggctgtagccgattctccatatggtccctggaaacgtctggacgaaccgatactcaaaacccaaccgggtacattctatagtttccttacctcaaatccttctccaatcatacaggaagacggttcagttctcatgatcttcaaagggcgccattacactaacaattacgaacattcggcaatgagtctcggaatagcctatgctcctgcaatagaaggtccttaccatgtattgaacaacaatcagcctatctttgaagtagacggacaaggtgaagccgaagaccctttcctatggaaagacaccgaaggctatcacatcctattcaaagaccatgtagccaaatttacaggagaacggggcggtggtgttatggcacactctgaaaacggtatccagtggacagtagacaaggctcccaaagcctattcccgtaccatagaatgggaagacggaaaagtggagatgcaagggcaactggaacgcccctttattttctttgaaaacggcaaacctacttacattttctttgccactatggatggtcccggcggattcgagaatgcgtcacactcttggaatatggttattcctataaaagataaagaataaaaacgtatctttgcggttatgaacaagaatttattgcctatccatttcgctcctcttcaaggatatacagatgctgcttaccgacaagcacatgcttgtatcttcggcggtatcgacacctattattctccttttgtacgtgtggaacacggtgaaatccgccgaaaagacatacgcgatataaacccggaaaacaatcggaatatacacctgatcccccaactgattgccccccaaccaagcacgttggaacagattgtatccctttttatcgagcataattaccaggaagcagacatcaatctggggtgtcctttccccatgctggccaaacggcataacggagcaggaatgttgccgtatcccgaagaaataaaagaactactgaccgccgccacagaaaaatatcctcaaatccgtttctcagtcaagctcagattaggctgggaaaacgccaatgaatgccttgcactcctaccgttactgaatacacttcccctatcccacatcatcctgcatccgcgtttagggaaacagcaatataaaggagaggtagatttaaacggatttgaagctttttatcatggatgcgataaacccttgttgtataatggggacctgcatacaatagaagatatacagaccgttaccgaacgttttccgagattggcaggagttgtaatagggcgtggtctgcttgccaatccggctttagcttgggaataccagcaaaacagaaagctgtctcctgatgaaatgctatccaaagtaaaacagctacatacagcgatatacaacagctatgaagaacagttacaaggcggtgaaacacagttattgatgaaaatgaagaacttttgggaatatctgctgcccaacggtaaccgtaaagctaaaaaaactatacataaaaccagtaaactaaccaattaccggatagcagtaaacgatttgctatcttcataccaataagaataacaacagagaaagaaagtgtgtcaaaatgcttttcggtcattatcggcctaacgtcttccaacgatgatttaatgacagaaatgaaagaacattctaagcaaagttaatgacaggatgtaagattatcagcattttaacacactttccgatttacatattcggaattaaatgcacctcaggacgtatttgaactacatgatgcagtttcatccactcattcaaataagcacgatgttgtaagagaatttgccgatactttttctctatagctaagttcctcatttctccgcggtcattcaccatgtcataaagctgctcacgatacagccctttatcatacaatacatatttataacgcggagtacgcaaggcccaacctcgggcaactcctttatcaaatgtagtctcactgacaatataaggctggtgtacctgttgaggatcagctttttccaccaaaggcctaaaagagacgccatgtaaacctccaggaagggaaattcccgcccagtcacatacggaagcaaagaaatcgacaccttcattaataagttggggcatttctttcccggcattcttctttccgggaagggtaactatcaaagggacattcactacctcttcatataaagccgatttctggttccaatgatgcgcacccataccatcaccatgatcgcttgtaaagataactaccgtattcttccacaaatcctgtttatcaattgcatcgacaatcttaccaatctcagcatccaccttttccaccaaccggaagtaaaggctgcgataacgccgccaatcatcaggagaataatgacgggttggataagccgaatagttcaatgtctgttcataatctattacatcggcatcataaggattacgggcaaaatttgaaggaagtccgggccattcatcttgaggaagttcgggcaaattgccaaatggcaagttctgactgcgcgcatactcacagatattatggggattatcaaaacccactacaagaaaaaagggtttggaatgtttctgctcaaggaaagcaacggaagcttcagccaagccattatcattatgcggatgaatggtagaaaagccgaactcaccatcgggcatggaaggggtatgtacatgccattttccaccataagcacactcataaccggcacgttgcattaaccagcctaaactggcagtacgcaaagaatcggccataggaacgttgtttcggaagagtccgacttcgtgggaagtatgtcctgtaaacatggatgccctggaaggaccgcttaacggagcggagcaataagcatttttaaataaaatacctgcctgtgccaaacgatccatattcggcgtgtgtacatctgtatttcccatacaactcatggcagaagctgtctgctggtcggttacaatataaataatattaggcagctcctttgcccccaataaagagggggcaaaggcagttgcacaaaacatgatattctttaattccgtcatgacaaaaaagatttaatcaaaacctatttacgcaacaactctacatcaaagcttgcagcatccttacacgtaaaacgcaacactgtttgtttcttatctgccgaaacaagtttgcaatacggtgtttccgctactttccaccaacctttcaatgtaacagtcacgggaatttctccactctcgttatcaatccacggacgagaatagatactccgttcaatccgctttccatccttatcaaaagcctcatcactcggaccgcggtacaatgccaaatccggctgggaaacagtcagtaacagtttgcctctatcttcacgaatcataaccagacaggaagtatccgccttctgtaacagaccgtctgcaggaagcgtttgaggagtttcaaacaaaacataagaggtaagattatccgtcaaagaacggactatgtgggcattacgatcctgctgaagaactttataggaaggtttcttcgcaaatgctttcagggaagcagcatccgtacggggcaatacggcatattcataagaagcacctctcggagccttaccatgttgcagcgtcaaggaaacccaatcgcctgaagtcggctttgtacttcgttcaccgactgtaacctgcgggaaattcttttcatatttcgcacttctcatagaggatttggaaagatagtaccctaccccattcggatcaatataagtctgtccgtcactcttgtaaccattccagtatttatgattctcaggagtaatggctgctaattggaaaacagttgtctcggtaggatactctgtattcgtattctcaatgtccgtacctaaacatactatcgtaccgtcaaagaagtggaaagacttacgggcacggtgagagccgttatatttatcatgctcatgcagcttcataccgaagttaccattcaggcgggcctgagacagcccaccggcaaaggcctcatcggaataaagcatttcttccatacctgagtaaacatccacattcaataccttggcgcgcaattgctcaaaaggcagatgaatactcgtcactcccggaatgcgattccagtcgaagccgttttcttgccagccactagtagtaaaagtcaccatttcatcgggtttacccgttaatatctgcatactgccatgtgccagataacggccgtagaaattggcgggaagatagtgttcggcagcccacagataacgggaatgtccacgcactacagccgcccaattatcccgacgctgtacggaaacacaaccgtagcccaatgcaaggttgccctgcggatcgggttcggggcggaatccctgtgcttcaagcagtttcttcatctccaactcttgacgagtggaagccttcggaagataatcaggagcatcttcatcgagcctattgacataagccatcaaacgcagataagcagcagccatgtcggcatcatattcctgcttaccgtccggtgttcctgcaatagccatagtagcatattgaatgggaatcagttctccttttccgttaggatgacgacctgacatggaaagagaccattgcttcaaattacaataaaaccgcatcgtgagcagcacgttcttaacagtggaatgcgccagttcagacaccttgaactctgttccgctcaataaataaatcatattcgtggctccatccaacccaccgacagcataagcgggatagttattacgatgatgaaaacaagctccatctttcttgaaagaacccgacaatccttgagccggacggcatccataatccaaccaacgcgagaaagaacgcagatattgcagcttttccggagtatcctccataatcaggatactggccatacgtccctgggtctgcgtattgaaagaatctatatctataccgtttacggtaggtttaggataaacctcgttagtgatggcataccagcgcagcgtgcgttcggcttcattcagcttgccggcttcattcagtacctccttcatcaggaaataggctacatagagtccgcgcatactgtaaccgtaatgatggatgtttccccaacaactgccgtaagccacaccttggtcggtaatatggtcgtacatggcaaggaacttttgcttcaattcatcctgcgcagcaacatccgctgcattgttataggctatggcaatacgtttcatcagtttgaaatacttgtccatttccatacccagcttggtaaacatatccttatcccaattcggtatcatacgttcgtaagcttctgcctgacgcaccatgaagataggcagaccgctcactttcccgtttttgtacgtaatcttatagtagtcatactgtttacggatagccgtcatttccttatctgacaaccttccgggtgtatagagcatatccctgaagcgtttttctattttccgcatttcctgtttctgcgtttcgctaacggcagtcaagggtatatccggcttccacaaagaatgttcgtaaataacaagccaatgattggtagttcccttattcacaaacggaacttgcacgtcagccgtctgctggcgggcatccaccttactggcgggtataatatgatctaaatataacttcccttttgtatcgggagcaataatacggatttcattcatcccctcttccggcgtccccaccatatcacgttcatagcacacccatgctgcacgccaaccggtaaagttgattccaaatgggaaagaagtgcatttctttccatcttttaaaaattcaaactctattttcttgtcctgtgcttgctcattgtacacccatacaatgaaagcggaaagataggtatcttttccggtagggtcttttttctcgaacttcaaatcctttttgatagaaagcacagcccccggattaaatgtccaactcaagctctgcaaaccatctttataatgttcatcactgatttccaaacgggaatccgttcccgaaataaataccggtatttgcgggtcttcaaaagaaagcagtttgtcattcttcactacctgggcttctgcacttaccggtaacaaagtcccgaggagcatccctactcccattgtccatttactaaattgcatcatatttgttcatttaaggttactataccgtttacaaagaaagtcctctttcagaaaaaagagcgacataaatcgtacagaagaggtctaaaaatgttataacgctttatacaagatacagaacaggacgacttcgtaaaccaacgctttacccacaaagaagttaagtggtgcatagaactgcaccagcaacatttgttatgatttataaccacctaaattaattttacaatccactgattatcaacacatataaataagattctattcagtcgtatactgaatccatttgaatcgcatactgaacacgcttcagtatacggttgaacagttttctctttgtatgataaggagtctaaggatgaagctcctcaaagcttttattctcctcctgcattgtacggacagtctcttccagctccccgataggcaggtctagattataccaatcattatagcagtcggtcacataccaattaccatccaccagctcaaacacaacccggagcgagggctccgactcgtcataccccgcctcaaattctttataggcaggttcatcccgggtaaaacgtgagatgtaaactcctccttcctcttctgtgatacgtccttctttcaaggtttcactatccagcaacgcccatttatcacgggtaaaaggaaaagtctgctctgtctcgccgtcatcctgcaacaatacgataggcgatttcaaaggaaacttgatacgtgaatactgaaatgaagcactggatgtaaacttatggagaaatgacttgaaatcctctccggctgccagactgttgaaagttgagagcataaacgccatgcacagacaaacaacaaaattaatagctttcataatagatacgaattattccgatttaaagtgcaaatatacgacaagccggaaatttacaatgaaaagccggcgggaatttacatctgttacttcttacccctcagatactcataaccgaagcgacagcgcaaacagtccttcctgtcgcaatattccttttgaagctgaagcaaagcctgtgagtcggccgcagtataaacgggaagtccggctccactccacagacgggtgacatgattgttctcggctttcaatgcttcaagaaaacaagttgcacggtcacaaagccgttcatctgctctgtgcattccgtaagcatacagaaaagggataacggtgttgataagaataaggttcaaagcattctctcccaaacgcttttcttgatggggcgagctttttttaaacgtaaaatgcgtctcccaatagggcgaagtccgtgcggatattatcttctttatatcttccgcagtttcggccgccataactcgtgaaaacaaagattgttccttatgatacagccaggcaagctgtgccaggcgcacatgggggaaattgccgggacgcaaacgtaaaaaacgccaccggtcaccgctcactggagctgacaattcgaacttgcgctgcaaataatggaactctttctgaagttcccggtagtaacaatcctcctgccaatcttcttccaaaagcccggcctgtcccaaaaagaacgcctctacctgaaaaaggctatcccgatgcttgtctactgcacggaaaggcagatgagcggcccacgcttcaaaagcatcgccattcagaccgaaacccagattacgggcaagggtaataaagaatacatcttcccaatgattgttgcaacgctccagacgtgcggcaatggcctgtgccttttgttcaaaacgctctacctgcaaagccgataaccaggaatggaccgtcagtttcggtaaggaagcaagaatggaataacaaggagggtatatttccgtctgacgtaattcgtcataacaccggcggacattgtccggacagtgcaacagtagctggggaacaataccgccgttggcatagtacacctcgcaatccgactcgcccaccacatgcagaataacattatcgtaaaccgtatcccggttatgtccgtgacgaaaccagtccgaagcctgcgtatgcaactcaacgttacccacccaaagcgtaccgtttattttcagttttgcgttaaagaaatcggggcctgcatcagtattcggcaaaccgggatctatcacttcgaccggctgtccggaggttgtctggagtggcattaaaggaaatatcttatgcttccaaacgtaatgcagcaattgttccattgttaacttatcgttaatgttgtgcgcaaatgtaagaaaaagattacctttgcgacatatagttcgttgataaactgaataaaaaccaaagaaacaatgaaaatcgcattaatcggttacggaaaaatgggtaaggaaatcgagaagattgccttaagccgcggacacgaaattgtcagcatcatcgatgtgaataaccaggaggattttgaatcggccgcattcaaaagtgccgatgtcgccatagaatttaccaatccgacggcagcctacaacaattatatgaaagctttcaaggcagacgtaaaattggtttcgggcagtacaggctggctggaagaacatggtgaagaggtaagaaagctttgttccgaaggtggaaaaaccctgttctggtcatctaatttcagtctgggagtagccatattctcggccgtcaacaaatatctggcgaagatcatgaaccggttccctgcttacgacgtaacaatgagcgaaactcaccatatacacaagctggatgctccaagcggcactgccattaccctggccgaaggtattctggataatctcgaccgcaaaagccgctgggtaaaaggtaccttgcaagcaccggatggaaccgtgtcaggctctgtcgaatgcgctgccgacgaacttccggtcagctctatccgcgagggagaagtaccgggcattcacagcatccgctacgattcagaggcagacagcatcaccattacccatgatgccaagacccgcagcggctttgctttgggagctgtgttggcagcagaatatacagccggcaaacaaggtttcttaggcatgagcgatttatttccatttttaaaagactaaagtattatgagaaaagcaacacgtgcccaatgggtcaaattcggcatagttaccctgctctacctgatgttccttgtctgggtgaaaagttggtggggactgattgtccttcctttcatatttgacgtctacatcagcaagaagataccctggagtttctggaaaaaatccaagaatccggctgtgcgtggcattatgagttgggtagacgccattgtattcgccttggtggctgtttattttgtgaatatctacatattccagaactatcagataccttcgtcttcactggaaaaatcattgctggtgggtgactttctgtatgtaagtaaaatgagctacggtccgcgtgtaccgaacacaccgctttccatgccgttggcacaacacactttgccgatattcaacaccaaatcgtacattgaatggccgcaatggaaatacaaacgcgtaccgggtttcggaaaagtgaagctgaatgacattgtcgtgttcaactttcctgcgggtgatacggtagcgcttaacagacagcaagaagatttttacagcctggcttacagggaaggacagcgcgtatatcccaataaaatcaatatggacagtctgacgcgcgaccagcagcgtaccgtctacgacctttattacaatgccggccgtaatctgatccgtaccaatccgcaaatgtacggtgatattgtggtacgtccggtcgaccgccgcgagaactatgtaaaacgctgcgtcggcctgccgggagataccctgcaaatcaaagatacacaagtgtacatcgacggaaaagccatcgagaatccggaagagatgcagctcaactatttcgtacagaccaccggcccgtacataccggaagagatgtttcgcgaattgggcatcagtaacgacgaccagatactgatgaccgatgacttcaattatgaagaaggacttatgcagatgggattggaccgccgcgatgctcaaggcagactgactccggtgtaccacctgcccctcacccagaaaatgtacgatacgctcgccggcaataaaaaactggtcagccgcatcgtcatggaaccggaaaacctttcaggacaaatgtatccgcaaaacctctatacaaagtggacacgggataattacggtccagtctggataccggaaaaaggtgcgaccattaccctgaacaaagataacctgcccatttacgaacgttgcatcgtagcttatgaaggcaatacactggaacaaaaaccggacggtatctacatcaacggacagaaaacagacacctacaccttcaagctggactactattggatgatgggcgacaaccgccataattcccttgactcccgctactggggcttcgtaccggaagaccacgtagtaggtaagcctatcgttgtctggctctcattagataaagaccgtggttggcttgatggaaaaatccgttggaaccgcatcttcaagtgggtacattaatacagtgaccggaagttagcgatcaatacacactatgcggagaaggaattggaagattgcagctaccctgaccggagtaatacttacagtgatattgctccggagttgcgttgcaacttcctatctgattccttccacaggaatggaaaactcactgtaccgcggtgaacgtatcctggtaaacaaatggagctacggactacggttgcctttcataaacttatgggggtatcaccgttggggcgacaaaccagtacgtaaggatgacattcttgtattcaataaccctgccaacctctcacaaacagcaatcgaccagagagaagtatacatcggccgttgtctgggagtaccgggagatactttgtgggtagattctcttttctccgtaattccttcggaaaaaaacgctcccgaccagaagttcctttatacatatccccggaagaaagagaagcagttagactcactgctcactatcctttctatccgccccaacgtattattgggacaggatacagcaaaaaacgtacgcagcttcagcaggtacgagtattatctgttggaacaggctttaggaacaaacaactggatagagcctgccgataaagaagactcggttgacgtactgaaacctctcatcatccctggcaaagggaaagccgtacgtgtatatccctggaacatgacactgctgcgcaacacattggtgttgcatgaaaggaaacgggcagacatcaaaaatgatacactatacatagaaggaaaacctgtacagcattgttactttatgaaagattactattgggtgggtgccaacaactcgataaacctgtcagactcccgcttgttcggacttgtccccaaagaccatgttatcggaaaggccgccgtcatctggttctcaaaggagcaggatacgggattgttcaacgggtatcgctgggacaggatatggagaagaataaagtgataatcaaacagccaaatgataaagtaccaggcagtaactcctgccggttcttattttttaatttttaattcttaaatgctcaattcaaatgaccgtctatctttcttccgcctatctggctccggttgaatactataccaaactgttggcatacgaccaaatatatatcgaacagcacgaccattataccaaacagacatatcgtaaccgttgcactattgctgcgcccgacggtgaacttgccctttccattcctacagtcaaacccgacacaccgaaatgcccgatgcgtgatatccgtatctccgaccacggcaactggcgtcatctgcactggaatgccattgaatcggcatacaaccatacacctttctttgaatattacaaagatgatttccgccctttttatgaaaagaaatatgagtttttagccgatttcaacgaagaactttgccacctcgtctgctccctgatagacatacagccaactatagaacgtacctcagagtacaaagctatatttacacccaacgaagtagattttcgtgaacgcattcatcctaagaaagacttccgcttggaagatacggatttttttccgcaaccctactaccaggtatttcaggaaaaactcggcttcctgcccaacctcagcattatcgatttgctgttcaatatgggaccggaaagcttattgatattgcaacaaagcaattcatctgttcattccaattccatcacctgatacaaattatataaattctgagacttttctaacaataagagaagtattaattccatatctttgccatacaaacctaaagaatacacatctgtataactaaatacataaatcatgaaaaacttattcgacattaaaaacaaagtaatcgtcataacaggcggttgtggcattttaggaaaaaacatcgccaactatctggccgagcaaggagctaaaattgtaattctggaccgtgtggaagaggcaggcagggaactggaagccgagcttaaccgaaagtccgaagccctgtttctcgtaaccgacgtactgaacaaggaagtgctggaagaaaacaagaaagccatcctcgaacgcttcggcactatcgatgtgctgctgaacgccgcaggcggcaacatgccgggcgctaccatcgctccggacaagaccgtgctcgacctcgatgtggatgcattccgcaaagtggtagacctgaacctcttcggtacggtgcttcccaccatggtgttcgtagacgtcatggcaaagaacaagaaaggcgccatcgttaatttctgctccgaatccgcccttcgtccgctgacgcgcgtagtaggttacggttcagccaaagcggccatcggcaattatacacgctatatggcgaccgaactggcaaccaaattcagccccgaactccgcgtgaacgccattgttccgggattcctgctcaccaaccagaaccgtgcgctgctcaccaaccccgacggttcgtacacagaccgtgcaaagaccatcattgcccacactccgtgcggacgctttgccgaaccggaagaactgttcggaaccatccactacctcatcagtgatgcttccagcttcgtgaccggggcactctcggtggtggacggcggtttcgacgcattctccatctgatgaaatccgtgagagtatgccaaaataaaactcacttgctatctgtttctttttaggcacggattacacggatttcacggaaaaagggataaaataaatccgtgtctatccgtgtaatccgtgcctaaaaaagaaatcatcaagtgtattttggcacatcctcattcataatagacagacatatactttataaacttataccattacaatatgatactttgtgaacaaacctggcgctggtacggccctaacgaccccgtcagcctatgggacatcagacaggccggagccaccggcatcgtgaacgccctgcaccacatccccaacggcgaggtgtggacggtggaagaaatcatgaaacgcaaggagatgattgaagccgcaggtctccgctggtcggtcgttgaaagcgtacccgtacacgagcacatcaagacgcagaccggagatttccaacggtatatcgacaactacaaggaaagcctgcgcaacctcggcaaatgcggtgtgaacatcgtgacgtacaacttcatgcccgtactggactggacgcgtaccgaccttgcctacgagcttcccgacggcagccgcgccctgcgcttcgaacgcgcggccttcatcgctttcgacctcttcctgctgaagcgccccggtgcggaagccgattacaccgacgcggaaaaggccagggccaaagcccgcttcgagcagatgacggaagacgacaggcagttgctggtacgcaacatgattgccggcctgcccggttcggaagagagctttaccttggagcagttccagaaagagcttgaccgctataaggacatcacccccgaaaagctgcgctccaacctgatatatttcctcagcgaagtctgtcccgttgccgacgaggccggcatcgagctggtgatccatccggacgacccgccctgctcaatcctgggcctgccgcgtatcatgagctgcggcgccgatttccaggctctgattgacgctgttcccaacaagagcaacggtctgtgcctgtgcaccggttctttgggcgtaagcagcgccaatgactgtgctgccctgatggaacagttcggcgaccgcatcaacttcgtgcacctgcgcagcacgcaacgcgatgaggaaggcaacttctacgaagccaaccatctggaaggcaacgtcgacatgtaccatgtgatgaaggctttcctcgagctgcagcagcgccgtaaggtttccatcccgatgcgtcccgaccacggtcaccagatggtggatgacttgaagaagaaaaccaacccggggtactcctgcatcggccgtctgagaggattggcagagctgagagggctggaaatgggaatcgccaaatccttgtttgaataaggaattcctttaaaaacgtgctaaaagccattcaactgcaatgatactgcgattgaatggcttttttataacctgataccccatattgagaaattctttcctatatttgccccttgaacccccaaaacagatttatcatgaaaaacttaacactccaacgagtggctgcggtagatgtattccgcgcactcaccatgttccttatgctcttcgtaaacgacattcccggtttgaagaatgttcctcactggctgatgcacgccgctgccgatgaggatatgctgggattttccgataccatcttcccggcctttctgttctgcatgggcatgtcagtatcctttgccatacagaaccgttataaaaagggcgatacaaccacacaggtcattgcacatatattctggcgtacggtggcgctcattgccatggggctgttctcgcttaacagcggcggcattgaaggcggtctttcccattcctggtttactatccttatggtaatcggtttcttcctgacatggggagtatatccaaaggccgaaggtacaaaaaaagcccttttcaccgtaatgaaagtggcaggcgtggtattgcttgcaacgctggttatttataaagacctcaacgggaaaccgttccatacaagttggtggggaatcctcggtcttataggctggacatatgccgtatgtgccggcatctatctgttcacccgcgaaagcctgcgtaaaaacgcggttgcatggtttgcagtgataacgctcgctgtaatcagccattccggccttatcccggaagagtacggaagccgtatcctgttgctgcctttcattcccagtgactggacgctgcacgcattcggaatgtcgggtctgctgacctccttgctcatgcaacgctacgccaatcgcgaacacccaggcaaattcatcggtatgctctgcatccttggtgccggcatgttgattcttgcactggtttcgcattcatactggattatctccaagatacaggctaccccgtcctggctgttttattgtcttgccgccttcttcccgttattcggctttttctattggctgaccgatgtaaagggcaaaaccaaccggttcgatataatcaaacccgcaggaacggcaacgctcacttgctacattcttccctatatatggtactccgtccagcaattagccggctggacttatccggaagcattgggaagcggtgtaccgggactgctcaaatcgcttgtcttctccatcatcatcgtacagttgacaggactgctggtgaaaggcaaaataaaactgaaagtttaaaatacttcatgactatgttgaaaattcaaactcccaacggcgaagacagagttctgctccattcctgctgtgctccctgttcctccgccatcattgaatgcctgctggcaaacggcatccgcccgacagtgttttattgtaatcccaacatctatccgcaagaggaatatgagataagaaagcaggaagccgttcgtttcgtaacgtcccaaaacctcgatttcatcgatgcggattacgattatacccactggcggaacacaatgctgggactggaaaacgaaccggaacgaggcagccgttgcctgaaatgctttacattacgcctgacggaaacggcacgctatgcttccgaacacggcttctctgtctttaccactaccctcgcatcttcgcgttggaaaagcctcgaccagataaacgaagcgggaaaacgggcagccgccctttatcccggtacaatcttttgggaacagaactggcggaaaggcggattgcaagaccgccgcaaccagctcctcaaagagtatgacttctataaccaactgtactgcggctgtgaattcagcagaaagcggttggaacagcctgaagagaataagcgggaataaggcatttttagtaaagggagattccaaaaacaagcagccggaccacacatcctaattcgtcagacagttgttaccctttcgttcaacaactgtctgacgaaaggataacggatgtctgacgaaagggcaacatccgtctaacgaattaaattcaataagagtccggcataacaatccctgcttcaacaccagagttcagcaacggaaaaggctgtcaatcgtaaacaagtgtcgataaataatcctccgcaaacatctcgtttgccacttccaacagaatttcgggagtcagttgtccgatacgccggaacacggcttcggccgtttcatatttattgtaatgcaggaaggtctttgccatgccgagggcattgttctcgttattgtccgaagccacgcctatctgcccgataagctgttttttggcggcggcaagctgggaagaagtcatccgggtatcgcgcaggcgtttcagttctttatacacaaggcgggtacaaagttccgcatcctccgggtcgcaaccgaaataaatacagaaagttccggtatcggtataagaagtcaggttggactctacattatagaccaacccacgccgttcgcgcaaggccacattcagccggctgttcatgcccggacctccgaggatgttattcagcagatagagcgccgtacgcttgtcttcatacgcattgtaccccctactgccaatcatgatgtgcgcctgatgggtatctttgtgtaaaaccagatttttcggaacatataaaggcgggggcgtacgacggttatcgacagcctcagccggaatatcagccaatagtttttccgcccaacgcaccacttgtctgaaatccatattgcctaaaacaaagaacaccatattgcccggacggtaaaagcgggaagtaaaggccgccgcatcttcgctgcggaacttcttcaactgttccggattgccgaggatattacgtcccagaggatgcccgcgaaagattaaatcctcaaaatcatcaaaaatcagttcggacgggttgtcttcgtacgactggatttcgtctataatgacctctgtctccttttcaatctcccgctgagggaaagtggaatggaatacaatatccgtcagcaactcaaaagcacgcccgaaatgttcggtaagaaatgcggaataaattacggtttcttccttattggtgtaagcgttcaaatcgccgcccacattctccatgcggttcagaatatgccacgccctgcgcttcctggtgcctttaaaaataagatgctccacaaaatgcgccatcccctgctcgttttcgagttcatcgcgtgttccggcatccaccgcaaaaccacaataagccaccttcgacaaggagggttcatggatgatgcgcaagccgttcggcaatgtgtgctgattatggcgaggctgtatttcttctgttaaattcttcattcttacgctacaaacagtttaccggcacaaaaatacaataaaacttattgccgtttatggaaaattacggatatttgtagacttataatccataaatcaaaattgagacaatgatagcatccattcaagagcttttgcagaaagaagcgcaggccgtattgaatatccctgtaacggacgcatacgaaaaggcggtagaacttatcgtagaacaggtacaccgtaaaaaaggcaaactggtaacttccggcatgggtaaagcagggcaaatagccatgaatattgctacaaccttttgctcgaccggcattccttccgtatttctgcatcccagcgaagcacagcatggagacctgggtatcctgcaggagaatgacctgctgctgcttatctccaattcgggcaaaacacgggaaatcgtcgaactgacacagttggcgcataacctgaatccgaaactgaaatttatcgtcattacaggaaatccggacagtccgctggcacaggaatcggatgtatgtctcagcacaggaagtcccaaggaagtctgcatactgggcatgacccctaccacttccacaacggtaatgaccgttataggagatattctggtagtacagaccatgcagaaaaccggatttaccattgaagactactccaaacgtcaccacggcggttacctcggagaaaaatcaagagcgttatgcgtaaagtaatcggcatcggggaaacgatattagacattattttccgtaacgagcaaccttcggctgccgttccgggcggttccgtattcaatggaatcgtttcattgagccgcaccggcgttccagtctgtttcatcagtgaaaccggcaacgaccatgtaggcaatatcatcctcaggttcatgcgtgacaatcatatctctacggactacgtcaacgtatttcctgacgggaaatcgcccgtttcgcttgcctttctggatgacaacagcgatgccgaatatatcttctacaaggattatcccaaacagcggctggatgtcatatacccaaaactggaagaggacgacattgttgtcatcggctcttactacgcattgaatccggtgctgcgcgagaaagtgttggaattgctcgaccaggcacgcgaaaagaaagccatcgtgtactacgaccccaattttcgttcttcccataaggaagaggccataaaattggcgccgaccattattgaaaatctggaatacgcagacattgtacgcggctcgcaggacgatttcttctatatgtacaacctgcgcgaagcagacaagatatacaaggacaagattaaattctactgtcccaatttcctatgcacggcaggagcggaaaagattgcgctccgcaccgcttccgtctccaaagaatatgacataccgccactgaaagccgtaagtaccgtcggagcgggcgacaacttcaatgcaggcatcatttacggcttgctgaaatacgatgtccgctatgacgacctgaatacaatcggtgaagccaagtgggaccagattatccgttacggcatggaatttgccgcagaagtctgcaaaagctacagcaattcggtgtcaaacgagtttgcggagagatgcaaatattgagggccttctctaatcagcacttaaaaataaattatcatttaaaaattataaaagcttcatatacgctgtataatctgcaacgaaaaaccatatatttgctgtaaacgacattagagagtttacgaattatgtataagaatctgttgaacttgcttgttctggcagtgttgcttccttcttgcagcggcacagctccacacatatccgttgtatgcgaagaaaataatgtagggaactgtatcgtcaaatgggaaatggctccgcttatcaaagggaacataaaagtatatgcttcgaccgatcctgacttcattccggaagatgttcccgtggccatggccgatatctcggacttgaaaatgaccatcgtcacgaacgatccgaccaaacgttattattacacccttttgttcgacgacaaatatcgtgttaagattgccacgcgcaatatcaacattcccggtgtacagaacttccgtgatttgggcggctatccttcttattccaccaagaaacagatgcgctggggaatgatttaccgctcggcagagatagacagccttgaatgttcctcacgcagggagctcaaaaacctcggcatcaagacacttatcgacttgcgggcttcttcggagataggcaggcagtcgccgctgcaaaaagggttcaacgtcgtgcatatcccgcttgccacaggagatatggaaggcatactgaaaggcatacgggaagaaaaaatcaaaagtgacaccgtctaccgcatggtagagcgtatgaaccgcattttaatagaccaatataccaaagaataccggcagatattcgatatcctgttggataaaaacagttatccggtagtcatacactgttcctccggcaaaggacgtaccggcatcgtgtccgcactggtgcttgccgcactgggaataaacgaggacataatcatggaagattaccggctgagcaatgattacttcaacattccaagcgcctccaaatacgcttatcagttgcctgcacgctcgcaggaagccatcactacccttttctccgcacgcgaggatttcctgaacgctgccaaagacgaagcggaacgccgatacggtgacatgaatacttacctgcggaaaggtatcggactaagcaagaacgaaataaaaaggttacggagtattttgctcagtaattaatgattaatcgccaaaaaactcttatctttgcgccaaatgcgaagataaaccgcacctcggcataaaaaacagacaagtttattttattatgctcccggcttgcattatctttgcacctgaaatataaagatatacaaagatttaatgaagacatttgaagagctcggtgtgtcgccggagatacgccgcgccattgaagaaatgggatatgcgtgtcccatgccggtacaagaggaagtaatcccttaccttttgggagaaaataatgatgtagtagcactggcacaaacaggaacaggaaagaccgcagcgttcggtctgccgcttatacagcaaatcaacgttaacaaccgaataccccaatcacttattctttgccctacccgcgaactctgtttacagatagcgggcgacctgaatgattactccaagtacatcgacggtctgcgggtattgcccgtgtacggcggttcgtccatcgaaagccagatacgtgccctgaagcggggggtacacatcatcgtagctacccccggacgtctgctcgaccttatggaacgcaagaccgtctcactctccaccatccagaacgtggttatggacgaggcggacgaaatgctgaacatgggttttacggacagcattaatgccattcttgcagatgtgccccaagagcgtaacacactgctgttctccgcgaccatgagtcccgaaatcgcacgtatttccaaaaaatacctgcacaatgcaaaggaaatcaccatcggacgcagaaatgaaggaaccagcaacgtgaaacacgtggtgttcaccgttcatgccaaagataagtacgccgccctgaaacgcatcgtagattactatccgcagatatacggcatcatcttctgccgtacccgcaaggaaactcaggaaattgccgacaaactgatgcaggaaggttacaatgccgactctttgcacggtgaactgagccaggcgcagcgcgatgccgtcatgcagaaattccgcatacgcaacctgcaactgctggtggctaccgacgttgccgcacgcggtctggacgtcgacgacctcacccacgtcatcaactacggcctgcccgatgatacggaaagctacacacaccgcagcggacgtacgggacgtgccggaaaaacaggcacatccatcgccatcatcaacctgcgcgaaaaaggcaaaatgcgtgaaatcgaacgcatcatcggcaagaaattcattcagggagaaatgcctaccggcaagcaaatctgcgagaagcagttgctgaaggttattgacgaactcgaaaaagtaaaagtaaatgaggatgaaatccgtgatttcatgcccgacatttaccgcaagctggactggttgagtaaggaagacctgattaaacgcatggtttccctcgaattcaaccgcttcctggactactatcgcgaccgtgaggaaatagaaattgccaccggcagtgaacgcagcgccaaaagcggcgaacgcggcagcaatgcccgcaaggcaactccgggctttaaacgtctgtttatcaatctcggtaaaatggacaacttcttccccaacgaactgatcagcctcctgaacaacaatacccgcgggcgtgttgaattaggccgtatcgacctgatgcagaagttctctttctttgaagtggaagacaaagaagcgggcaacgttataaaagccttaaaccgggccaactggaacggccgtaaggtttctgtagagattgcgggagaagaagggaaagacgctcccaaaggaaaacgcaggaacgaaggcggcaactacggcaaaaaggaatttgacggcaaaaaacgcagctacaaggatgagcgtcgcagcgaggttgccggcaaacgcagcgataagaccgaatatgcctctaccgacaagaaaaagaacaagcccagtcgcgaagaacgcggttataccaaggcacgcggcaaaaaagacgattggaaacagttctttcaaggcaataacgaatttaaagattcagaaccggacttcagcgaagaaggctgggcaaaacggacacctaaaaagaaataagcaaacgacgtgaacaaagtcaacggttttttatatggactattgtcttctgccagcttcggattgattccgctatttacaatcccggccatgcagcaaggaatgggtttctggtctattctattatatcgttttcttttcgccatgctggcattggcaggcatactgctgctcgacaagcagcctttccgcatacgccgtaaggagatattgccgcttctgctgctggcatgcctttacgacagttccgcagtattcctcttttgggggtatcagttcatgtcgagcggtgtggccaccacccttcatttcatgtatccggtgctgactacgcttatcatgatgatattcttccacgagaagaaatctttgtggcgcatggcggccattgcactggcagtagccggcgtatttttcctgtccaacggagacggtacgggaagcgtcacctggtccggcatattcattgttttgctttctgcattgggatatgccctttacctggtaacggtaagccaactgaaaaatctcgaaatgaaagggcttaaaatgacgttttacgtctttttgttcggcggtatcctgttattcaccggaacggaaatctccgggatagggttacaggccattccggaccgcaccacattgggcaatctggtgatgcttgcgttagtacctaccgtaatatccaaccttgcactggtacgcgccatcaaaaacataggctccacactgacatccgtattgggagctatggaacctgtaacggcggtatgcgtaggcattgccatcttcggagagccgtttacccgaagcatagcactgggcatcctgctcatcatttcagccgtaaccgtcattattctaaaaagatgatggagtgacaaggtgataaataacagtgtaacaaagcaatagggtgacaaagcaatgcatcatcactttatcaccctattatcttattgctttttatctcctatttcgcacagctcttggtactgaaagcaacgagcatccaaaccattttttcctgctctttcaggtaaccggtcattaagtcggccgttgcatcatcaccggcttcattggccagttctatcacttttctttcttcaccgataagataactgtaagtttcgaggatatgctcaacagcctcaccgccacaagtaataccggagatttccttcactttggcaaccttgagatattcgctgaatttgttttcgggcgtaccgcccaacatcaagatacgttctgcgatttcatccactttctctgcggcatcgttgtacatatcttcaaatttgccgtgcagcacgaagaacccgtgtcctttaatatcccaatggaaaccgcgcaaattggtataatgtacctgaaagtctgccaatagctgatgcaatgccgatactacgtcagcaactttcttttcattcaaatgtaagtaatctaaagttttcataatctttctattttaaaagttcatactatttttctttgttcctgttgcaaagataagcggcaaataagtgcttgtcaaacagataatttctatctttgcatagaacgattctatatataacattcaaaagccctgtttctatgactttacaacaattggaatacatacttgctgtcaatcagttccgtcatttcgccaaagccgctgaatattgccgggtcacacaacccaccttgagcgccatgattcaaaagttggaagaagagttggacacaaagattttcgaccgcagccagcagcctgtgtgccctactcccatcggccttcacatcatagaacaagcccggaatgtgttggttcagacccatcgtataaaaaacattatagaagaagaaaagcattcgctcagcggaattttcaaactgggcatacttcccaccatagccccctatctgctgccgcgtttctttccgcaattgatgaagaaatatccgcagcttgatatccgggtggtagagatgaagacgaacgacatcaagaaagccctgcaaacgggagacatagatgccggaatcgtagccggtctggcaggaatggaagaattccggcaaataccgttattctacgaacagttctacacgtatattgcgcgggaaaaccgtcttttcaacaatgaagtcatacggacttcggacttgacgggagaacagctttggctgctggatgaagggcattgttttcgcgaccaactggagcgtttctgccaactgaaggcagcccgtgccagccagttggcctatcatctgggcagcatggaaacctttatgcgcatggtagaaagcggcaagggcattactttcattcccgaactggctgtcctgcaactgaacggcacgcagaaagaactggtacatccttttgccatcccctgtcctacccggcaaatcatcatgctgaccaaccggagttttatccgcaacacgcttttaaatacaatcgcccaagaggtaacagcggcagtgcccaaagaaatgctctccctgaaagccactcaggtactcgtatagattttgtctatcggcccataaaacctttcaatcggattttttgttctaccggagaaaaatgctatatttttgcaaacaggaaaaacaaagatcggctgcacctcggcataatcaggcaagcctgcttctgcattcggtctgcacaatctttgcaccggtaaaacaaaaaccaaaccttttaaaaagtataattatggaaccgattatcaactctcaactccctgaattcaaagttcaggctttccaaaacggaagtttcaaaacagtaactaacgaagatgtaaaaggcaaatgggccattttcttcttctatccggcagattttacgtttgtatgtcctaccgaactggtggatattgcagaaaaatacgaccagttccaagccatgggcgtagaggtctattccgtaagtacagactctcactttgtacataaagcatggcacgatgcttccgaaagcatccgcaagattaaatacccgatgttggcagacccgacaggaacattgagccgtgcattcggtgtgatgatcgaagaagaaggtatggcttatcgcggtacattccttgtaaatcctgaaggaaaaatcaagattgccgagattcaggacaacaacatcggacgcaatgcggacgaactgctccgtaaggtggaagctgcgcaattcgtagccactcacgacggtgaagtctgtcccgccaaatggaagaaaggcggtgcaacgttgaagccgagcatcgatttagtcggcaagatttaatcgtacccccatacgatagacattactatgtaaagactatctccatttcttccttgcaagagtacaagaaatgagatagtctttttttatactccaacatttaaaaacctgcatcatcatgttagaagcaactatattagaccaagtgcggagcatattccaaccattggaagcccgctatacctttcacatcacctgcaatccggaacatgaacaggccggtgagatgattgattttctgaatgacatagcgagctgttccgacaaactgtcctgccaggtgaccgaaaccgatgagcccaaactggagtttacgctcctgaaagaagggaaagaaaccggaataaaattccgtgccgttccgggcggacatgaattcagttcgctgcttcttgccgtgctaaacgccgatggaaagggcaaaaatctcccggacgagggtatcggccgccgcatcaaggcattgcaaggcccaatccatctgcaaacctatgtgtcgctggcctgtaccaactgcccggacattgtgcaggcgctcaatgccgtagcactgctgcatccccatatcacccacgacacaatagacggagccgtctttcaggaagaagcggatgcgctgaaaatacaagccgtaccgtccgtttacgccaatgggaagcaacttcatgtgggacgcggttctttaggggaactcctgaaaaaactggaagataccttcggcagcctgccgcaagaaaatgcagcacccgtcttaagggagttcgacgtgctggtcctgggcggaggtcctgccggggcttcggcagccgtttattccgcccgcaaaggattgcgcgtagccattattgccgaacgaataggcggacaggtaaaagaaaccgtaggcatcgagaacctcatctccgtaccccggacaacaggttcacagcttgccgacgcactcaggacgcacatagaacattacccgatagagatttttgaagaccggaagattgaaagagcagagcttcagggcaaagagaaaaaggttttctccggtggcggagaaacgtttacagcccctgcggtaatcatcgccacaggcgcaagctggcgtaaactgaacgtagagggagaagccgaatacctcggacgcggtgtagccttctgcccgcattgtgacggccccttctaccaaggcaagcatgtagccgtcatcggcggcgggaactccggcatagaagcggccatcgacctggcgggaatctgcaggaaagttaccgtcttcgagtttgccgatacgctaaaagccgaccaggtattgcaggaaaaagccggaagccttcccaacgtggagatattcacttcttcacaaaccacccgagtgacgggcgacggagagaaagtaaccggtatccgcatcaaagaccgcatcaccaacgaggagcgcgactatcctttggacggtatcttcgtacaaatcggtctggcagccaacagcgcacctttccgggacgcattggaaacgacaccgaccggtgaaatcaagacagacgcattctgccgcaccacgcttccgggtgtttatgcagccggagacgtgtccgacgtaccctacaaacagattgtcatagctatgggtgaaggggccaaagcggcattgtccgctttcgacgaccgcatcaggggaatcgcataaccggctattttccggaaacgattttcagttcccgtatcaaatctccggctttgccgtacttctctatcatgaacaggatgtagcgcacatcgaccccgatgcagcgctgcatcttcggttcatagagtatatcgctgctcatcgcttcccaattgccgtcaaaagccagtcccagaagttcgcctctggcattgaacatggcgcttcccgaattgccgccggttatatcgttattggagataaagcaaacgttcatttctcccttttcaccggcatatctgccaaagtcgcggttggagaacaaagaaagaagttccggctgcacctcaaaatccacatcgcctgcatgggtctttaccttttcaagaatacctttggtcgtggtataataatcgtattcagcaccgtcaaacggggtgtatccgcataccgtaccgaagctcaagcgcatggtggaattggcgtccggatagaaattacgcgatgaatacatcctgcgtacggcagcattcagcaagcgctcattacgggcgatattcatggcggactctctcgtctgcatattgatttcaaacatcttgccaatcaggtctatgcccagatttatggcagggtcgtcatagatgttataggtagtgtcccgctccagaaaacgttttaatccgcgaggggtagtcagttccgaagcggcatacaaactatccgcataggccttgtcgttaccgccgtaccgggtggcaatcgtaccgtaaaactccggtaaataggtagaatcgaccttggaacgatattctttcaccatggcagtaaagacttccttgtcgatttccaaatccagattggcgtacttttctacaattgctttcagattggcctcaaccgttttccgttccccttcaaaatcaaaattcaaaatggacaacgccaattgtatcagttcgggaccgttcaggaaagattcggcaaaataagccagagcacggttggcttcacgggtatttttatagtccagttccaaatcgggaaacaaccgcaacagcttctcacgttctccgggtgtctgttgtatccagcggcgaagctcccgctccatggcacgcttcttttccaagacatgcaatttccggatagcccggttcaccccgatgctgttcttccagtaattggagctttcatcgtatttggaagcatactttatgcggatactgtcccgcctgtccatttcgcgcttccagatagcctgcttgatgccccggacatctatttgtgcctgattgccgttgttcatcatctcttcgatgccaaacgaagagaggtaacgctccgtgctgcccggatagcccaatgtcatgcagaaagaaccctctttatacccgtccagagaaatcggcgctacgtattcgggacgataagggacgttttccggcgaataatccgccgggcggttgttcttaccggcatagatgcgaaatacgcagaaatcgcccgtatgacgcggccacacccaattgtccgtatcccaaccgaacttgcctaccgaggaaggcggtgcaaataccagccggacatcgttatagtcgcggtaaacagacagccaaaactcattgccgccatagtacgcatctacaattcccaccaaagtagagtccttacgcgccacttcctcactgatggcaaacatcaccgaatctaccgcaccggaacgctccggctcggtcatctccggctttaccgcaccaagcacccgtttcgttacattctccgtccgcagcagaaagcggacataaagctccggattcggcagttcctcgctgcggttacgtgccacaaagccgtctttcagatagtcatgctccacggaagaatgctgctggacgctactgaaaccgcaatggtgattcgtaaataccagtccgtcttccgacacgaccacccccgaacagaaaccgccgaaactcactacggcatctttcaatgagggacgtctggcactgtatagcttgtctgccggcatttgcaaaccgagctctttcattgcccggcgcgtctgtttattcagattacccagcatccacatgccctcatccgcctgcaccacccacacagaaaggcagcaaacaaccactgctacaaatctcaaaaccatatcgttctctacttaactttatataagtttgcctgcccgttttgtactcccacaccgacagcctgtgcggccggacgcttctctttcaccgcatccggacatcactccgcaatcagcctcagcttttcggaacccgtacgcgctctcagccattcggttattttctccctttcacgggcatccggatgcttgccgaacttcaggacggcaagcgtaacggtatctatccgtaccgaatcgaccgtcagctcaagcgcgtgcgaaatggaaaccgacttgacggagggataaagcaccttcagctcagggataatctttttgcccaattcatcgtatttacggtactgttccaagtccttttccaaagaagaaatctgctgtttctgctccaccagacgctgttcgctgttcttgtagaaatcttccataaccatggcgcggatagacgacatatccagcgactcgttattcattccctgaagcacaaccagcttcgtattgtccagtttataatctttcattttactgcgggcgatggcaatagaggcttccggcacttcctgacctatcaggactacccgtatctcatggtgcttgccctcatggtggattttcttatccaatacctgcgtattctcaaaggcgagctgctcgtttacaaagcggttggccgcactttcaaagaaagtatcctgaataattcccactgtgagatacaccgccggacacatcgtaaggacagctatcagcacgatatacttccgcaccttcttttcacggttcttatccacaaactccttgcgctggaagtgcattacccgtacgccgataaaagtagccagactgatgaatacggagttaatgaaataaaggtagaatgcaccgaggaaataaatcaggtttcccgttgccagtccataacctgccgtacacagcggcggcatcaatgccgtggcaatggcgacacccggaatcacattgcctttctccttcgtggagagtgccactactcccgcaagaccgcccatcagtgcgatgaatacgtcataaatcgtcggtgaggtacgcgccagcaactccgactgcccctcggcaaccgggcttaccaggaaaaagacggtagccgtggtgacactgaacagcgtagttatcaggaaacttttcaacgagcgcttcatcagctcgaaatcgttcagacccactgaaagccccactcccatgataggtcccatcaacggcgagataagcatcgcaccgataattacagcggtagaattgacattcagaccgagtgaagccataaagatggcaaatatcagaatccataaattagcccctttaaactcgacacccttacggatggagtctacagtggcaagttcattgtctttatctttgcgcaaatcgagatactctttcaggaagttcttgacggcaaatacattccggttgggattgacaggctgttccataaaaataattctattttcggataaaacgattgataacaggtatttgactaagcggcaaatcgcgctttataatataggctataaacaggcataacaacagcgtacggaacgtcatacgcagacagatgttttcaataggtacacattccgcagccacataaagcaccgcagccaacagcacatagcaccctatcgactttaaatcgtactgaatcgggtatttcttctgaccgacaaaataagagagcagcatcgcaacgccgtaacccgtaaatccggcccatgcgcaagccatatacccgaacttcgggattaaaaagatattcatcaccaccagaatcgtgcagcctatcagtgagaaataagctccccaacgcgtttcgtcaatcagcttgtaccagaaagagagattgaaataaattcccatgaagatttccgcagccattacaatgggcacaacacgcaaccccggccaatagtcgcggccgatgatgtagcggagaatatccagatagaacatcactgccagaaaagccaccagtgtaaagatgataaagaacttcatggcctgcgcatacacctgcttgttgtccttatcgcggctcttgccgaatacaaaaggttcgtaggcgtagcgaaaagcctgtgtcagcatcgccatcaccatggcaatcttgctggcggctccatagatgccgagttgtacggtggctcccgcctggtcgggatagacaaagggaaagataatcttgtccgccacctgattcaggatgcccgcaatgcccaacaccagcaacggcaggctataagcaagcatccgcttcagcagtttcctgtccagcacataagcgaaaccgcgcaattcgggtatcatgcacagcatgatggtagaagtgcacacaagattgaagaggaaggcatacgccacatcatcgcccttcatccagacataataaatcaagttcaaggctatgttcaggaagatgaacagcagtttgagcgctgcaaacttgacgggccgtttcttatagcgcagataagcgaaaggaatgctttgaatggcatccatcgccactacaatcatcatcattcccacgtaccagggatgctctccgtattccagccagtcggcaaccggttgaagaaacagcagtcccagcgcaagaaatgtcagcgcaccgatgcctacgctgagcaatgttgtggaatacacccgcatcgggtcgtcctctcctttattggcaaagcggaaaaagcccgtttccatgccgcacgtcagcagcaccagcaacagtgccacccacgcatagatattagtcacaacgccatagccccccgactgtgcagacaaggccatggtgtatacgggcactaacagatagttgaggaaacgccccacaatactgctcaacccgtaaatggcagtttcttttgccaatgatttcaatccagccacgttattcagtgttttattatactctctaaccggttgcttatcaataagcgtcaatcattaaataacgtcttctggctattgtagaggctccgccccaaatgtttataggccagttccgttacttcacgaccgcggggagtgcgtttcaggaagccttcctttatcagaaacggttcataaacttcttcaatggttcccgcatcttctcccaaggccgtagcgatggttgtaagtcccaccggaccgcccttgaacttatcgataatcgtacaaagtatcttattgtctatctcatccagtccgtacttgtcaatgttaagcgcctcgagtgcgaaattggcgatttccgtatcgatgctgcccgaacctttcacctgtgcaaagtccctcacgcgacgcagcaaggcattggcgatacgcggcgtaccgcggctgcggcttgcgatttccgaagcggctcttgtggagcagggtacgtccagtatgcttgccgaacggcggataataccgctcagcacatcatcgtcataatactccagatggagattgatgccgaaacgggcacgtagcggagccgtcagcaaaccgctgcgggtggtggcccccaccagcgtaaacggattcaaatcaatctgtatgcttcgcgccgacgggcctttgtctatcatgatgtcgatgcggtagtcttccattgccgaatacagatactcttccactacgggactcagccgatgtatctcgtcgatgaaaagcacatcgttcggctccaggctggtgagtacgcctgccaggtcgcccggcttgtcgagcaccggaccggaagtaatcttgaaacctactcccaattcattggctataatgttggaaagtgtggtctttcccaatccgggaggaccgtgaagcaacacatggtccagggcctcgcccctgagacgggcagccttcacgaaaatgcgcaaattatcaaccaccttatcctgtccgctgaaatcctcgaagttcaaagggcggagagcgttctcgaagtcacgctccttgctggtgagctgatgctcgcgtatgttaaaatcttcttgttccattaaaattcaatctatacaacgacaaagatagtgcaaaccgagagcagaataaaatgaatccattcattttttatatcgaaatgccgcttatctccgcttccggacaaagataaagaaatctttcaacgtttcataaactccttcctttcttcttccgggaatttctctatggcatagcacagcattgtccgcggcatcaccttgctgtgtttctcaagaaactgcaccagcaaatccttatccctctttcccatctcacgcagcatccagcccaccgctttccgcatcaaatcgtgcggatggtgcagcaaccgttccgaaagcgccagaatatcggtgaaatcaccgtttttgataagcgtataagtagaaaccaccgcaatgcgttgttcccagagcaacacaccgtctgccaggcgataaaggtcgtcgcgggatttgtctttcagatattctcccacgatacccggagcggacaagtctaccaaatcccagttgttgatacgtgccgtctgcgaaaggtagaagtcataaataagcttcctttccttttcaccgcttttcttaaaacgctccaccagcatcagcaaagcgcaaagccggcactcgtgccactgactttgcagcagttccgccattacagcaaacggagcatccttgtgttgcttcgccaccgtgcgggtattcggaaccactacacccagaaatttatcgccttcgccgtattctccctttcccgtcttgaagaaacggggaagatattccctttttaccggatcggcatacgtctccaattccctttggatatctgcggcaatatccgctatttcttccgttgaaatcggattattctgcagcgtacctgccaatgggattttcctttttctcatcactcaccgtttgatttacatgtacttgaattatcttgccagcagacaaaaatacgccaaatctatagaaactatgaaaagttatctttaattttgcaacagatacacactttagtcactaaaaacggaacaccatgcataaagtatttttaggaaccgcctgtttcctgttttccgccctgttgctacatgcacagtcaccgctcgaaaaaggattgcaaagcatcaaccgtacttccgcagaagccattgtggagtttctggccgatgacgaactgcaaggacgcgaagcaggcatgcatggttctcgggtagcagcccgctacatcgtatcctgcctgaaagaagccggtatccgccctttggacaagaacggctattaccagcctttcgaggcatacgccaaggaaaggcagcaacgcggacgctggcaggtacaccccgactccgttgccgtactgaaacaaagcacgcaccgttccctgaaaatggataatgtgctggcatacattcccggtaagcgcagcgatgaatatgtcattgtaggcgctcacttcgaccacctgggcgtagacgaaacgctggcggacgataagatatacaacggtgcggacgataacgcatccggcgtctccgccgtattgcagatagcacgtgcatttgccctcagcggagaaaagccgctgagaaatgttatcttcgccttttgggacggcgaggaaaaaggattgctcggttcaaaacatttcgtacagcactgtccgtttctcaaacagataaagggttatctcaacttcgacatgatagggcgtaacagcaagcccgaacaaccgcagcacgtagtctacttctacacagccgcccatcctgccttcggcgaatggctgaaacgggacatcacccgctacggactgcaactgcaacccgactaccgtccctgggacaaccccgtgggcggaagcgacaatgcctcgttcgcccgttccggcatccccgtcatctggtatcacaccgacggccatcccgactatcaccagccgtcagaccacgccgcattactgaactgggaaaaagtcgtggagataaccaaggcatccttcctcaacgtatggaatcttgccaacgaaagcaactattaatatttaagaagaagagtaaggacacatggttttaaattacatctgggtagcatttttcgtaatcgccttcattgtagcactctgcaaactcctgtttatgggagatacggaaatatttacggaacttgtcaactccacattcgactcatccaagaccgcattcgaaatatcactggggctcaccggcattctatccttatggctgggcatcatgaaaatcggcgaaaacagcggtatgataaacgcgctttcgcgctggctgagtcccgtgttctgccgcctcttcccggaaattccccaaggacaccccgccatgggttccatcttcatgaacctttccgccaacatgctggggctggacaatgccgccaccccgatgggactgaaagccatgaaagagcttcaggagctgaatccgaaaaaagataccgctaccaacccgatgattatgtttctggtaatgaacacgtccgggttgatactgatacccgtcagcatcatgatgtaccgctcgcaaatgggcgctgcgcagcctacggacattttcatccctacgctgattactaccgccatctctaccattgtcggtgtcaccgccgtcagcattgcgcaacggataaacctgctgaacaaacccattcttattctgatcggttgcatcagcctgttcttctccgggcttatttacctgttcacccaagtaagccgcgaagaaatgggcgtttactccacgctggttgccaacatcattctctttaccatcatcctgcttttcatcctgtggggattatggaaaaagattaatgtgtacgatgctttcatcgaaggcgccaaggaaggatttacaaccgccatacgcatcgttccctatctggtggcattcctcgttggaatcgccgttttccgcacttcgggagcgatggatatcatcgtaaacggcatcggttacatcgtcggactatccggagcggacaccgagtttgtaggtgcgctgcccactgcattgatgaaatcgttaagcggcagcggggccaacggactgatgattgatacaatgaagcaatacggtgccgactcttttgtcggccgcatgagctgcgtggcacgcggcgcctcggataccacgttctacatccttgccgtctacttcggcagcgtaggcatcacaaaaacccgcaacgccgtcacctgcggcctgatagccgacttttccggtatcatcgccgctatcatcatcagctatatattcttcttttaaaaaaactggaaatagtatgataagttatcagacagacggcatcgaaatgcccgcaatcaagaagcgcgaaacaacggaatggatcaaagccgttgccgccacctacaacaagagaatcggcgaaatagcctacatcttctgttcggacgagaaaatcctcgaagtgaaccgccagtaccttcagcacgattactacacggacatcatcactttcgactactgcgaaggcaaccgcctgagcggcgacctcttcatcagcctggatacggtacgcaccaacgccgaacagtttgccggcaatgactacgaacgggagctgtaccgcgtcatcatccacggcatcctgcacctttgtggcattaacgacaaaggaccgggagaacgggaaatcatggaagccgccgaaaacaaggcgctcgccatgcgataaaatcaaaaggcgtatcggcaagcaaagttcaactctcccccctatcgtttttttgcacaatctctcgtcactcgtcactaaccacctcgcatccctttaccagagagggattgcggatgtgacgaccaacatgataagggtgatgacaaacaatcggtcgtcaccctcaaaaacaggctatgcactatgggtcaatgcattaacccaataatcagaaattccatataagcgactttttcaacgatttccgaggtctgaaaaggttttatacgggcaatcgggaagctaatcccgtagataaatgttccattccctctttcttttctttgtttcgcaccgtatataataccgctttaccacgttactttcttcgttttccaattgcaggctccgcggttgccaattgcgggctgccgggcccgcagccggcaaccgtccgtcccgcaactgcgggacgaagaaaagaacctgcctttcggatattttccttaaacgaataagagattatatacaaggcgaaagaagattacatacaggcaaaacggaaagaaacccgcgaggtatttcctaagaattcacaaggaaaggagataaatcgcggctacaaaataactttttagtaactttgcatggttttaaaagagattgaacgaatggagtttaagtatgacgttatcgtaatcggcgccggacatgccggctgtgaagccgctgccgccgccgcaaacctgggttcaaagacctgtcttatcacaatggacatgaataagataggacagatgagttgtaaccctgccgtaggaggtattgccaaaggacagattgtacgcgaaatagacgccttaggcggatatatgggattggtgaccgataaaacggctatccagttccgcatattgaaccgctccaaaggccccgccatgtggagtccgcgcgcgcagtgcgaccgcaacaaattcatctggacatggcgcgagattctggagaatattcccaacctgcacatctggcaggacaccgtacaggaaatcctcgttgaaaacggcgaggtaaccggactcaccaccgtttggggagtgaccttccgcgccaaatgcgtcgtactgactgccggaactttcctgaacggactgatgcacgtagggcgcaccatgcttccgggcgggcgcatggcagaacccgcatcttaccaactgaccgaatccatcgcccggcacggcatcacatacggacgaatgaaaacgggaacccccgtacgcatcgacggacggagcgtgcattacgaagatatggagattcaggaaggagaaaacgacttccataaattctcctttatgaacaacggcgtacgccacctgaagcaactgccgtgctggacctgcttcaccaatgaggaaacacaccgcatccttcgtgaagggctgccggattctccccttttcaacgggcagattcaaagtatagggccccgctattgccccagtatagaaaccaaaatcgtaaccttccccgacaaggaacagcaccagcttttcctggaaccggaaggtgaaacgacgcaggagctttacctgaacggcttctcttcttccctgccgatggacatacagattgcagcgctgaaaaagattccggcattccgcgacctggtgatttaccgccccggctacgcaatagaatacgattactttgatcccacccaactgaaacatacgttggaaacgaagaaaatcaagaacctattcttcgccggacaagtaaacggaacgaccggctacgaagaagctgccggacaaggaatcattgcaggtatcaacgcgcatatcaactgccacggcggagaaccgttcaccctggcacgcgacgaagcctatataggcgtattaatcgacgatttggttaccaaaggcgtcgatgagccttaccgcatgtttacttcacgtgcggaataccgcatcctgctccgcatggacgatgccgatatgaggctaaccgaaagagcctggaaactgggacttgccaaagaagaccgctacgaactattaaagagcaagcgcgaagccgttacaagcatcatagagtttacccggagttattcgatgaaaccggcattaatcaacccggtgctggaacagctcggcactaccccgctccgccagggatgcaagttggtagatttaataaaccgtccgcaagtaaccttggaaaacatggcagaacatgtcagcgctttccgtcgggaactggacaagattacggaacaggataaagttgcagacagaagagacgaaatagtcgaagcagcggaaatacttatcaagtacgaaggctatatcggacgcgagcgaatcatagcagataaactggcacggctggaaagcataaagattaaaggaaggttcgactataattccatccagtctctttctaccgaagcccgccagaagctggtgaagatagatccggaaacgatagcccaggcaagccgaattccgggagtgtctcccagcgacatcaacgtactgctggtgctttgcgggcgataaggggcaacgttccacgtgaaacaaagaattcaataaacgtattaaataaactgattatgagcaaagaaacacttgccaagaccattcgggaaattcccgacttccccatccccgggattttattctacgatgtgaccactctgtttaaaaacccgtcggcactgcaagaactttcggacaccttgtatgaaatgtacaaggataaagggataaccaaagtggtaggtatagaatccagaggcttcatcatgggccccattctcgccacccgcttaggtgcaggattcgtacccatgcgcaagcccggaaagctgcctgcggaaacaatcgaagaaagctacgacaaagagtacggcaaagatacggtacaaatccacaaggatgccattgaaccggacgatgtagtattgctgcacgacgaccttctggctacgggcggaacaatggaagcagcctgcaaactggtgaagaaactgaaccctaaaaaggtatatgtaaacttcattatcgaattgaaagagttgcatggaaaggagatattcagcaaagatgtagatgtagaatcggtattgacactctaaagaaacaaccgggtggtaaagcaatcacatcgctgcatgagaatgtatcgccgcatgctcttggcagcgtattgctttaccacctttttctttactacctttttcttacgatatggacgaactaaaaacaaatgattacctgaaaggtatcgttctgaaccttcccgaaagtcccggtatttaccaatatctgaatgccgagggaacgattatatacgtagggaaagcaaaaaacctgaagcgccgggtctcttcctacttcaacagagaacatgaaccgggaaagacacgggtactggtgagcaagattgcagatatccggtatatcgtggtcaacacggaagaggatgccttgctgctggagaacaatcttatcaagaaatacaaaccccgttacaacgtactgctgaaagacgacaagacctacccgtccatctgcgtgcagaacgaatatttcccccgcgtattcaagacgcggagaatcatacgcaacggttcttcctactacggcccgtacagccacataccatccatgtatgcagtgctcgacctcatcaagcatttgtacccgctacgcacctgcaatttgaatctctcgcccgaaaacatccgggcagggaagttcaatgtatgcctggaataccacatcaagaactgcgcaggcccctgcataggcaagcagaatcaggaagaatacctcaaaaacatcgccgaaataaaggaaatactcaagggaaatacccaggagatagagcggatgctgtatcagcagatgcaggagcttgcggcggaaatgaagtttgaagaggcgcagaaaatcaaggaaaagtatctgctgctggaaaattaccgttccaaatcggaagtggtaagcaacgtattgcacaatatcgacgtgttctccatcgaggaagacaccgatgaaaagtccgcattcatcaactatctgcatatcacaaacggggctatcaaccaggctttcacctttgagtacaagaaacggctgaacgaaacgaaagaggagctcctttcactgggcattatcgagatgcgcgaacggtacaagagcctttcccgcgaaatcatcgtgccctttgagctggacatggagcttaaagacgttatctttaccatcccgcaacgcggtgataagaagaaattgcttgaactctccatccttaacgttaaacaatacaaggccgaccgtctgaaacaagcggaaaagctgaatccggaacaacgcacggtacgccttttaaaggaaatccagcaagaattgcacctcgacaggctgcctatgcggatagagtgtttcgacaactccaacatccaaggctcggaccctgttgccggatgcgttgtcttcatcaaaggaaagccgtccaagaaagactaccggaagtataacatcaagaccgtggaaggaccggacgactatgcatccatgaaagaggttgtaaaacggcgttatcagcgcgctatcgaggagaacgctcccctgcccgaccttcttatcaccgacggcggaaaagggcaaatgagcgccgtaaaagaggttgtcgacgaactgaaccttgatatccccattgccggacttgccaaagacgggaaacaccgcacatcggaactgctatacggtttcccgccgcagaccatcggactgaaacaaaactctccccttttccgcctgctgacgcaaatacaggacgaggtacacaggtttgccattaccttccaccgcgacaagcgcagcaagcggcaggtagcttcggccttagacgagataaaagggattggagaaaagacaaagaacgctctgctaaaggagttcaaaagcgtaaaacgaatcaaggaagcatcggcggaagatattgtcaaagtgattggcgaggcgaaagcgaaaatcataaaggactatttcacagacaaatagtccttcaatacaaattcttgtcccacaccgcggcaatcacgaatttattcgtaactttgcaacctgcaaaattattttttaggactaaaacatgagagtagttatacaacgtaccgggcatgcgtctgtcacaatcaacggaacctgtaagtccgccatccgcaaaggatttatgatattggtaggcatagaggagacggacggcaaggaagacatcgactggttgtgtaaaaagattgtcaacctgcgtgtttttgacgacgagaatggcgttatgaataaatccatactcgacattgacggtgagatattggtaatcagccagtttacgctgcacgcatctaccaggaaaggcaatcgcccctcttacatacgggcggcaaaaccggaaatatccgttccgctgtacgaacaattctgcaaggaattgagttttgcattaggtaaagagataggtaccggcgaatttggagccgatatgaaggtagaattagtaaacgatggccctgtgaccatctgtatggatacaaaaaacaaggaataatgacgttaaaagaagcacaacaagaagtggactcctggataaaaaaatacggagtacgttacttcagcgagctcaccaatatggccgtattgaccgaagaagtcggcgagctggcacgagttatggcacgcaaatacggcgaccagtcttttaaggaaggagagaaagacaacgttgaagaagaaatcgcggacgtcctttgggtacttctctgcattgccaaccagaccggtgtagacatcaccgaagcatttgcacgcagcatcgagaagaaaaccaaacgcgaccaggcaagacatatcaataatcctaaattatccgaccatggagaataacgaatctacacagagcaagtacgatgccgctctggcgaagtacaacaccaatttgaatgatgcggaagtggcagcggaagtagccggaataatcgcagagaaagtccctgcaaacaatactccggaagtaaagaagttcctgttcaactgcatcgacctgaccacgctcaacagtacggacagcgatgaaagcgtcatgaaattcacccaaaaggtaaaccagtttgacgaagaatttcccgatttgaagaacgtagcggccatctgcgtatatcccaactttgcggaagtagtaaaggatacgctggaagtggaagacgtaaagatagcctgcgtatcggcaggtttcccctcttcacagactttcatagaagtaaaagtagccgaaaccgccatggcaatcatggaaggcgcggatgagatagacattgtaatctccgtaggaaagttcctgagcggcgactatgaaaccatgtgcgatgagatacaggagctgaaagccacctgcaaggagcatcacctgaaggtaatcctggagaccggcgcgctgaaaacggcagccaacatcaaaaaggcctctatcctatccatgtatgccggagccgatttcatcaagacttccaccggcaaacagcagcctgccgccactccggaagcagcctacgtaatgtgtcaggctattaaggaataccatgccttgacgggcaacaagataggtttcaaaccggcaggaggcatcaactgcgtaaacgatgcgctcatctactacaccattgtaaaagaagtgctgggcgaagaatggctgaacaacggattgttccgtttaggaaccagccgtctggcaaatctcctgctgtcggaaatcaaaggcgaagaaatgaagttcttttaagaggaacacggttgatatatccgttatataaaacaaagcgaagaacctgctctctatattaaggaaacaaggttcttcgcttcgtttttgaatgacgggatataaaagaaactttgacagatattccgtctttattgtataaaaaacaaacttatttttcgcgttccactacgtaatcaagatagcaaacaagcgctttcttgacatccgtatcttccatggaagctaataacgaaagtgccttttccttaaactcaatcataactttcgtagcgtattcaatgccgccgtttgccttggaaaactcgatcaatcgggctatttcatcagttgtagccgttccgctctttactttcgcggcaatctcctgtgcctgcttgtcgcgggttgaattaagggcataaagtgcaggtaaggtcagctttccttccagcatatcattgccggtaggtttgccgatttccttgctttcgtagtaatcgaatatatcatccttgatttgaaagcaaagaccgatgtattcgccaaagagacgtgcatattccgccttttcatcgccagctcccaccgaaagcgcacccgctttcatgcacgcggcaaagagtacggccgtcttcttgcggatgacatcaaagtaaatatcctcggaatattcgggattgctgacattggaaagctgcaacaactccccttccgccaaatcctgtcccagcttcgaaacaatatcaataatgccgtaattgcgcgtcatccccacttccaccaaagccgttgccagtaaataatctcccgtaagcaccgccaccttattattaaagacggcattcacggagagctgcccccggcgttcggtactctcgtccaccacatcgtcatgcaccaggcttgccgtatgcagcagctccaaggcaaccgcagcatgaagcgttgccggacaaatctcattgtacagcttcgccgcaagcaaaaccagaatcgggcgcatcatcttcccattcttctgccgtatatgcgcaatcacgctgttcagcaaaaggttagaactggaaaggcaactatcaaaatgctttttgaagtcttccaactccgcagaaatcggggattttatgaaggatatactgtccatacatcgctatttgagcacaaaaatagtaataaaacggttaatacggtatttttttgtacttttaccatgaaaaaaaggataaatatatgaattcaaccgataaacttttcttgcttgatgcctacgcattgatataccgtgcttattacgcgttcatcaaaaatccgcgaatcaactccaaaggattcaacacttccgccattctggggtttgtgaacaccctggaagaggtgctgaaaaaggaaaatcccacacatataggagtagctttcgacccttcgggacctacattccgccacaaggcttacgaacaatacaaagcgcagcgggaagagactcccgaggctatccgtctttccgtacctattataaaggatattatccgcgcctactgcattcctatcctggaagtgcccggttatgaagccgacgacgtaataggcacgcttgccaccgaagccggcagacaaggtattgtcacttacatgatgacgcccgacaaagactacggccaactggtatcggagaatgtattcatgtaccgccccaaacacagcggcggattcgaagtcatgggcatcgaggagataaaagcgaagttcgatatccagtccacagagcaagtcatcgacatgctgggactgatgggcgactcttccgataacatccccggctgtccgggcgtgggagagaaaaccgcacaaaagctggtggctgaattcggcagcatcgaaaacctgcttgcccataccgaccggctgaaaggtgcgcttaaaaccaaagtagaggcaaaccgggaaatgattgctttctccaaattccttgcaaccatcaaagtggacgtacctatcaagctcgacatgaacacacttgtccgcgaagagccgaacgaagaagagctccgcaagatttttgaagagctggaatttcgtaccctcatcgaccgtgtcctgaaaaagacagtctctccccttccctcttcttccagttccgcttcgcccgatccttatgcgggaactttatttgcccaacccaccgacggcacaacttccggaaacaacgctccggttcaaggcgatttgtttgcaaattttgcggacaacgggacgggtgatgcaaaaaattcgattctcacgcgcttagaaatgctcgatgtagactatcaactaattgatacagaagagaaaagaaagaaaattattcaaaagttacttacaaaagaaattctctcaatagatacggaaaccaccggaaccgaaccgatggaagcggaactggtgggaatgagcttcagtgataccgaaaaccgggcttactatgtacccgttccggcaaatcgtgacgaagcgttaaaaatcgtcaatgagttccgccctctttacgaaaatgaaaattccatgaaagtaggacaaaatatcaagtacgatatgattgtccttcaaaactacggagtacaggtaaaaggaaaacttttcgacaccatgcttgcccattatgtattgcaaccggagctccggcacaacatggactaccttgccgaaatctatctgcactaccagaccatccacatcgatgaacttataggagccaaaggcaagaaccaaaagaacatgcgcgaccttccgccggaagatgtataccgctacgcttgcgaagatgcggacgttacactgaaactgaagaacgtactcgaaaaagaactgaaagagcacgctgccgaacatctcttttacgaaatagagatgccgctcgtaccggtgctcgtcaacatcgaaagcaacggagtgcgtatcgatacggaagcgcttaaacaatcgtccgagcatttcacgctccgcctgcaggagattgaaaaagaaatctatgcactggcaggtggcgaaaccttcaatatcggctcacccaagcaggtaggcgaagtgttgtttgacagactccaaatcgtagagaaagccaaaaaaaccaagaccggacagtatgtcacttccgaggaagtactcgagagccttcggaacaaacatgcaatcatcggtaagatacttgaataccgaggactgaaaaagctgctaagtacctacatcgatgcattgccccagctgataaatccgcgtacgggacgtatccatacctcgttcaaccaggcggtaaccgctaccggacgactcagctcaagcaatccgaacctgcaaaacatacccattcgtgacgaggacggcaaggaaatccgcaaagccttcattcccgatgacggatgcgagttcttctctgccgactactcgcagatcgaactgcgcatcatggcacatctgagccaggataagaatatgattgatgccttcctcagcggttatgacattcatgccgccactgccgccaaaatatataaggtggatattaatgacgtaaccgccgatatgcgccgtaaagccaagacagccaacttcggcatcatctacggcatctccgtcttcgggctggcggagcgtatgaacgttccccgtcaggaagccaaagaactgatagacgggtattttgaaacctacccgcaagtcaaggaatacatggacagaagcatacaggtggcgcgcgaaaacggatatgtggaaaccatcttccaccgcaagcgcttcctgcccgacatcaactcacggaatgccgtagtacgcggttatgcagagcgcaatgccattaacgctcccattcagggaagtgctgccgacattatcaaagtagccatgtcgctcatctaccggcgccttcaaagtaacaatctgaaagcaaagatgattttacaggtccatgacgaactgaatttcagcgttcccgaggcagaaaaagagattatacaaaaaattgtaatcgaagagatggaacgggcatatcgcatgctggtacccttgaaagccgatttcgggtggggaaagaactggctggaagcgcactaatccgctcgataactttatttaacttacaatcagaaagcaacagaagcaatcgctttaaaatacagtttgctcatcagaatatccgacatctttgctgccggatattttttattcactaaccgctccaaaaagaaagcatactattcttgttgcttttgacaatttgataaaatattagccatatattttatttatgtcaattatatgcgtacctttgcaccgcttttaagaaagatatgatagaaaatagtaagtaatactctaaaaaacataaatcatgaaaactttaaaaactttgattttattctcttttctttttgtgtgtggaatgaatgcgtcagcagacaacaaaagtaaccttatttacaattcggaagaagtaaatggaatgaaagttgccgaaactgtttacaagatggacggcagtacgcttgccaactatatgaagtacaattataaatacgatgaccaaaagcgtataacagaaagcgaagcgttgaaatggaatgccgtaaaaaacgcatggactcatgacatgtgcatccgctatgcctatgaaggtaaatccataactactacttattataaatggagcaataaaaagaatacctatattcttatccctgaaatgacaataacaatggataatcccgatatgtaatccattcattttctctcataaatatactctaataactaataataacccaaaaccttttcataaactgagga

SEQ ID NO: 4106 - DNA, 7734 bp, Unknown
  gut microbiota DNA sequence
tgataaattgcaaaggacaccacccatgcaaggacagtagtgtacaccgctgcaaacaaagcccatttccaactgcccgattctcctttaatggccgctaaggtggcgatgcacgggaaatatatcaatacaaacaccatatagccaaaagccaccaacggagtaatcggaatccgttcgcccaagctcaccgcatcggcttcggcatcatctgcatacagaactcccagcgtacttaccaccagttccttggcccctacaccggaaaggataccgacacccagtttccaatcaaagcctaacggctctatcaccggttcaacagccttgcctattctgccgatatacgagttttcctgctgctcggccacatcctgatatgcatcgtggtccggataataccccaacgcccatatcacaatggaagccaccatgatgatacctcccattttgcgcagatattgcgcgcctttctcccaagtatggcgaaaaatggacttcgacgtcggtatgcggtaagggggaagctccataacaaacggcgtgtcatctccctttaccagaaagcgacagaaaagccgtgccataaccacagccagtaaaatgccgatagcatagattatcagcaataccaaactggcattgttcgggaaaaacgcccccaccaacagcaaataaataggcaaacgtgcactgcacgacatcagcggattgataagcatggtcaccagtcggctcttccggttttcaatagtacgcgaggccataatagccggtacattgcaaccgaatcccataatcagagggataaaagacttgccgtgcagtcccatcttatgcattatcttatccatgataaaggcggcacgcgccatatatccggaatcctccatcaaagatatgaagaaatatagaatcaagatattgggcaaaaagacaatcaccccgcctacaccgccgataatgccgtccaccaacaaatccttcagcggtccttcaaacatattgtcacgcaccagactgcccaacgcacctaccagccattcaatgccctgcatgggataatctcccaagatgaatgttccttcaaacatcagatacaggaacagaaaaaagatgggatacccccatacgcgatgcgtcacaatggaatctatcacacgcgttgtacgtgccgtatcctcttgcttgtccacataggtttcgcgaagcgcgccggcgataaaaccgtatttggcatctgtaatggcctgctcgctatcttcgtttattgcattgcgcaggcgttgtacttcgcggttacggacttcaataatatccttcccattgggaaactcctgtacggtcttctccaaatcctcgtcattctccagcaacttaatagcaagaaagcgcgtggagtatttataccgtatattctcgttgacactgattatgcgtttcacctcttcaatgctccgctccaattccggcccgtgattgatgtggatgtggcggtagaagcctgccggatgctccttctcctccttatgagtgccgaagtcgtggtcgggtacatactccttgtgccagttgcgcaaatcattcaggatttcggcacgtatcttaccttttttatccaaaaaatcaccaccctcgtaaataccgatgataatatggaaaagctgttctatgccttttccggtgcgactgatggtaggcagcatcggcacgccgaacaactgaccgagctttacgtaatccaacgtgttcccgcttgcttccagttcgtcgtacatgttaagcgcgataaccatgcgcacgttcatgtcaatcaactgggtagtgagatacaggttccgttccagattggaagagtccaccacattaataatgatatccggagtttcgttgatgatgtgatggcgcacataaatctcttcgggagaataggcagaaagcgaataagtgccaggcaagtcaacgatgcggaaatgatacccctgaaagtcaaaatacccctctttagcatctacggtgacaccgctgtaattacccacatgctcgtgcgaacccgaggcgatgttgaaaagggatgtcttaccgcaattgggattacccaccaaagcgacattgatggtgcggcgttttcccaaagcgatacgtttcagttcctcttcgtccaaacgcatatcttcgctccatccctcgtgatagtcgagctgcacggactcccgacacatttccttttcaccgacaatctcaatcatctcagcttcctgacgccgtaaagagatttcatatcccatcaccttatacttgatgggatcttttagaggggcgttcagcaacacctcaacggttttccccttgataaatcccatttccacgattcgcttacggaaacctccgtgtcccagcactttaacgattactcccttctcaccggttttcaattcggacaaacgcatagtcttctgccttttttatttttgccgcaaagataaaggataagtccgtatagcgcaaataatttagaatgtttttaaataataggtatcaaagagagccgattctgcattgtaagcaagctgacaacggtctgccaaagcaacctttcagcacggaagtaacaaaatccgggaagaaacatgtatatttgccactatggaaaaggaaaaagtagcacaatatatcaaccggaaacagcttttgcaaccgacagacaaggtacttgtcgccctaagtggcggtgcggattccgtcgctttattacgactattgcaagcgtcgggctacgactgcgaagctgcgcactgtaattttcacctacgaggtgcagaatccgacagagatgaggcatttgtccgccaactgtgcgtaaaacaacaagtaccgctacacaccgtccacttcgacaccgcgcgcactgccgaagaacggcacatctccattgaaatggccgcacgcgaactacgttacggatggtttgaggaaatacggcagaaaatcaatgccgacgccattgccgtggcccatcaccaggacgacagcgtggaaaccctcctgctgaacctgatacgtggtacgggcatcaacgggttacggggaatacgccccaaaaacgggcacatcgtacgtccgttgctttgcctggaacgcaaagaaatcatcagttatctgaaccgcatagggcaggattacgtaacggacagcaccaatctgcaggatgaatacactcgtaacaaaatacgcttgaacctgttgcccatgatgcaggaaatcaacccatccgtcaaagaaagcattctcaacaccgccgagcatctggatggcgcatccgccatatataaacaagggatagacgaaggcataaaacgggtgcggacagcagagggcatctgcatcgagagactgatgcaggaaccggcccccgcaacattactgtttgaaatcctatacccgctcggctttaacactgcccaaatcggagacatataccgttcgctggaaggacagccgggaaaaatcttcacttcggaacattggtgcatcgtgaaagaccgcgaatatctgctgattgaagcacaccgacaccccatacaacccgcactggcaatggaagaacatgtctttaccccggactttgtcattccccgcgacaagaacactgcctgctttgatgcggacaaactgacacatcctctccttctgcgcccttggcgacaaggggactcttttattccattcggcatgaaaggccggaaaaaagtaagcgactatatgaccgaccggaagttctcccttttgcgcaaagagcagcaatgggtattatgttgcggcgaagagattatctggctgataggtgaaagaacggacaaccgtttccgcatcggtacctctacaaaacgggtactcacagtccggcttcttcccgccggggacagtcctgtcacaccctgagacctaagcggtataactctgcatccgaagagtaccccattatccatttcatctttaggttagagatacagaactttaacctaaaaacggatctctccagccaaaagacacccatcttcaggccggagataaagttcttctcctatatttaccggcttcttacctgaagagaacatctctcctctccgacaagaatccttctccttaagaacctgcttaaatcttcttcagcactccttgtttgaagatatttttctatttttattcgtcacataccccgttatgcttcttataaaaacaaaaaacagaccggatagggcttcaaaagaagctgaaaatactctttgaactcaatttatgcccgaaggcagatatgccagaatctacttacaagataatcctattttccttctgcttcttaaagcaatcggcaagcaaggcggcaaacggcgtatcaaaagtacgggccttttgcggacacccttttacacaagcacagcagcgaatacacttttccacatcggtactacactcatcgcctttcgcgatggcgcctgccggacaatgcttcatgcagtatccgcaatggttgcaaagttctgtgtcgacagccggaatgcgcggcataggaactccgcttttgcgtagtttcaccaccttccgcaagaaacggaataacggaaaaaacgcctgacggggacgttgaatacggttgacgtcaacggcatagagcttatccatgtcggctgccgcttcgattttagtccgtatcttagcgccgaaagtttctgcaaactgcaagtcatctgcatccggccgccctgcagctatgggattttgctgcgtactgtacgaatgctcgcctacaaacgtagcaccggcaatcactttaaaccctctgtccgatgcaaatgcgtccaactccaccaatgctttttcataggcacggttaccatacacagcaaccagcaccgccggagcaccggaagcatgaacgtctttcatccgctccaatgccaggggtgccaccttcccgccatagacggggacggttattaccgtcaaggtgttttcaggaatttccaatttgccggccgggtggaaagtaaggtctgtccgggcaacatcggaaatgcccgtaccgcgaacaatcgcctcgcccacttgtttagaggtatgggtaggcgaaaaagtaatcaaacgaactgcatatatattcataaatctgtttcttatataataatgaaacaaagatagacttttaaaattaaaaaaaagacgatttatttatgaaaccaaaaattattattacctttgtgccgttgaaacattctgcaactccttgctgaggtgaggattgttagtcagatttccggttcaataacaaatatccctattaaatcataatttacaaaaggtagacttaccgatataagtaaaaaccattcacacatatactatatgtataatatcattcaattaaacgacaaaaatttgtcggaactgcaagctattgcccaagaattgggtatcaaaaaaacagactctctcaaaaaagaagaactcgtttacaagatacttgatgaacaagccattgctggagcaaccaagaaagtagcagccgacaaattaaaagaagaacgtaaaggggacaagcaaaaacgttctcgcgtaacggtcaagaaagaagcagcggacaaggtattcacagccaataagaacggtgaactcacaaaagggaaaaccgaagaagcacctgccgtacaagcttccgtacaagcagcagaggcggctaaagaaccggccgtagccacaactcccgcagcagagactgaagttcccaaacgcaaaccgggacgtcctcgcaaagtaaaacaagaagcggctcccgtagcggaaacacctaaaaccgttccggcagaaactaaagtagaaactacagagccgaaaaaagcagaacccaagaaagttgttgcagccccccagcctacaccggatgaaagtcctgtcttgccggaagcagaggatgactttatccccatcgaggatttgccaaccgaaaaaatagaactgccgtcagagctcatcggtaaattcgaagccaccaaagcagaaactcctgttcctgcaacagagcaaccgcaacaacgctcccgtcttcgcctccgcgataacaatacgccatacaacaacaatcgtaacaataacaaccagcgtcctgcacaacagcagcaacgtcctgcacaacaacagaacaacaacgagaattatgttgctcccgaacgcaagccggcaatagaacgcgaaaaggcgtacgaattcgacgatatactcacaggaaccggcgtattggaaatcatgcaggacggttatggattcctgcgctcatccgattataactacctttcttctcccgatgatatttacgtttcacaatcacaaatcaagctgttcggtctgaagaccggtgatgtagtggaaggtgttatccgtccacccaaggaaggagagaaatatttcccgctggtaaaagtatccaagattaacggacgtgacccggcttttgtacgcgaccgtgtaccgttcgaacatctcaccccgctcttcccggacgagaaatttaaactttgcaaaggcggatattccgactccctgtctgcccgcgtagtagacctctttgcgcccattggtaaaggccagcgcgcactaatcgtagcacagcccaaaacgggtaagactattctgatgaaggacattgccaacgccattgcagccaaccacccggaagtgtacatgattatgctattgattgatgaacgtccggaagaagttaccgacatggcccgtaccgtaaatgcagaggttattgcctctactttcgacgaaccggcagaacgtcacgtgaaaatagcaggcattgttttggagaaggccaaaagaatggtagaatgcggacatgacgttgttatcttccttgactccataacacgtttggcacgtgcctacaatactgtttccccggcttcgggtaaagtattgtccggaggtgtggacgccaacgcactgcacaagccgaaacgcttcttcggtgctgcccgcaacattgaaggcggtggttcgctgaccatccttgctacggcgcttatagataccggttccaaaatggacgaagtgatctttgaagagttcaaaggtactggtaatatggaactgcaactcgaccgcaacctgtccaacaagcgcatcttcccggctgtcaatatcgttgcttccagcactcgtcgcgatgacttgctgcaagacaagcaaacgctggatcgcatgtggattctccgcaagtatcttgccgatatgaacccgatagaggcaatggacttcgtaaaagaccgtttggaaaaaaccaaagacaacgatgaattcctgatgagcatgaacggttaaatgcctacacggaaaagaaccaactaagatataaaagcaaacatttgaaaaagagcggaatagcataagttattccgctctttttcaatgttattatataataaaaagcaaaagtatggagaataagcatgatttcagtcttcccgtcagttggaacggaatattttatgcttcaaggcaatctgccgcaaaaccgtaataatattctgtccttaaaagaaggcagttacaggtattttttgtacttttgcgcctcaataagagtaatttgtaatttagtaattgtaattagatactatgttcgataatttaagcgagagacttgagaggtcgtttaaaattttgaagggt

SEQ ID NO: 4107 - DNA, 28851 bp, Unknown
  gut microbiota DNA sequence
aggggtaatctttatcttttcatagaggaaaggtacaaaaaataataactacttttgcggctcaaaacatataaagacaattaacacataaccaatgagcacatccaaacaccctaaaggactttacctgattttcgccaccagtaccgcagaacgtttcagctactatggcatgcgggctattttcattctgttcctgacacaggccttgctgttcgacaaagaacacgccgcctccatctacggcagctacaccggactggtctacctcaccccgcttatcggcggatatattgccgacaaatactggggcatccgccgttctgtcttctggggagccatcatgatggcattgggacagtttctgatgttcttcagcgcttccatgctggacgctgtccaactgtcgcactggctgatgtatggcggactcaccttccttatattgggaaacggatgtttcaaacctacggtatcttccctcgtgggacaattgtacgaaccgggcgacagacggttggactccgcctataccatattctatatgggcgtcaacgtaggctctttccttgccccgctggtatgcggctattttggcgaaaccggtaatccgaacgacttcaaatggggctttctgattgccgcaattgtcaccgtctttacggtcatattgttcgagacacagaagaataaataccttatcggtcccgacggcaagcagctcggcatcattcccgatgctaaaaaggaacaaccgcaagctacaaagacagccgcccaatccactacgcacaacagcaagaaaaaacgtaattatctcttattgggagtattgacaatagcgcttgccgttttcttctactggtgtttcggcaacgactggatcagcatcggcatcttcaccgcctgtatcgtctttcctgtcagcatcctgttggaaggctcgcttacgaagattgaacgcgaccgcatctttgtcatctatatcatcgctttcttcgtaatcttcttctgggcagcctacgaacaggcaggcgcttcactgacgcttttcgcttccgaacagaccaaccgcgttatcttcggctgggaaatgccggcttcctggatacagtcattcaatccattcttcgtagtgatactggcagccatcatgccgggagtatggggcttcctcaataaacggggcatggaacccgcctctcccaccaaacaggccatcggcttgctgcttctctccttgggttatctcgttatctgcttcgctgtaaaggatgtgcaacccggcgtcaaggtaagcctcatctggctcacaggactttatttcatccacaccatgggcgaaattgccctttcgcctatcggattgtccatggtgaacaagctcactcctatccgctttgcttcgctgatgatgggtatatggtatctctccacggccacagccaacaagtttgcgggtacactgagtgggctctatcccgaagccggaaaagtaaagacactgcttggctaccgcatagaaacgatgtacgacttcttcatggtatttgtcgtaatgtccgccaccgcatcgcttatccttttcctactctcaaagaaattgcagaagatgatgcacggagtggaataaaatcactatttttgcgccaactttctaaaaactcccatttatggataccatacaaataaaagacaaaatgttcactgtttccattaaggaacaggacatattgaaagaagtaacccgtgtagcgaacgaaatcaaccgcgatttggcgggtaagaatccgcttttcctaagcgtgttgaacggctcgttcatgtttacttccgacctgatgaagcgcatcaccattccttgtgagatttctttcgttaaacttgcctcttatcagggagtatcttctacgggagtaatcaaagaagtgatcggcatcaacgaagacatctccggacgcaccattgtcattgtcgaagatatcgtagataccggcctcaccatgcaacgcctgctggaaaccctcggcacacgcggccccaaggaaattcacattgcctcgttactggtgaaacccgacaagttgaaagtggacttgaacatcgaatacgtagccatgaacattcccaacgacttcatcgtgggctatggtctggactatgacggattcggacgcaactatcccgacatctataccgtagtagactgaaaccgggaaaaggcagcaaggcaaaggtattaatttgtaaatcaaaaataatagctaaacaaatgttgaacattgtaattttcggtgctcccggttcaggtaagggaacacaaagcgagagaattgtagagaagtacggtatcaaccacatttccaccggagacgtgctccgcgcagaaatcaagaacggcactgagctgggcaagacagccaaaggctacatcgaccagggacaactgttgccggacgaattgattatcgacatcctggcaagcacactggacagcttcaaggatagcaaaggcgttattttcgatggcttcccccgtactatcgcacaggcagaggcattgaagaagatgcttgccgaacgcggacaaagcgtaaacgttatgctggaccttgacgttcccgaagacgaactgatgaaacgcctcatcaagcgcggacaggaatcaggccgtgccgacgacaacgaagagactatcaagaaacgtcttaccgtatatcattcacagacagctccgcttatcgattggtataagaatgaaaagctgtacgcacacatcaaaggtataggcgaactggatactattacggcagatgtttgcaaagcaattgacgctgcgaaataatatttgatatctaaagcagatgttttttaacgcaaattacgcgaaccactacggatgactactcgtccgtgcggtttgcgtaatttatattatttcctacatcggctctcagccgttccaccattttacacagattcgcctcgttctgttcatccgaaacagtggggtcttttacaaaatacccgcaaggcaagtccggacaatcaccgcaattctttttcctcttggtgcggcaacagtcataaatgcggcagacatcatcacccgtataccgcaaccagaatacttttccttttattttcctgcatccgccgcattccagcggaaaagaagcacactccacgcaaaccgcaccgcagggagaaggctcaacaaagtcatctttccagaaccaccacttgcacttcatcgggtcgggattcccggtgtttacaaagtattccacggcacgataaagatacaactggcagcggtcaagagtgcaaccgcgcaaccggcactcctcggcataaagttcttcggcgctcttgccacgcaatgaggcgatagtggtataccccatcagtatcaggtcctgctccgtgcaggcacctatattgggaatcgttctcagttcactcattaagattattgtattaggatgtaaatcaatgaacaaaaataacgttatcaatccatccaacctaacaaatcacaacccaaatttgagcatatcgcttgaaatcactaattttgcgcctattatcccgacagtaacaataaagaaacctaaaaagtaaaaagaatatggctgaatcgaattttgttgactacgtaaaaatctattgccgctccggtaagggcggtcgaggctccacgcacatgagacgtgaaaaatacattcccaatggcggccccgacggaggtgacggaggacgaggcggccacgtgattctccgcggcaaccgcaactactggaccctgctgcacctgcgctacgaccgccacatcatggcaggccacggcgagtcgggctccaagaaccgcagtttcggcaaggacggagaggataaaatcatcgaagtgccctgcggcacggtagtgtacaatgccgaaaccggtgaatacatatgcgatgtaaccgagcacggtcaggaagtcattctgctgaaaggcggacgcggcggactgggtaactggcacttcaaaaccgccacccgtcaggctccccgcttcgcacagccgggcgaaccgatgcaggaaatgacggttatcatggagctgaaactgctggcggacgtcggtctggtaggcttccccaatgccggaaagtcgacactgctctcggctgtgtcttcggcaaaaccgaaaatcgccaactatcccttcacaacattggagcccaatctgggtatcgtgtcctatcgcgacggaaagtcattcgttatggcggacattcccggcatcatcgaaggggcaagtgcgggcaaaggtttgggactccgttttctgcgccacatcgaacgcaactcactgttgctgttcatggttcctgccgacagcgacgacatccgtaaggaatatgaaattctgctgaacgaattgcgtactttcaatcccgaaatgctggacaagcagcgtgtgcttgccatcacgaaatgcgatatgctggatcaggagctgatggacgagatagagcctacactgcccgaaagcattccgcacgtattcatttcggccatttccggtctgggcatctccacactgaaagatatgctgtgggaagagctgaacaaggaaagcaacaagatagaaggcaagattgaaagcattgcccatcgcgccaaagacatgagccacctgaaagaagaactgaaagacgaaggcgaggacgaagacctcagctacgaatacgttgacgacgaggacatcgaggaccttgaagactttgaatacgaggaagaggattgggaggatgacagaaaatgattcctctcacaaaagataaaagaatgttgggatatgaggtacttgccccatatcccgacatttcttgttttgtaaccacccggcatggcggatgcagcaccggcaactatgcttctttcaactgcactccttataccggagacgatgcggattgcgtacgcaaaaaccgggaactgttatgtgccgccttgcctgtgcgccctcaggaacttatcatcccctttcagacccacggcaccgattccctcatcatcgacgatacctatctgaacgcaacgcatagcgaacggcaagccatgctgcaaggcatcgatgcactcattacccgcatgcccggctgctgcatctgcatctccactgccgattgcattcccgtattattatatgacaggcaacgccgcattgttgccgcagtccatgcaggctggcggggaacggtaaaccgcattcttaccaaaacccttcaccggatgcagtctgcctacggaacagaaggaacggatgtcattgcctgcataggcccgggcatctcccttgactcgttcgaggtgggcgatgaggtatatgaagcgtttcgcaccgaaaatttcccgatggaatacatatccgtatggaagcccgaaacgcacaaataccatatagatttgtgggcagccaaccgtttgcaactctccgacttcggagtgccgccccggcagatagagaatgcaggcatctgtacctaccggcagcatgaggacttcttctcggcacggcgtctgggcatcaagtcgggacgtatcctgtcgggaattatgttgaacggacaggaaaagggagaaagaaagtaacgcctatatttgaaagagttgcagtttatggctacttttgtaccgtgccgataagttgaagcaactctaattctcgactcacattatacgaacaaaccaatacctccaatgatatgaaacaaaaccgggaagacattcctttcgaatatgcccattgttttgccacagacgggcagtgtccgcaacgttcgggatgcctgcatgccctaataacggagcttccgatgaaaacatcgcaatacgcaagcaatatcataaccgccatagacccgcgctacattgcttcgctgcatggcaagggcagctgtaccttctaccgtagctccgacctcaagcgttatgcctgcggaatgtcccggatgttcgatgccgtgcccagcagaatcgtaagcgaagtcagaagatgtgtacagaactgcttcacctgccgcagctattactttgccagccgcaaaggcaagagacttatctcacccgcagaacaggcggagattgcatccgttttccgtgccctttgcccggagttacgtcccatatacgacagctttgaggaaagatacgaatggtgaccggagaagtacaggcgggtgatactgcaaacctgcctgtgccagacctatcccgcacttagtttatttttatttatccacaataaacttcgagtttaatcctattaaactctgggttcattaggattaaacctgaagtttaacgccgttaaattccaagtttatccacgacgaaccgacagtaaaccatacacaatgaaaagccccatgtaccacatcaccttatccgaagagattaagcgcctctgccccgcctttcagggcgttgccgtcatggcgcaagtaaccaactccgcacacaacgcagagctgtggcgggaaatcgacgctttcacccgcgaactgagagccggtgaaaccgcggaaagcatcaaactgcaacccgccatcgccgccacccgcgaagcctacaagcgttgcggcaaagaccccagccgttaccgtccttccgccgaagcattgcgccgccgtcttatgcggggactcgaactgtaccaaatcgacacgctggtagacctcatcaacctcgtatcgctccgcaccggatattccatcggcggcttcgatgcggacaagatacagggagacagccttgaactcggcatcggacgtgcggaagagcccttcgaaggcatcgggcgcggaacgctgaacatcgaggggcttcccgtctaccgcgaccgggcaggcggcataggcactcccaccagcgacaacgaacgtaccaaaatgggactcgaaacccggcgtatccttgccattgtcaacggatacaacggacgcgaagggctggcggaagccgccggaatgatacaggaactcctgcggaaatacgcagactccgacggcgaaacaatactctattttgaataaacaatgacaacaaagagatgccgccatgtaagccggtgcaaaaaaataacacgcagaaccgtccaagtattcaaacgtttcactacatttgcaaaacgttttacctgaaaaaagaattgaactttaaaacatatcgatgatagaaaaactgattgttcttgaggatatcgacccggttatcttttacggcgtaaacaacgccaatatgcaactgataaaagctttgtatcccaaactccgcatcgttgcccgcggcaatgtcatcaaagtgctgggagatgaagaggagatgtgcgcgtttgaagaaaacatcaccaaactcgaaaaatattgtgccgaatataattctctgaaagaggaagtcatcatcgatatcgtcaaaggaaacgccccacaggctgaaaagtcgggcaatgtcatcgtgttcagcgtaacgggaaagcccattattccgcgcagcgaaaaccagttgaaactggtagaggcatttagcaggaacgacatggtatttgccataggccctgccgggtcgggcaagacctatacggccatcgcccttgccgtacgcgcgttgaagaacaaggagataaagaaaataatcctcagccgtcccgccgtagaggccggagagaaactcggtttcctgcccggcgacatgaaggacaagatagacccgtacctgcaaccgctttacgacgccttgcaggacatggttcccgccgccaaactgaaagagtacatggagctgaacatcattcagattgctcccctcgctttcatgcgcggacgcacgctgaacgatgccgtagtgattctggatgaagcgcagaacaccaccacccaacagataaagatgttcctcacccgtatgggcatgaataccaaaatgattgtaacgggggatatgacgcaaatcgaccttccccagtcacagacttccggactggtgcaagcactccgcatcctgaaaggcgtgaaaggaatcagcttcatcgagctgaacaaaaaagacattgtacgccacaaactggttactcagattgtggaagcctacgaaaagtttgacaaagaagcgaaagccgaacgggagaaacggaaagcagaacaagccgccggacagcaactcccggcatagacagtaaatatccaactcataaatatcactaaaatgaatgcattaacagcaacagatttcaactttcccggacagcaaagtgtctatcatggaaaagtgcgcgatgtgtacaacatcaatggcgaaaagttagttatggtcgctaccgaccgcatttcagccttcgacgtagtattgccgaaaggtattcctttcaaaggacagatgctgaaccagattgcagccaagttcctcgatgccaccaccgacatctgccccaactggaaaacagccacccccgaccctatggtaaccgtgggcgtaatgtgcgaaggcttcccggttgagatgattgtacgcggctatctctgcggcagtgcatggcgcgcctacaagagcggtgtccgcgaaatctgcggcgtaaagctgcccgaaggcatgaaggagaaccagaaattccccgaacccatcatcaccccgaccacaaaagccgaaatcggcgagcatgacgccgacatctccaaagaggagattcttgccaaaggcctggccactcccgaagagtatgcaattctggaaaaatatacaatggcgctcttcaaacgcggtacggaaatcgctgcagaacgcggcctgattctcgtcgacaccaagtacgaattcggcaagcacaacggcactatctacctgatggacgaaatccacacaccggactccagccgctatttctactccgaaggctacgaagaacgctttgccaaaggcgaaccgcaaaagcagctttcaaaggaattcgtgcgcgaatggctaatggacaacggttttcagggcaaagagggacagcaggttccggaaatgaccgacgaaatcgtgacttccatcagcgaacgttacatcgagctgtacgagcacatcaccggcgagaagtttgttaaagaggacacaagcaacatcgccgaacgtattgaaaagaacgtaacggagtacttaaagtaacgattgacggatggaatacccccaagaacacatcaagccttacggcaacgacggcaagaagagcgaacaggttgaagagatgttcgacaacatcgcccccgcttacgacaagctgaaccataccctgtcgatgggcatagaccgcagctggcgcaagaaggcgattgacacgctccgccctttcagcccccggcgcatcatggacgtagcgaccggaaccggagactttgccatacttgcctgccgcgaattgcagcccgatatgctcatcgggaccgacatatccgaaggcatgatgaatgtgggacgtgaaaaagtaaaacaggcgcacctctcggacaggatttcctttgcccgggaggactgcacctctctctcgtttgctgatgaaagcttcgatgccgtgaccgtggcgttcggcatccgtaactttgacggactggataaaggattgtccgaaatgtgccgcgtactcgtacccggcggacatctcgtcatactggagctctccacgccggaccgcttcccgatgaaacaactctttaccgtctactccaaagccgtcatcccgctgctcggcaagttcatttcgaaagacaacagcgcctacacctatctgccccaaagcatccgcgcctttccgcaaggcgaaatcatgcagggagtaatccgcaaggcagggttcagcgaggtacgcttcaagcgattgactttcggaatatgcaccttatacattgctaagaaatagtcacttatattccccctttaacacattttggatatgcagaaatacggtttaatcggttacccgctgaaacattcgttctccatcggctacttcaacgagaaatttaaagcagagaacattgacgccgaatatgtgaacttcgagattccccgcatcgaagacttcatggaagtgattgaagaaaaccccaatctctgtggactcaatgtaaccattccctataaagaacaggttataccctacctcgacgaactggataaggacaccgccaagattggtgcggtcaacgttatcaagattgtccgccttcccaaaggcaaaatcaagctgataggctgcaactcggacatcatcggatttacgcaatccatcgaacccctgctgcaaccccagcacaagaaagcgcttatcctgggcacaggcggtgcatccaaagccgtatatcgcggcctggagaatttaggaatagaaagcactttcgtgtcacgtaccaaaaaggacgacaagttcctgacctacggggagctgactcccgaaatcatggccggacatacggtcatcgtaaactgtacgcccgtgggcatgttccccaaagtggatttctgcccggacataccctacgaactgcttactcccaaccatttgctctacgatttgttgtataatccaaatgaaacactcttcatgaagaaaggcaaagcgcagggagccgtcaccaagaacggacttgaaatgttgctgctgcaagcctttgccgcatgggaaatttggaacaagtaacatgaaaaaaatactgaaatattcattcataggtctcgcagcgctttgtaccgccctgttgtgcggcggatactatatgctggggcatgcgctgaacccggatgaactggttacacgctcccgcaacagccaggcttcctacgaatacatgttcgggcaatatcccgagctgaagccgtgggtggacagcctgcagacggcaggggcgctgcgcgacttctatataaagaacgaccggggtgaaaccctgcatgcgctgtatgtagccgccgccgaacccacccgtaaaacggccgtcattgtgcacggctataccgacaactccatccgcatgctcaacatcggctacctgtacaaccggcaactgaagtataacatccttctgcccgacctgcacggtcatggtgcaagcgagggtgccgagatacaaatgggctggctcgaccgtctcgacgtactgcaatggaccgcaaccgccgacgagcttttcggcaggaacaatgaaacggtgaccgcaggcgacagcacccgtatgcgcagcagcggtacggaaatggtggtgcacggcatctcgatgggagccgccaccaccatgatggtgtccggtgaagtggaacatggaatacaccagcagccgttcatcaaatgtttcgtcgaggactgcggctataccagcgtatgggatgaattccggggcgaactgaaagcacaatacggcttgcccgctttcccgctgctgcatgtggcaagccggctttgcaagcaagagtacggatgggatttccgtgaagcttcgactttggagcaggtcaaaaagtgtaccttgcccatgctctttatacacggcgatacggactcctatgtgcctacatggatggtctaccctctttacgaagccaagccggaaccgaaagagctgtggattgttccgggttccgcacatgccatgtcctacaaggactatccgcaggaatatacggagcatgtaaagaaattcgtagggaaatacatacgttgacgtgatttttcctaccttagcccctacaaatacaataagtatgaaacgatttatctccataacattcctcttgtgcatgcttgtttccctgcaggcacaagagatttacaccaccggaaacattcctaaagtacatcttcaggataagacacgctacgtttgcaaccccgccggtatcctttccacttcggcatgcgacgaaatagaccgcatgctctatgccctggaacagcaaaccggcattgaaaccgtagtggcggttgtcccgtccatcggcagtgaggactgttttgacttctcgcaccggttgctcaacgaatggggcgttggcaagaaaggaaagaataacggactggttatcctgctggtaaccgaccagcgctgtattcagttctataccggatacggactggaaggagacctgcccgacgccatttgcaaacgcattcaaacgcgggacatgattccttacctgaaagacggtaactgggatgccggtatggtggccggcgttcgtgccgtatgcgcccgtcttgacggaagtatggcaaacgacccggacgaaagtgacggcggctctccgataggattgattctggccgttgcggggttctttgccatcgccatcgcggcaggaatactgaaaacacgcgctgcaagcaaatgcccgcaatgcggccagcataagctgcaacggagcaacagcgtgcttatctcacgccgcaacggagtacggacggaagatgtcacctatacctgccgcaattgcggacataaggtagtacgccgccagcagtcttacgatgagaactatcggggcggaggtggcggcggtcccgtcattttcggaggcggcggcttcggcagcagtggcggaggattcagcggcggcagcttcggaggtggcatgggcggtggcggcggagccggttcacggttctgagcggaacggccgggcgtctcctgtaacaaaccaattcagattgcatcattaataacaaaaaaagaagtatgaaaaaatcaaccattatcatcattgttgtcgtagcccttctcgccatttggggagtcagcggttataacggacttgttaccatggacgaaaacgtcagcgggcaatggtctaacgtagaaacacaatatcaacgtcgtgccgacctgataccgaatctcgtaaacacagtcaaaggatatgcctctcacgaaaaggaaacgctggaaggtgtggtagaagcccgtagcaaggccacccagatgaccgtagacgccaacgacctgacaccggaaaagctggccgaataccaaaaggcacagggcgcggttacttccgctctcggcaagctgctcgccattaccgaaaactatcccgacctgaaagccaaccagaacttcctggagctccaagcccagttggaaggtacggaaaaccgcatcaacgtggcacgtaccaacttcaacaatgcggcgaagaattttaatacggcaatccgccgcttccccaaaaacattcttgccggtcttttcggctttgagaagcgtgcctactttgaagccgccgaaggaagcgaacaagcacctaaggtggagttctaaagagacggaattgaatatcaaatatcccctcatccggtgtcgcacccgcacagacttgcaagtacgatgccggatgaggggatattttttacgcaaagctaaggctataagcgaaataatcactacttttgtgctcaattgaacaaacttattatcccatgagtaatcaacgatatatgatgagaggcgtcagcgcatccaaagaagatgtgcacaacgccattaagaacatcgacaaaggtatattcccgcaggctttctgcaaaatcatccccgatatcctgggcggtgaccctgagtattgtaatatcatgcacgcagacggcgcaggaacaaaatccagtctggcctacatgtactggaaagagacaggcgacctctccgtctggaaaggcatcgcacaggatgcgctgattatgaacatcgacgacctgctctgtgtaggtgctgtggacaatatcctggtatcgagcaccatcggacgcaacaagctgcttgtgcccggagaagtgatttccgccatcatcaacggtacggacgaactgcttgccgaactccgcgaaatgggtgtaggcgtatatgccaccggtggcgagaccgccgatgtgggcgacctggtgcgtaccatcatcgttgactctacggtaacctgccgcatgaagcgttcggatgttatcgacaatgccaatatccgtccgggagacgtgattgtaggcctctcctcttgcggacaagccacttacgaaaaagagtataacggcggtatgggcagcaacggacttaccagcgcccgccacgatgtattcgccaaatatctggcggagaaatatccggaaagctatgacaaagccgtacccgacgaattggtatacagcggaaagctgaaactgacagacagcgtggaaggcagtccgctggatgccggaaagctggtgctctctcccacccgtacatatgcgccggtggttaagaaactgctcgatgcgctccgtcccgaaattcacggtatggtacactgctccggcggtgcgcagaccaaagtgctgcactttgtcggagataactgccgcgttgtcaaagacaaccttttccccgttccgccgctgttcaggaccatcaaggagcaaagcgatacggactggagcgaaatgtacaaggtattcaatatgggacaccgtctggaagtatatctttctcctgagcatgcggaagaagtgattgccatcagcaaaagcttcaacatcgatgcacagattgtaggacgtatcgaagagagcgataagaaagaactgattatcaagagtgaattcggagagttcagatattaatgccgacttgtcatctcgtaacattaccactttaattaaatggcagataacaacaccatattagagaaactggaaggcctcgttgcccgcttcgaagaagtgtccacactgattaccgacccggcggtgattgccgaccagaagcgctacgtcaaactcaccaaagagtacaaagaactgggcgacctgatgaatgcccgcaaagagtacatgcaggtactgaacggcatcgaggaagccaaagaaatcatcgctaacgaaaccgacgccgagatgcgtgaaatggcacgcgaagaacttgatgcctgccaggcacgccaacctgaactggaagaagagataaagctcctgcttgtccccgccgacccgcaggacagccgcaacgccattctcgaaatccgcggtggtgcaggtggagacgaagccgccatttttgcaggcgacctcttccgcatgtacaccaagtattgtgaggctaaaggctggagactggatatatccagcgccaacgagggcgctgccggcggtttcaaggaaatcatctgctccgtaacgggagacaacgtatatggcacgctgaaatatgaatcgggcgtacatcgcgtacaacgcgtgcctgccaccgaaacgcagggacgtgtacacacatccgctgcatccgtggcggtactgcccgaagccgaagagttcgatgtagtcatcaacgagggagaaatcaaatgggataccttccgaagcggcggtgcgggcggtcagaacgtaaataaggtagaatccggcgtacgcctgcgctataactggaagaacccgaatacgggtgtcgtagaggaaattctcatcgaatgtaccgaaacgcgcgaccagccgaagaacaaagaacgcgccctgtcgcgcctgcgtacctttatatacgacaaggagcaccagaaatacattgacgacatcgcttccaagcgcaagacaatggtctctaccggtgaccgttcggcaaagatacgtacctacaactatccgcagggacgtattaccgaccaccgcatcaactataccatttataaccttgccgcctttatggacggtgatattcaggattgcatcgaccatctgattgttgcggaaaatgcagagcgactgaaagaaagcgaattgtagttatgaaagggctatcagtagagaaagcgtttcacacggttaccgaagcgtttcagaactgcctgaagcgcttcccggttacggtagcctttatctttgcattcacagcctatctcattcatctgacatcaataagctggacaggcgaagaacggttgctgtttataaccggttactacctgtcggtaggcatcctgctttcgctcacgcttcatctgtggagcgaagaagtaaaaagccggatgtggaagacaggcatacaacttgccgcacacgccctgctcatagccgatgctttcctgctctaccgttatctcggtacagagagttcatggattgaaatcggcatcgcccacacggcggccattctcaccatagggctttccacattcttcctctcgttcctgcgcgagaagaatgacattgccagttggaattttgcactgaacgctgtttcttcgttcgctgttacacaaatcataggcctcatcctatgggcaggcatcagtctgctgttgttctcactgcaccagctgttcgacatccatttcagcggaaagtgctatgcctatatctattatctgtgcagcataacgctcgccttgatactgtttctcggattgttgccgcagggagaggacaaacacaaccgcgaaccccactcatccgaattcctgaacggcatcatacactacctgttccttccgcttacagccggatatctgacagtgctttacatgtatgccgcccgcattcttgtcagttgggaactgcccacaggctgggtgtcatggctcatcgtagcattaatgacggtgtgcatcgccattcaattcggtctgtatcccgcacgccttgaaaataacaaacggtttgacaattggattgcccgctggatgcccgtactgatactgcctctgctgttactgatgaccataggcatcgtgcgacggttcaacgattacggcattaccgttaaccggctctatctcgccacactcaacggctggttctattttgtctgtatcgggttgttcgccatcaaggcacggcgtatcaactggatacccatttcgtttgccatcatctttttgctgacgtcggcattgcccgtcaactatgctggcattacaaagaatgtcattcttaacgaaatcaaagccgagatgcaacgcagttgccgggcaaaagcccccctctcgctacaacaatatgaggaatggatgtactcgctgccggaaaagcaggcgatacggataaacagtaaattcagatacctgaacagctggttcggcacggagagcgtcactcatctgatagacagaaacgtaacctacaacctctattccgtggcagcggatattgaaacaaatgcagcgcccgccggcactgatagcggcaaggttacctatagcggagcaatcgacagtcaaacgaacatcagtgttcccaaaggctacacgcggtttatcgccatacccagcgacggtatgtcaagccgctttcttaccatcccccgccaatatcttgaaaatggaatattgcccgtttcactcgatacccggacggacaatctgaacgatagcgcatatatcgaactcagcacattggaaatgttggaaaagaacagcaagcacggtcatataccgcctacctctttccgatgcaattctcccaagaacctgttcatgctgactgcattcgatatccattatgaaaagaacagtgacgaagatataagaatgagcatcaagggatatttatttaaaaagtaaaaccattaaaccaacaaattgcgatatgaacaaacaacaactctttgagaatatcaaacgcaagaaatcatttctatgcgtaggtctggacacggatatcaaaaagattccggaacacctgctgaaagaagaagaccccatctttgtcttcaacaaagcgattatcgatgcaacagccgacctgtgtatcgcctacaaaccgaatctcgctttctatgagagcatgggagtaaaaggctggattgcctttgaaaagaccgtgaactacatcaagcagaactatcccgaccagtttatcatcgccgatgccaaacgcggcgacatcggtaatacctctgccatgtatgcacgtactttctttgaagaactggacatagactcggtaaccgtagctccttatatgggcgaagacagcgttactccattcctcacctacgaaggcaaatgggttatcctgctcgcactgaccagcaacaaaggttcgcacgacttccaactgacggaagacaaaaacggtgaacgtctctttgaaaaagtattgcgcaagtcacaggaatgggcaaacgacgagcaaatgatgtacgtggtaggcgccacccaaggacgtgctttcgaagatattcgtaagattgttcccaaccacttccttttagtgcccggcgtaggtgcgcaaggcggttcattggaagaggtctgcaagtacggcatgaacaagacttgcgggctgattgttaactccagccgcggtatcatctatgtagacaagaccgaaaatttcgcagctgctgcacgcaaagccgcacaggaagtacaggctcagatggcggaacagctgaaagcgatactctgagaagcaaataagaacttattttaaacataaccgggcagaatcaggtgaacaactacccatttcgccgattctgcccggttcgtatcaatacatgataatcccgcatgatatgctcgaaggtttcaaaaggaccaatctgtcatagcccgccacattgcaaatgttttcaatgaaggagaacttgacagagacagtaatatgcaaattttgcataatactatctcaaaatataaacctactgcgatttacaacttagaggttatcatctcaacacgactggtgatgaacttccttgtatagcatcatattttgtcatctcctaaaaacaaattacctttgtcctcaaatacttagctatgccttacgaacgtaaaatcatcaacgatccggtgttcggattcatcaacatacccaaaggactgctgtacgaccttgtacgacatccccttttgcaacgcctcacccgtatcaaacaattgggattatcgtccgtggtgtatcccggcgcacagcatacccggttccagcactcactgggggcattctaccttatgagtgaagctatccagcaacttaccgccaagggaaacttcattttcgacagtgaagcggaagccgtacaggcggctatcctcatgcacgacatcgggcacggtccgttctcgcacgtgcttgaagatactattgtaaaaggtgtctcgcacgaagacatttccctgatgctcatggaacgcatcaacaaagaaataaacgggcaactgacacttgccatccaaatattcaaggacgaatatcccaagcgtttcctccaccagctggtaagcggacaactggacatggaccgcctcgactacctgcgccgcgacagcttctataccggagtgacggaaggtaacataggttcggcgcgcatcatcaagatgctcgatgtaaaagacgaccatctggtcgtagaatccaaaggaatctactctatcgaaaacttcctcactgcacgccgcctgatgtactggcaggtatatctgcataagacatcggttgcctacgaaaagatgctcatcagcaccttgctgcgtgccaaggagttagccggcaaaggcgtggacttgtttgccccgcccgcactgaaattctttttatacaatgatatcaaccgggaaatattctacaataacccggactgcctggaaaactttatccaactggacgacaacgatctttggactgccctgaaagtatggagcacacatccggacagggtgctttccacactaagtatgggtatggttaaccgtaacatattcaaagtggaaatctccaccgaacctttcagcgaggagcgtaaagaagaaatcacccggcaaatcggcaaacagctggacatccctctttccgaagccggttattttatctctaccccaagcattgagaagaatatgtacgacccggcagacgacagcatcgacatcctgtacaacgacggctccattaaaaacatagccgaagcatcggacatgctcaacatctccctactctcaaaaaaagtaaaaaagtactacttatgttatcaacgtttgcatagataagtataaaatattcaccgcaggacaaggatatataaaaaaaaagtccgttatttgtgttttgaaaccatctaacaacaataaaacatggagttctctgctaaacaaattgcaacatttatacaaggagaaatcgtaggagacgagaatgcaaccgtgcataccttcgccaagattgaagaaggaataccgggggcaatctctttcttatccaaccctaaatacataccttatctgtatgaaacccaatcgagtattgttttggttaataaggatttcactcccgaacaggaagtaaaagctaccatgattaaggtagacaatgcctacgaaagccttgccaaattattaaacctgtatgaacagagcaaaccgaaacgcaccggcatcgacccgcgcgcatacgttgccgaaactgccaaaataggcaaagatgtttacattgcgccttttgcttatgtaggagaccatgcagaagtgggcgacaatacggtaattcatccgcatgccactatcggaagcggtgctaaagtaggcaatgattgcattatttacgcaaatgcaacaatctaccacgattgtcgcgtaggcaaccgttgcatcctgcatgccggttgtgtaatcggtgcagacggtttcggtttcgcccccactcccgaagggtatgaaaagattccccaaatcggaatcaccctattggaagacaatgtggaaatcggcgccaatacgtgtgtagaccgtgccacgatgggagcgactatcgttcacagcggtgtaaaactggataatctggtgcaggtggcacataatgatgaaatcggttcgcatacggtaatggcggcccaagtgggcatagccggttccaccaaagtaggcgaatggtgtatgtttggcggtcaggtgggtatagccggacacatccacatcggaaacaaagtgaaccttggcgcacaatccggtgttcccagcagtattaaagaaggcagtgtattaataggtacgccgcctatggaagtgaagccctacttcaagtcacagtccgtattccgcaagctgccggatatgtactttgagttgaatgcgctccgcaaagaactcgatgaattaaaaaaacaattaaataagtaaccaatgttgaaacaaaagactctgaaagacagcttttcactcagtgggaaaggtcttcacactggacttgatctgactgttactttcaaccctgctccggacaaccacggatataagattcagcgtaccgacctggaaggtcagcctatcattgacgctgttgccgataacgtgaccgaaacgacacgcggcaccgtgctttccaaaaacggggttaagataagtaccgtagagcacggcatggctgcgctttacgctttgggcatagataactgccttattcaggtgaacggtccggaatttcctatcctggatggaagtgcccagtattatgtcaacgaaatagaacgtgtaggtacggtggaacaaagtgccgtaaaggatttctatatcatcaaatccaagattgaattccgtgacgatgccaccggctcatccatcatcgtattgcccgatgaaaacttcagtctgaacgtactggtatcctacgactcgaccatcatccccaaccagtttgccacattggaagatatggcaaagttcaaggatgaagtagccgccagccgcactttcgtatttgtacgcgagatagaaccgctgttgcaagccggacttatcaaaggcggcgacctggacaacgccattgttatctatgaacgtgaaatgccgcaggatgcctacgacaagcttgccgacgtaatgggcgtgcctcacatggacgccaagcagttgggttacatcaaccacaaaccgctggtatggcccaacgaatgcgcccgccataaactgctggacgttatcggtgatctggctctgattggcaagcccatcaagggacgtatcattgccacacgtccgggacataccatcaacaacaagtttgcccgccagatgcgtaaggaaatccgtctgcacgagatacaggcccctacttacgactgcaaccgcgaacccattatggatgtaaaccgcatccgtgaactgttgccgcaccgctatccgttccaactggtagataaagtaattgagataggtgccaactacatcgtaggtgtcaagaacgtaacagccaacgaacctttcttccagggacacttcccgcaagaacccgtcatgccgggcgtattgcaggtagaggccatggcgcagacaggcggtttacttgttctgaactccgtagacgaacccgaacgctattccacctactttatgaagatagacggcgtcaagttccgccagaaagtagtgccgggagatactttgattttccgtgtcgaactgctggctcctatccgccggggtatctctactatgaaaggctatgtatttgtaggcgaaaaggtagtgtgtgaggctgaatttatggctcaaatagtaaaaaacaagtaaattaattatgataagtcccttagcgtatattcatcccgaagcgaaaatcggggaaaacgtagagattgctccttttgttttcatcgacaagaatgtggtaatcggcgataacaacaagattatggcgaatgccaacattctgtacggttcacgcatcggcaacgggaatacaatctttcccggagctgtaatcggtgctatcccgcaagacctgaaattccggggagaagagactaccgccgagataggcaataataataccatccgcgagaacgtgacaatcaaccggggtacggctgccaaaggaaagacaatcgttggcagcaacaacctgctgatggaaggtgtacatgttgcacacgatgcctttatcggcaacggttgcatcatcggcaattccacaaaaatggcaggcgagattgtcatagacgacaattccatcatcagcgccaacgtactgatgcaccagttctgccacgtaggcggattcggcatgatacagggcggatgccgcttcagcaaagacataccgccgtacatcatagccggacgggaacccatctgctatgcaggcatcaacatcgtgggactgcgccgtcgcggtttctccaacgaaaccatcgaggccattcacaacgcctaccgcattatctatcaaagtggactgaacaatacggaagctttgaaaaagattgagaatgaaatggaaatgaccccagaaatcagctatattgtaaactttatacgcgaatcggctcgcggcattattcctgcaagcaaataaaaagttaatagtatgatatatagatttaccctcatctccgatgaagcggacgacttcatcagagaaatacagattgacccggaagccacgttctatgattttcacgaagccatcgtgaaatcagtaggttataccgacgaccagatgacctctttcttcatctgcgacgatgattgggaaaaggaaaaagaagttaccctcgaagaaatggacgacaatccggaaatagacagttgggtgatgaaagacactcaggtcagcgaattggtagaggacgaaaagcagaaactcctgtacgtgttcgactacatgacagaacgttgtttcttcatcgaactctccgaaatcatcaccggcaagaatatgaccggagcaaaatgcactaagaaagccggagaggctcccaagcagaccgttgactttgaagaaatggctgctgccagcggctcgctcgacttggacgaaagtttctacggtgaccaggacttcgacatggaagacttcgataaagaaggattcggtggtttggacgatggagccgcaggtattgcttacgaagacgacaaattctgataaaccggttcgggcgaatagcacctgctccaatgacaacgagacttcccttgaggatacattcgtttcaaaggatgcaattgtttttcgcccgaattattttgttgcaatctcatgaaaacattgatagtacttataggccccacgggagtgggaaagacagaactcagtctccgactggcggaacacttcggaacatgtatcatttccgccgattcacgacagctttatgccgatttgaaaatcggtacggccgcccctaccccggaacaactgcaacgggtacggcattactttgtaggcacactgcaactgaccgactattacagtgccgcccaatatgaagccgaagtactgcaacttcttgagcaactctatacccagcacgaggtcgtactcctgaccggcggctccatgatgtacgtagatgccgtatgcaaaggcattgacgacattcctaccgtagatgccgaaacccgccggcttatgctgcacaaatacgaaacggaaggtttggaacacctctgtgccgaactgaaactgctggacccggaatattacaaaatcgtagacctgaagaaccataagcgggtaatccacgcactggaaatctgttatatgacaggcaagacctacacctctttccgcacacagcaaaagaaagaacggcccttccgcatcatcaaaataggactcacacgtgaccgtgaagaattatatgcccgtatcaaccaacgcgtagaacagatgataacagacggactggtagaggaagcccgcaatgtctaccctcaccgtgcactcaattcactgaacaccgtaggctacaaggaaatcttcaactatctggacggtgaatggacactgccttttgccattgagaaaatccagcagaattcacgcatctactcccgtaagcagatgacgtggttcaagagggacgaagagatacgctggttccatccggaacaagaaacggagatacttgcatatctccgttcccagctatcgtaaacctgcccgcaaccggcacagcccctaaaacctttccgagcctttgcacccggctatcgtcaaggcaaagccgttattgtctttttcagccttatgtcctggctggatgcgcctatcataacctcaaactcgcccggctccactgtccagttcatattgcggtccagaatctgcaagtcttccggcttcaaggagaaagtgacctgcctggtttcacccggttgcaaggataccctctcaaaaccgcgcaactgcgaatcgtaggtaatgacactgctcaccttatcgcgtacatacaattgcaccacctcgtcacccgcacgttttccagtattcgtaacgttgactttaatcgtatattcgccctgcgtatgctgttgcaacggagagacttccaaatcggagtaagcaaaagtcgtatagctcagaccgaaaccgaacggatacagttcgccgatgacgcgtgttgcgcccgaaccgtttggaccggaatgcggttgagcgccatgcgaaccgggtttgaaagggaagttcagctctatctgtcctacgctcttagggaaagtcactgtcagcttgccgcccggattatgctcgccaaacagagtctccgcaatcaccgttcccccctgacaaccgggaaaccacgactccaagatggctgggatataagcatttgcccagttgacggtgagcggctgcccgtttatcagcaccagtatcaccggctttcccgttgcatgcaatgcctcaagtaattgctgctgacgtcccggcaagtcgagcgaagtacgcgaacggctctctcccgtacgatactcatcctcgccaagcacggcaataatgacatcactttcaccggcttttgctacggcttcggcaatgccttgcttttcctgttcgctcatgggcgcaggcaatatctccgtggcaggccaacctgcatctacaatatcacagcctttggcataatccacttcggcaatgcctttcagataattacgcaaaccggcaagcacagtaaccgtctccagtccgttagggccgtaacggctggtcataaagttatcctcatcagccaacgggccggtcaccagcaccttccttatctgccgtttatccagcggaaggatattattctcgtttttcagaagcacaagtgcctgttgctgcatctgcttcacaaaatccatattccggtctgccccgcctactctgtcggcggctttcgtatcggctacataaggttggtcgaacagtcccaagcggaatttcacccgcagtacttccgacacacgcttgtctatcacagccattgaaatcttcttttcttccagcaaccggcggatgggcagaataaaatcggaaggcggagtaaagtgggtacgcacattcaagccggcttccaaaacctgaagcacagcctcatcataggtatccgccacatgatgcttggactccacaaactccacagcctcgctgtcactcaccacatagccgtcgaagccatactcctcgcgcaacaattccgtcagaaaatagtagctggcggatacgggcacaccgtcccaatcgttataactgctcatcactcccataggatgcgagttctgaatgaccttcttaaaaggataaagaaacagttcgtgcaactcgcgcggagccacatgcgggtcggtacggcaattcccgtcacgtccgcctttgggcacactgtaaactgcatagtgcttcaaagtagcagctactccctgcgactggatgccgttcaccatttccgttcccaaagccgctatcagatagggttcttctccataacactccaatgtacgtccccaacgcgggtcgcgtacaatatccagtatgggagcatacacattggtgtatcccaacgctttcgcctcttgtccggctatgacaccggcacggcgaacaaactctttgttccaggtgcttccgatggcaataggagcaggcaacggcgtggctttggtgtggttcagtccgtgaatcccctcattcgtgaagtcaacgggaatccccaaacgggtttcttccacaaaccagcgttgcacggtattgacggcctcggcatgattgctgaaagggtacaataaaccgggaacctgcgcagacttctttcccacgccgttcagtatctcatcgatattggcaatgccgtctttccatatttcgtttttccaaccggcaacgggcagggaatcctttaatacacgtccgtagccgtaaagagttgccagttggcaggttttctcttccactgacatttgggagagcaggtcggctacccgcttttcaaccggttgggaagggtcctcataaatatccttcaccccgttcttgttgaaatcgatccaaccgttccgatacattttcttgttttgcgcctgcacatttccggcaagccccagacaaagagcggaaatgcagataatcagtttgtgtttcatgtataaaatcaataataagtaattaaaattcaaacaattccgcatattcggcttcaatgaacgcatccagctcattatagagcgactgcattgcctttacatccgcttcccctttcctgcgccactctttcaataccggtgcggtgcgccggaacacctcatcctctaccggagccagcaactgcatatagccgttcttatcggtattataaagcctttcccagttcatatagcggttgctgcccataccttgcccgtaagagaaaacatcccctgccagtattaccgaccaattgcccaaaggagaaaccttctttgcttcatcgcgaaccagcaacctcggcaaagccttgtccgcccctttcacccagacgggcattgccactccggtaggcggataccccagaattgtccacatcgtagtgagttcgggccgctccccttctttcacgccctgcaccaccaccgaacttgccgtactgctgcgtgcgatgaagtcctggtctacaaaccaccccgttgtcttaggacgattgaaatccccgctcttcaaatcaatccccaaaagcggattggcaaaagagcgggaaagctccctgaatatccattgcggcgtaatctgtcccgtagcagaggccggcatcagcagtttatcttcctgcataaagcggacataacccgctccctcattcaccttgccggaaaaagagaagttggtgcgtgcaatgtacccgcaaggcgcatccttaggattgttggcatcgtacatcacatactcgtaataatccacttcgaacatggcagcaccgcctttggcatcaatcacgccgaagtttgcctctatcaggctgggcttggacagcgtatcgagaaattgtcggaaatccttcaccgtggcacacacttccaacgcacgccgcattacccgtccgttggcctctccacgctcctcaccgggtttcacctcgaccaaattataggattgcgtattcatgatggaaaaacctgcggcattcgtacctatccacacatccgtcggattgtcttccacactgttcacaacggctacaaaaggatagcgaccgccggagaagtatctcacgctgttttgcggaaagtccgtatcgcggttcttccacaacaaaggacgtccgtcgggggtaaccttgccggaaattacggcagaagtacaggcggaaagcggcccggcgcttcccaaagatacaatggcggcaatcaaagccaataaagtccgtttcatagcaaagaagttttaccgttaatctcgacaaagataaaaaatcaatccggattagtatatcacaccggtcaaaatacctacaaatagcgattgcagttctcgaagaaaagccgttactttgcgcccgaaacatagagtggaaaggaataacctgcaatgaatgaacaacataaatatcgggctacggacaagatgagcgacctcatctg

SEQ ID NO: 4108 - DNA, 24954 bp, Unknown
  gut microbiota DNA sequence
atttatgtatataatacatttgttggcattaaaaagtttaccattgcagtttttttagagaattttccttttaataaagagaaaacggccggtcttatacgttacttgtaattcaggaagttttcctgcaccagctttcctgcctgccacacggcgcgtatgttcagttccttgtccatgatgaggatgtcggcgtccttatccttttgcagggaacctttgcggtcgtacacgcccatgatgcgtgccggggtttcggaagccatgcgcagggcgtcgcccaacgggatacccgccttgaccatagtacgcaccagcacgtccatggtggcgatactgcctgccaatgaggagcggtcggcaagcttgcacacaccgtcttcgatgatgtagcgcgggtcgttgatttccttgccttcggtggcggcgcaggagagggcgtccgttacgaggcaggtgtgctctacacctttcagtttgtatgccagtttcaggatggtggacggcaggtggatgccgtcggcaatgagttcgatggtcatgccgtcggtcaggtagacactttccacagtgccttcgtacttgtactcgcggcgtttgtggaagccgggcatggcgttgtagaagtgggcggcatgggtaaatccggcttcgtaggcggcacggatgccgtcgtattcggcttcggtatgcgatacggctgccagtatgcctttttcgcgcaggtagctcgcaaactccagtgctccgggcagttcgggagaggcgtcccagcggcggatgcaacgggtgctttccaccaactcgcggtattcctgtccgtcaatctccttcacctggtcggcaaactgttcgcctgccattttcttgttgaggtagggaccttcgatgtgcaatcccagtacggggctgtcgggctctgccataagctgctcgcacacttgggctgcctggtgcagcttttcgaacggagacgaggaaatggtagggtagaaactcgtagcaccatgaccgaggtgtgcattgatgatgctgcgaaacgcttcttcggtacattcggtgaagtcgtggccgccaccgccatgcgcgtgcatacacacgaagccgggcacgatatacatgcctttggcatcgatgaggcgtgcgccgatgagggcgaggtcacagttggtcacttcgagtatttttccgtcgcgcatcaggacggaaccttcattcagccagccttgcggggtgaatatgcgtccgttgataatttgagtaagcatttttagatttatgatttaagatttatgaattataatcccagcgttgtgcttttgaatttatcgaaggccaaaattaagcattataaattaaaaatcctatatgcgggattttttaatcatcttcttctccgtcttcggtggcggcgttgtttctgccgatatttgcgtatcttgccgtataccagccagacgaacaatactccaaacacggagaatatcagcagtacgatgcccgtgttgaggttgtcgcctttcacacggctccacatttcgagtacgagttcggtgcggttgccgaagtcgcgtatcatggcgcagcgttccaccactttcctgtcgggatattgcacggggtttatttgcaggctgtccgcacccacaccttcaccgaagaaatagctgaggtcggaacgtgtcgcgatggcggtgtcccgtttggcttccatgatttcaggagtggcaacggcgctgacgtagcctatggcgtccatattgcgcagggcgatgtcgggccggcagaggtagttgatgaagtaagcggcagctttgggattgcctgcatatttagggattacccagccgtcgtaccagatgttgctgccttcgcgcggcacttcgtaggcaaggtccacgcccacggcacgggcttcttcgatggcccatacggcgtcgccgctccaggtgaggttgagccaggtcttgttcttggtcatcatctccttgccgaagtcggcttcccagcctgcgatgttgggcttcatggctttcagatacttctcggcaagggctatggcttcgggagagttatcgttcatcagttgctccacggtgacggtgctgtcggcaagctgtcgggcatgggcgtagatgatggcggttccgtaggcatcgcggtaactgtctttcatcaggattttgcctttgttcctggggttccaaagacagtgccaactgccggcttcgtcgggggtgatgaagttgcggttgtagaggatgccggctgtgccccacatgtagggtacggcatagtcggtggtggtgcgttccggctggctggtcttgttcagttcccggcggatgtagggggagatgttgggcagatagtccggggtcttgccgaagttgcggtcgatgggcaggagaaggtctttcttcagcatccgctcgatgatgtactccgaggggcataccacgtcgaaatcttcgtggccgcgctctatcttggtgagcatgatttcgttgatgtcgaacacctggtagatgaggcggatgtcctcgcccgtctgctgcttgtaccaggcgggaaattcggccagtacatcttcgtcgatgtagtcggcccagttgtagactttcagtacgtggctgcgctcttcacccgaatctttgcacgagacggctgcgaggacgaggcaaaggagaaggaatatgtctgttaatcttttcattttttattcagcaggtttatcttgactatgctttcgtttttcggcttacgggatgaatctctccgtgctgcgggacgaatactcttatcttgcgagacgcaggcggacttatttcttccgtgcacgttccgcacgcttgttgatgacaatcagcagcaccagcaccgtaatgaaaataagggtggacagaggacgcagctccggtgtcagtccgcctttacgcgcatcggcgtagatgtaggtggagagcgtttccagtccttcgtttccaatggtgaatatggttactgcgaagtcgtcgatagagagcgtgaaggcaaggatgaagccgctgatcatgcccggaagtatctccggcagaattaccttgcgcaatgcctgaaagggagtggcgccaaggtcgagggcggcttcgtacacgttctggttcatcttcttcaagcggggcattacgctcagcactacataaggggtacagaatgtgatgtgcgccagtaccacggttgtgaatccctgcgagataccgcaactgacgaacagcaggaacagcgacacgcccgtaatgatgtccgcattcatcatcggaatggcattggcgaagttcattacccggcgcgtgcgtgtgcgcaggttgaagatgccgatggccgcgatgctgcccaacgccgtactggcggtggctgctaacatggcaatggcaaatgtgttccagatggcgctcgtcagcgagtggtgcatgccgcctgtgaagagggagctgtacagcttggtggagaatcccgtccagttgcccagcactttggcttcggtgaaagagaataccatgatgataaggataggcgagtacagcagcgcaagcagcagccacagataccctttggcaagaatacgcgtcatcatatcacacctccgctttcattggatgcgccgtcctcttcgttcgtaaagaggatggtgacgcctatcagcaacagcatgatgagcgacagggctgcaccgtagttccacattccgttgtatatgttctcctgcacggttgttccgaagagtttgatgttgttcatcgtcagcagttcggctatggcaaaggtgcttaccgtaggcatgaacaccattacgatgccgctcatgatgcccggcatggagaggggcaggattactttgccgaatacctgcaaggggttggctccgaggtcttgggcggcttctatgaggttgcggtccattttctgcagagtgttgtagatggggtatatcatgaacggcaggaagttgtagaccatgccgaacacaagtgcgccttcgcccaaaggcaggttcagaaagtcgaacagcgccactgtggcgagtgtgcgtatcagtatgttcacccacatgggcaggatgaacagcaccaccatggtctgcgaagtgttgaactgcttctggctgaggatgtatgccgccggataacccagcaacaggcaggtcagcgtggtgatgagggcgatgccgatggagtagatgaaggtgttcatcgcctccgggtgcatcatgaacttgcggaagttggcaaaggtgaaagctccgtcggcatccgtaaaggcgtacagcacaatcagcagtagcggcactatcgcaaatatcagcaggaacagtgcgtagggcagtgtccagttgcgtcgtcgcaggaagaaatgggataacttatcaaacattactctattatatcttatatcaagcgctactctatttaatcaagtattgctttattatattaggattatggacggtaagatgacgggatgatatcttatcgttttatcactctgatgttttcgggcgctatccgtatgcccacgcggtctccgtcgtcccaaacgtcgttggtgtctacgaagatgtcctcgtcccagtcggtaaacacggtgaggtgataatggtttcctttgtagaggatgaatttcacttcgcccgtcagtcgtccgtcttcttcgttatcctccaggatgacgttttggaagtccacttccaccgttacgggcgtttcgggaccgatgccttgcaccggactgcattcgaagctgcaacccaggaattccacgtgcgtttcgtccaggagcttgccctcgaaagtgttgcaggtgcgttctttcttcattacgtggatgtcgaaaggttttaccagcagacccacttcacggcctgcctcgaagcagtggtaatcctgcaccatcagctcgtagccctcgcgggtctgtaccagcatttcgtagtgcacgcctttgaagatggagcttgttacggttcccgtgagttgcgccgcatccgagggttcgaagatgtagatgtcctccggacggattacgacgtccacctgtgtacggtcgccgaaaccggtatccacgcagtcgaactcgtgttcgcagaagcggacgagccggtcgtgcaccatgacaccgttcagtatgttgctctcgccgatgaagtcggctacgaaagagttgataggttcgttgtagatgtctgtcggagtgccgatttgctgtatcctgccttcgctcatcacgacgatggtatcgctcagggtgagggcttcttcctggtcgtgggtgacgtatatgaaggtgatgcccagtttttggtgcatctctttgagttccatctgcatgtccttgctcattttcaggtcgagggcggcaaggggctcgtcgaggagcagcacttcgggttcgttgacgatggcacgggctatggcaacgcgctgttgctgtccgccggaaagggagtctacatcgcggtcttcatagtcggtcatgcccaccatgcggagcgcctgcttcactttcttttcgatagtggcggcggggagcttcttcagcttgaggccgaaagcaatattattgaatacgttgaggtggggaaacagggcgtacttctggaacaccgtattcaccgggcggcggtggggtggtgtctgcgtgatgtcttttcctgcaatggtaatcactccttccgaagctgtctggaagcccgcaatcagacgcagcagtgtcgtctttccgcaaccggacggtcccaatatcgttacaaactcgcccttgcggacagacaaattcacatcattcagtacggctttgtctccgaaaaatttcgatacgtgctctacaccgatgatgcagtcggacttttgcataagcgtttcttactttatccaaactaattaaacaaatctctacctgatatagtcagtcataaaaaaaagtggcgcaaaggtacatattttcttgaaaactttagagtttgtttaaaaattgttcagcattcttttgcgagttctttggagacggatgtttcctctttttattcgccacacacccgctttgttctcataaaacgcctccaaagaactcgcaaaagaaatggaaggaaatacttgggaaaagaaaaatcgaataacccaaaacagggtcatgagttataaattgcgggtaattgaccgatactcgcaaataagtcctaactttgcagtccgtaacattaaagtcttcgtaagaaatggaaaagaaaacagtactcatcacaggtgcttcttcgggtataggagagggctgtgcacgtaagtttgccatgaatggttaccgcctgattctcaacggacggaatgtagagaagctaactgccgtaaagcgcgaactggaaacggaatatcgcgcggatgtctgtctgctgcctttcgacgtacgcgaccgcggggctgcgaaagcggctcttgactcgcttcccgaagaatggaaagcgatagatatcctcattaataatgccggactggtaatcggcgtagacaaggaacacgaaggcaatccggacgaatgggacatcgtgcttgataccaatatcaaagcattgcttgccatgacccgtctggtggttcccggaatggtggaacgcggacgcggccatgtcatcaatatgggttccattgcaggcgattatgcctatccgggcggtagtgtgtattgtgccagcaaggctgccgtaaaggcgttgtcagacggcttgcgcatcgaccttgtggatactcccgtacgggtgaccaacatcaagcccggtttggtggagacgaatttctccgtagtgcgtttccgtggcgacaaggcggctgccgataatgtgtacaagggcatccgtccgcttacaggcgacgacattgccgaagtggtgtactttgccgctgccgtacccgagcatatacaagtggccgaggtgctggtaatgcctaccaatcaggctacgggtacaatcgtcagccggaaataagcacttttccgtaacaacagaatctaagagaataagagtaaactctgccaatcatgactaataagtacgaagaacgcctgggcacggagcgtatgctgcctttggttttcaagatggcgctgcctgcggtggcagcacagtttgtcaatctgctttacagcattgtagaccgtatttacatcggacacataccgggcatcggaaccgatgcgctggcgggagtgggggtgaccatctcgctcgttgtgctgatttcttctttctccgccattgtgggtggtggcggtgctccgttagctgccattgccctcggacagggcaaccgtcgccgtgccggaaagatacttggcaatggctttactctgttgattcttttcactttgcttacttcgttcatagcctatacctttatggagcctatcctgctttttacgggtgcttcggagcatacgctgggctatgcggaggactatctttccatttatctgttggggacgctgtttgtggaagtgtctaccggactgaatgctttcattaatgcacaggggcgccctgcggttgccatgtgttcggtgttgataggggctttgttgaatattattcttgatcctatattcatattctggttggatatgggagtgaaaggcgctgcgttggctacggtgctgtcgcaggcttgcagtgcggtgtgggtgctgtccttccttttctcacggcgcgcttccctgcctttggaaaggcggtatatgaagctggaaaagagtatcgtgctctccatgctggcgctcggcgtatcgccttttatcatggcgagtacggaaagcttggtggggtttgtgctcaacagcagtctgaaagaattcggagatatctatgtcagtgcgcttaccgtcctgcaaacgtctatgcagtttgccagcgtgccgctgacggggtttgcgcaggggtttgttccggtgacaagctataactacgggcatggcgacaagcagcgtgtgaaggagtgcttccggattgcgctgattacaatgttttctttcaatctcgtcctgatgctgtttatgatttgcttccctgcgattgtggcatccgcctttacgagcgatgcaaggctgatagaaactgttcgctggacgatgcctgtattcttgggcggtatgacgattttcggtttacagcgtgcctgtcagaatatgttcgtggcgttggggcaggccagaatatccattttcatagcattgctgcgtaaggtaatcctgctgataccgttggcgttgatactgccgcattttatgggagtagcaggtgtatatgcggcagaagccatatccgatgctacggctgccatttgctgtacgctgctgtttttctggcagttccctaaaatactgaggagaataaaaagtaaaagcctgtctgaataaggtacgttcttgttatggcattccgtctcttttcgctttgttgaggatggttgcttccccttatttgctctcgtcattcccggttcggatatgttgaattgcatacctctctaatttcagaatcaatgattcgggtataaatatccgtaaatcatatacaattcggtttgcgtaatcgcggtaattttgcaattggaaaacaaccggaaatatcactaacttcatacggtaaatggaatgactatgaacaggattcttttaatttcagtatcttaactttcaatattatggcacaggagaaaatagtacagacagccgggcgcacccgattaggagagttcgcccctaaatttgcggagctcaacgacgatgttcttttcggagaagtgtggagtcgcaccgacaagcttggtctgcgcgaccgtagtttagtaaccgttacctcacttatcagtcagggtattacagacaattcgctcgtatttcatctgcagtcggcaaagaagaacggcattacccgtactgagattgccgaaatcattacccacatcggtttttatgccggttggccgaaagcatgggcggcgttcaatctggcaaaagacgtatgggcgaaaaatgccgttggtgaagatgctaaagccgctttccagcgcgaaatgatttaacaaatatacataacgtatgataggtataaggagatgctcaggtcaccccatcgtgacaaataaaaaaaatcaaatcataataaaatgaaacaatttatattggtaattatgagtttactaactttcagttgctcatcgaaagcacaaaaacagacaacggataccggtatgcaatccgataagaaaattctcgtggcctatttctcctgtactggaactacggaaaaaattgccggtgccattgctcaagcagttaacggtaagctgtatcggattactccggctgtagcctacacttcggcagaccttaattggaataacaaagcaagccgtagttcggtagaaatggcggatgaaaattcacgtcctgcattgggtggggagacactcaatctgaaagattacgacgtagtattcctcggttatccgatatggtgggatttgtgtcctcgtccggtcaatgcattttttgagaaatatgacttctccggtaagaccgtcattccatttgccacttccggcggaagttctattacaggtagcgtgaaacagctcaaggcgctatatcctcaaatcggatggcaggcaggacggctatgcaatggaagtgcaaagcaagcaggggattgggcaaagcgggtaatcagtgtagaatagaataccataccattgtaactgcccaatatcaccagattcaccgatgatcgtcattggtttatttagtattaccttatcagctatagtaaattgactcaataaatcaagttcatcatgaaatatactataattagggatatccagtaaatgtccctaaaaaataagatggcatatgaagatgatagagcataaccacttcatatgccatttttatagtcatttttctgtgctttctcacataattctatccgcaaggatatgaagttctggaaagagcctgatgctttcttctaattgtgtgagtaaaatcatatcatgctgctttagccgttctgtttatttccttgtactgatgtattttacaatctccgctcctttaaaataaataaccagcgaactgacaataatcagcattcccgctaccgtactgaatgtgggggattctcccgcaagcattatccaacttaatacagctccgagaattgggttgataaggcggcacatattgatgtcgctgacttttgcgcctttgctttgcaacgccataaaccagaagctgaatgcaaagacggaaataaatacgaggatgcccaggctgatataaaatccggcaggcttgccgatgaaagagtgataaccttccgtgcccagtcctatgacgtagataagggcgccaccgaaaaacatctgtacggcattcaggaagatagggttgaccttgcctttctcttcggatacggagatggcggaatagccctgaaagataatgctgagcaacagtagtatgatgcctgtgatgcctttccagtccagcggttcaccgtcgctgcccatccctacaatcagcaagaggcctgcaaggctgatgatgaggctgacgattttgtagccgttcagtttgtcgttacttgccagcagatgggcaagcagtacattgataagcggcgtcatgcccatgatgatggatgatatagccccgcttacgaagtccactccgaaataaaaggccgtataacccatgaacatattaatgaatatcagattgaggaacagtttgcggtgttgcttgatttcctgccacatccccttgtgccaggtataggcaaaaagtagaacgcctacactggtgaaacgcagcccggcaaaattcatcggagtaaaatcataactgagcccttgcttgatgaacgggtttacgatggcccatagcacagatgccaatatagcgtatagcagtccttttttcatgcttatagaaagtagtttggtaaaatcgggtgcaaagatacgcctttcttttgaattaaaaattaagccagcgtttgaaagcggcgagtttctcctcgctgattgtgattttactcttatacggcggacgtaccgttaccgatatttttccgttgaagtagggttcggcatggtctatggcatcgatgcacaggataatttgcctgttggcacggaagaagcggtcaggatccagttgttcggaaagcttattcaacgagaggtcgagtacatgttcctgattgttgcgggtaacggcaaaggtcattttgttctccgaataaaaataagctatatcgctgacctgcaaagaccagaaacggtcggcgcggtatatgaggaaacgggtgcggtattgcttttctttggattgcagggcatccagcagagttgccagatagtcgtcgggacggggattgctgcactgctgcaagtgttcgtatttatcaatggcttcctgcaaacgctgctcatctatcggcttcaggatatagtcgatgctgttgacggtgaacgcacggactgcatactggtcgtaagcggtggtgaagatgatggtggatgagggatgagctgccgaaagaaagtcgaacgagttgccgtcggcaagttgtatgtcgaggaagagaaggtcggggtggggatgcgtggcaaaccactcggtagcttcttccacactgccgggaattacggtgatgtcccattccgggcgcaggcgggcaatcatggaatgcagcaggcgggcagcaggaatctcgtcttcaatgatggcaatagcaggcttattcatatagcaaagggacttttacagtaaatttttcggtttcgttcttgataatgattttcttgcccgacatcagttcgcaacgtttggcaaggttctccagtcctattccggatgatgcgacgctctttttggggtgtatcggattgctgacggacagatactcatcttcgatgcggatagtgataaccataggtttgccgggagtgatggaattgtgtttgattacattctctaccaataattgcagcgtgaggggcggcagcatcttttccgcatattccgcaggaacgttgttttggcacgtaaggcagttgcccagacggacctcgtgcaggaaaaggtacgaacggataaattccagttcttcgccgagcgtcaccagtgtcttgtcctggctttgcagcacgtaacggtaaacactggacaggtgcttggtgaagtgtaccgcattttgggggttatactcaatttcagctataagcgtgttgaggctgttgaacagaaaatgaggattgagctggttttgcagggcggtgtagcgtgccgtgtcgttttcggcctgcaatacagccgcccgttgttgcagcctcaacgccttttgggtagaacggtttgccagtaataatcccaagacaacaagttccacaagccagatggtaatcagcatccaccatcctcttggctgaatggagaacggattggctgctcccgccagtattttggcgcttacaagcagcccgtagttcagcaacaggaagagcgacatgcctgccagatagatgacaggaattttccaccgtgaacgcatatttacggcatactgtgtattaatccatgaactgaggcggagggtagcatatcccagcacattgaatgccaggataaaatagatgaacgctccgcgggaatagagtgcatcggcaatatgaggagacagattggtgtagtctaccagcaggaagtaggagaacgctcctaatccggagaacagaatgccgtatatcagattattccatttcatgagggacaaagttatagtgttttgggaaaactcaatagctgtgcaatgcttttatcaggccggagtaggagctttgtgccgaaactttggcttgtacgtagtttatttgcgaggcttgccggtagttctgggcttcaatgacttccatgatggagattttcccctcttcataacgttccagtgccttctgttcgttttcacgtgctttctcaagggaacttccggtgaggtccacctgttttatggcttgtgcaagagaagtgcgggcggtttgtatttcgaggtttacgttatccgtcactttattgagatagtcgtttgccatgcctactttccaggcggaagagcgtttttcattgcgccgtttgccccattcgaaaataggaacggacagcgtggcgtatatggcatagttagggtcgaggtcggttttgaagtcatagccgggtgaggaatagctgccgtctattccgacatacagttgcggcttgtatttggagtccgtcagcttaccctggctttcggctatttttatttggtcgtgtgccataagcagttcgggacggttgcttctgtcggatgccgacaggctgtcggatggaagcactacgggaatggactcctgcacttcggtctcggattcgagcggcatgcctatcagggagttgagcgccatgcgtccggtctcaaaactgttacgtgcctgcaatacctggtattcggcttcattgagtttgacttctgccatgagcaggtcttgagggtcgacaagtcccgcctcaacgcgttcgcggatagtgcgcgccagtgaagcgaccgagttgcggtagtctgtggctatgttcatcagttcccggcgggctacggcattccagtattgcatatccgtctggtagcatacggaggagtggagcagttccgcctgatgaacattcatggattgttggtgctttgccagccggatggattcgcggatgcgtccgccggtgtagagaggctgcatcaacgagagggatgcgccgtatttcatgtcacgcccttcgaaagtgagaggattgctttggggcaggttcacggtaagttcgatgggatttccggtgtactggaagtttgcgtctcccgacagcttgggctttaaatcggctttggcggcttttatcagctccatgctggaagctatgttcttgtctgccgcacgcaagtcgtggttataattcagagccattgccctatatttctccagcagggaatcctgctgggaaaatacgggttgaacacacaaataaaaaagtaataaagtatagaatgtcttcatgcttacttattgatttttatacgataaaacaggatatataatgccggagtgacaaacagcgtcagcaaagtggcgaatgtcagtccgaagataattgtggctgccatgccgccaaaagcgatatcgaacagcaacggaaccataccgagaatggtggtcgtggccgccattagtacgggacgggtacgcgaaacggtggattctatcacggctgtgtaagcaggaactccttcgcggcgctgaatgttgatttcgtctatcagcacgataacgtttttgataatcatacccagcaatcccagccaaccggcaatggggaagaagccgaaatcgaatccggtgagcagcattcctacggcgacacctatcagtgacaggggaagtatgcacaggatgatgatgggctggcggaagttgccgaacagcgccaccagaattacaatcagcatgaggaatgccagcgggaagtatttggcaatcgcttccatggcttcaccctggtctttgtactgcgaatcccaaaagaatgtataacccggcggtagcggcattgcctctatctcactgcgtatttccccatgtacctctgccatggtatgcccaggttttacgccgcacatggcagccatgctgagctgacggttataggtacgcatctgcggaaattcccacgttgtttcaatgcgttccgtcacttgcgataagggagccgagcgttcaccgttccatacggagaagttgcccagggaagccgcatccgtaatgtcgtatccttcggacttcagcagaacagggactttcttctcattatcccgatagatgcctaccggtacaccgtcgctgatggatttgacggattgcatcatctgcgctttggtgatgcccagttcgccggcttttaccggatcgtagacggggcgtagcatcaatgccatatttccccattcgttacgggcatccgctactttaggattgcggcgcatgatttcgatggcctgccctacgagcgaatcgagcactgccgggtcggggcccaggaagcgggcttcgataacggcttccgtcagcgggctcagttcgaatttgtttactttgatgagcggtccgggaaatttcaggcggatagaatcctgcaatgcggcgttgagccggcgcgactcttccgaagtatggcacttcacaagcagttgtgtatagttggactgaggtccgaatgctacgttcgacagataatagcggggtggggttctgccgatgaaggtagataccatttccgcttccccgtgtgtacggatatattctgccatttcttccgccagcttcccggtttcgtcgatgttggaaccttcgggcagccatacgtctacggtaaaatattgcttgtccagtgcaggtacgaatactttggggatgaatttgaagctccatgcagagagtaccagcagtaagaccatgcaggctattgtggcatagcgatgtttgatgacccagtgcagggaacggcggaacatattgtaatactttccgtcgaacagggtgcttttcagctcttccggccggggacggcgtacaaattcctgaatgaagaacggagtttgcatcagtgcgaacacccagctgaacatcagcgaaaccccgataacgattaccagtgaggaaagcagttcaccggtaatgtggggtgaaaaataaatgggcaggaacgtcaatatggcaatgatagttgccgccagcaacggcagggcagtggaggaacaggcgcgcatgatggcaactcgctttctcatgccccgttgcatgtttaccagtgcggagtcggacaccacaatggcattatccaccagcatgcccatggcgatgatgatagcagccaatgacatgcgttgaagtgcgatgtcggtgcataacatcactatcagggtggcaaaaatggagaataccagtccgctgcctatcagcaatccgtttttgaaaccgataaaaaagagcaggattgccactacggtaagtacggatatgatgaggttgaggataaaaccctggttggcgactgccgattcgtagccctggtcgtacagggttacaagttcgaagccttcgggcatgctgcccgacatctgttggagcgattccttgacggcggctgccatatcgaccacatttccggtgggaacggtggaaatggcgatgccgacagcgggttgtccgttgatgcgcatcaggttgcttgccggggtctggtagctttcttcaatccgggtaatgtccgcgagccggaaatgctctccggtgcgcgatacgattgtaaggttgcgtatgtcgtccagcgaatagaaatttccggtggactcgatacgcaggcggttggaaccgacgtctatgccgccggcatccacaactttgttctgagcctcgaatgcgcgggcgatgtcggccatcgtgatgccgctacgggccatgacggagggacttacggaaatgtctatcgtaggtgtctgtgttccgtaaatctctactttggcaacatcctttactttcagaatttcattctttatcagtttggcttcatcttcaagttcgcggtagctgtgtccgcttccggtaagcccgtaaaaaacgcccagcacatcgccgaagtcatcattcacaacagagggaccggcgccttcgggcagcttgctctgtacgtcgcttactttgcggcgcagtttgtcccaaagttgctgcatttcgtcggcacgggtttctttctttacataaacggtgattttggacagtcctgcacggttctccgttttcaggtaatagagttcgcccaatgcctggatggactcttccagtacatctgtaacttgtgactgtacttccgagggagaagctcccggatagggagtcaataccagcgcctgtttaatggtgaacggagcatcttctagcttgcccattttgacgtacgccagcaatccgcctgccaatactaataccaacagcaggattgtgacgggctttttcgataaaaagtattttaccagtttcataattacttgtctttagaggtaatgtctactttcatgccgtccgagagaaaacgcagaccgcttgttgcgaggatttctcctatttgcagtccgtctgcaatctgtaccagtccgtcgggcagcaatttggctactgttactttacggcggctgacttgcgatgtggcaggattaaccacccatacataatcgcccgtggaaggccggtgacagagtgccgcctgggagatgcagaaaccggcggcactctctgcctgcggtgtgtccagaatcgctttgccggacatgcctgcaagcagtttaccaccttcattgggcaatatggctgtaagcagataggacagattgttgcgggtagtgcctttggacacctctatgatcttggcccggtaggtctgtccggggatggcgtcgaagcatatccgtatgctgtccgacgactgtgccgcataggctatttcctgcggtacatatatttctatccttagctgatgtatgtcgataagagatacgaccggctgggttgccttgacatcctggaatttttcgatgtacacttcacctacatatccggtgaaaggggctgtaaggcgggtatcttccagttcgcatacggcggtatcaaaggctgttttggcggagatataatcggcttttgccttttcgtaggtgctggcagagatgttctctttccggtatagcgcctctatgcgttcgaattcggccttgctttggcggtaaacggcttcggcgcgttctttgcggatgcggaaatcgcgcgggtctatctctgcaatgatgtttcctcgttcgtatcggttaccggcatacacgtcgaagcggtcgataggcccgcctacccggaatgacagttcgctggtgcggaacggccgggctatgaaaggaaactctttattgccgttttggggcaatgcagtaacttgggaagtgctgactgacagctcttgcttgtcttgggtatccttgccgccgcaagcatggaacagcagggcaagaacagacaataggataacgggtacttttgttctcatatatatatcattctgatttttttccaaaagtacggaaggacacactgttttgccgggaaataatttccgaagccgggaaacttaacgctggaaaaggggaaataagggataaaaggggaatggaccagaaacgggaagaggctgatatgtatcttttcaggcacagaattacacaggaaaaagatagagcaaaaacccggtggcagaaggtagaaaagaacaaagcggagtgaaggcaaacagcctgctccgctttaaataaaaagatattgaaaagggtattgcaaagaatagtttagttctcgtccgttttaaagtcaatggttttgtaatattcgccgtcgtgcagactttttacgcggatattgagtccggtttttccgggtatccggtcggctatcttatccagtttgaaagagacaagtccttgtcccggcatgagcggctcgtcaccgtaagcattctggcggaattccagcgtaatatatccctctttgtcattcttgccgtcggatgcttcgttgactatgaggttcagcatatgttttttatcattgctgttgctgtggtatagctggtattggatgttcaggtagttgtccgtaatccacatattgttgatgttgatgcggtcgtcgccgatgctgtcggccttttcggcaggcatgaaataaatgtctttggtaaggatattctctacatggttgattttggcattgtaatcgtagccggttacttcttcatccagcaggttgaaatatacaaaggcgcgctgtccttccaccaaggtatagttatccacttgggcagtgtcaccgggaaacattttggttccttcatcgagtgcgaagtagtagtcttttccgtcaattattcgcactgtgccgatggcgagcaacgggtgttcgtcatcatcccaatcgtccaggcaggattgcagtacgggagtggtgatgaacaacagcagaaatgcggctaatatcgttctgaactttttcataagtagaggttttgttattggttctgttttaggttttgtattcagaaaatgccgggattgcacaaatactgcttataagaatgttaaagaaaataaagaataaatttcctatctgccggatgcagtatttttgtacccgttgcatttttaaggtaaacacgtgttaaaagagaggatggaagaacaggtattggcagaacgttgcaggcaaggcgacaaccttgcccgcaaagaactgtacgaacagtatgcggggcggatgctcggcgtatgtttgcgttacgccggtgaccgggaaactgcacaggatttgatgcatgacggtttcctgaagctcttcgactctttcgataagttcacttggcggggagagggttctttgcgggcttggatggaacgtgtaatggtgaatacggtattgcagtatttgcggaaaaatgatgtgatgagccagtccgctgccctggacgatgtgccggagacgtatgaggagccggatgcttcggcggtggatactattcctcaaaaggtattgatgcagtttataagcgagcttcccgccggttatcgtaccgtattcaacctgtttgtttttgaagataaatctcataaggagattgcccggttgctgggtatcaacgaaaagtcatcggcttcacaactggtacgtgccaaagctgctttggctgccaaggtgaaggagtggatgaaaagaaacgcataaatggagaaacgtatggaagatgaattgtggatgcgaaagataaaggagcggttggacgattattccgaaccgctgcccgtttccggctgggagcggcttgagaaggatttgtccgtttcgaagcctccggtagccggaaaacggcggattatacctttccgccgctgggctgtagctgcggctgcgacactgctcgttgcggtgtcgtcggtgagtgtatggctgctccaaagccctgtgggagaggagatgcggaatatgactgcaccggcattggctgccgtgccggacaagctgccggagcaacagacgccttcagtacggacagagataacagaacccgactatcgcgcacagaaacaggaatctccggcggatacgaaccggcgttccttgctggcacaacaactgaataccgtagatgaaacggagcgggaaacggtcatccaatccttgggcgcagagccggaagttcagactgggaacgtacagaaaccgactgcggagtcggcacgggtaaatcaggaagcagcagaagaagagagaagggaagaggagcgtacggaaaagattgagcgccgccgcccgtcaggcagagacaaattgcatttgccggttggcggagcaaagcgggagcagtcgcgtggctggtcggtcggattggcagtaggaaatacgggcggattgatttcgggaagcagtatgagtgaaagcggactgcttcaaaacggacagaacttcggtgtttccggcggaagggtagacctcaccacaatgtctgacggaataatggaagtgccggaagggcaggagcttgtctttaaagatggcataccttatctgcagaggagttccggacaggtggtggacatagaccataaacagccattgtctttcggcttctcggtacgtaaagggcttgcacggggtttctccgtggaaacgggcttgacgtatacgtacctcgcttcggatgtgaaatttgccggaagttcggaaacggtcagccagaaattgcattatttgggtattcctttgcgtgccaactggaactttgtagataagaagtcctttatcatgtatgtttctgccggcggcgccatggaaaaatgcgtttacggaaaaatagggagcaaaaacgaaaccgtgaaaccgctgcaattctctgtaatgggagctgtgggtgcacagtataatataagtagcagagtcggcatttatgtagaaccgggagtgtcttatttctttgacgacggttcggacattgagactatacgaaaagaaaatccctgcaactttaccttgcagggtggagtacggttgacttactgattaaattgagagttgagaatcaattctcaatttaccactactgtgggaaagtactctttaaagagtttttcggctcgttccagttgtgcgggggtattctctactacttcttttaactgataatcccagcccatagcttcgtatttatgcactcctaagcggtggtagggaagtatttccacccgttgtatgctttggtatttgccgagctgttcgcccatgttgcgtatgtcttcttcaaaatcactatatcccggtaccaggacatagcgcagccaaaacggatgtccctgttgttccagccaggcagcggtgcgcagggtttgttcgttgctgcgtccggtcagggtacggtggcgttcgggattgaattctttgatatcgagcaataccaagtccgtcagacttaacaattcctcaactttgtcgttccagattccgccattggtgtcaagacagatgtggatgccgtttgctttcaagtctttgaacagtggtatcaatgcctctgcctgcaaggtaggttcaccgccggagaaagtaattcccccttttttcccgaagaaagctttttggctgacagccatttgcaggatttcaccggcagaagtaggagtaccgccctttacatctattgtatcggggttggcacaatacaggcaacggaaaggacagccctgaaggaatacgacaagccgcagccccggaccatcgaaagtgcccattgattcgtatgaatgaacattaatcataaatagtgtattataagcaaagaatgtagtaaaaaagaaagcacggactacaggggtgttactccggatttttgcttaatccgtgaaatccgtgctttaaaaggttatgtatccgttttaccgattacattctttcgtggaaactgcggctgataacttccagttggtgttcgcggctcagtttcacgaagtttacggcatatccggaaacgcggatggtgagttgcggatatttctccggatgttccatggcgtcttctagcatttcacggttcagtacgttcacgttgaggtggtgtgcacctttggtgaagtaaccgtccatcatggtaaccagattctctacgcgttcctcggcagtgggacccaatgatttcggaacgatggagaatgtgttgctgataccgtcctgtgagtcgcggtagcgcaatttggctacggaactcaaagaggcgatggcaccgttcttgtcgcgtccgtgcatcgggttggctcccggagcgaaagcaacgcctttggcgcgtccgtcgggagtggctccggtcttcttaccgtacatcacgttggatgtgatagtcagcagtgacagggtaggacgggcgttcttgtaaacgggcagcttcttcagctcttcgctgaagtagtacaccaggtctacaccaaggtggtctacacggtcgtcgttgttgccgaagcacgggaaagaaccttcgatgtcgaaaccttccgtcaggccgatgtcgttacggcgtgccgttactttggcgtatttgatggcagacaatgagtcgatggcaatggaaagtccggctacgccgtatgcaaggttgatgcgcgggtctgtatctacgaatgccatttgggctttttcgtaataatacttgtcgtgcatgtagtggatgatgttcattgcttcgttgtaaacgcgggcaatctccgtcagcactttcttgtagttgttcattacctcttcaaagttcagcgtatcgtgagtcagcacggggatacctttcaccattacagttccggtgttttcgcaacgtccgccgttgatggcaagcagcaatgctttggcaaggttggcgcgtgcgccgaagaactggatttgcttaccgatggcctggtaggatacgcagcaggcgataccgtagtcgtcgcagttgcgtacctcgcgcatcaggttgtcgttctcgtactggatagagctggtatctacggatactttggcacagaattccttgaaaccttccggcagttcggggctccacagcacagtcatgttaggctcgggagacgggccgaggttgtacaatgtttgcaggaagcggaaagaggtttttgtcacctttacgcgaccgtcgttgaagcgtccgccgatagcttcggtaacccaggtggggtctccggcgaagatgtcattgtaggattgcatacgcaggtggcgtaccatgcgcagtttgatgatgaactggtcaatcagctcctgtgcaaaagtttcgtcaatcttaccgtgagccaaatcatattcaatgaaaatgtcaaggaatgaagatacattacccaatgacatggcggcaccgtcttgttcttttacagcggcaaggtatgccatgtatacccactgtacggcttcctgagcagatgtggcagggtggctgaggtcgaggccgtagtattcgcccatggtcttgatgtccttcaaggctttgatttgctctgccacttcttcgcgcaggcggatgcgtgcttcggtcataggaccggtcaggtggcgcaagtcttcctgtttggcttcgatgaggcggtcgataccgtacaatgccagacggcggtagtcaccgatgatacgtccgcgtgcatagttgtcgggaagtccggtgaggaagcccaatgaacggaacgaacggatttcttcggtatatacatcgaatacgccgtcgttgtgtgttttgcggtagtgtgtaaagatgtcttttactttatcgtctacctccacgccgttttcgcggcatgcttttgccactacattgatgccgccgaaaggtttgatggcgcgtctcagcagttcatctgtctgcaagcctacgataagttcgttctccttatctatatagcctgctttgtgggaagtgatggtagatactgttgtatgatctaatgaacggacaccgttattggctctttcttcttccagtgctttcagacagaggttccagatatgcttggtgcgctccgttggtccttgcaggaaagatgcgtctccggtgtaggacgtgatgtttttactaacgaaatcacttacattgatttctttgctccaaagcccgtcaataaaggttttgtttaattccataatgttcttttaataaaagtgattagatatgttatcctttagagcgcgcaaaattacggaaaaatttccgtaattacacaataatatggaggatttttatgttgaagagcataaaatagctattattaggtaggaagtaccaccgggtattgattcgtgtccgtccgattaatatctgtactcttatcaactattattatttatgctgaaatctattcgtcccacaataatttccctttcgtccgacagctgttttattttcgtccgacagttgtcggacgaaaataaaacagctgtcggacgaaaagattttagtaacattttattagttccttttatgccgtatttttagtttttgcggatatgtgaattattttattccggatttgtttgcgaattaaaaaaagaagcgctatctttgcaccgctttaagagaaaagcacttcttgaaaaagaagttttggagaggtggcagagtggtcgattgcggcggtcttgaaaaccgttgtgctgcgaggcacccggggtt

SEQ ID NO: 4109 - DNA, 24305 bp, Unknown
  gut microbiota DNA sequence
ggccgaaagtcagcaacacgcgccggcaaggttttccgggtttggtaaaaacatgcaaacggcgatgtggatgaaaattatatttccaggccgtatcaatcactgttctttcaacttcggccggaatgataatgcttataactccctgttccgataataagtacgccgaatgcccaaaaagaagttcatagttcagctcactcgtgtgccgtgccatgcagcgctgattgtcagggcatctcagggcgtcaacaaaataaggcgggttggaaacgatcaggtcgaatttatcttccgggtgatacttgcggaagtcgcagcatacaacttccatccgattgctccagggggacgattgaatattctcttgggcttgtgccgccgctgccggatttatctcgacagaggtaattaccgcttccggattacgctgtgctaattgtaaggatattaagccactacccgctcctacatcaagaatccgtttaacatcttgaaccggagcccacgctcctaataacaccccgtctgtacctaccttcatggcgcatttgtcgtgtcggacagtaaattgtttgaactgaaaataaggattcggcatatttgtctttgttaatcggactcaaaaataatcaaagccgacaaaataacggcaattttggcatcgtttttgtctttttaaagaaaggacacccgtttatacagaagaaatagctaactttgcaagcgccttattggcctgccaatatgacataaactaaaaagaatgaaatgaagaaaagaaattactttagtgatatcgaagataggaatgaaaatgcattttctgtaattgctgattttgaggggaatgaagaacaattgatggatattgaggttgatgaaatccttccggtattgcctcttcggaacatggttttgtttccgggtgtgtttatgccggtatccgttggaagaaagtcttccttaaaattggtgcgtgaggcagaaaagaaaagttcatatatagctgtagtgtgtcagaaagccgctgatacggaggagcctgtacttgaggacttgcatacaatcggtacggttgccaagattgtccgtgtattggaaatgccggatcagacaacgactgttattctgcaaggttccaaacgcattgagttgaaagaaataatggaagtggctccttatttgaaagggcgtgtaactaccctcaatgaagagatacctgctaaagatgacaaggaatttcaggcattggtagaagcatgtaaggatttgaccgtgcgttacataaaatcctcggaaatgtttccgcaagactctgcattcgccatcaaaaacattaataacccgatgtttttggtagattttatctgcaccaatctgcccttgaagaaggatgaaaagatagagttgctgcgtattgacgcattgcgtgcccgcacttatcgtttgcttgagattttgaatcgggaagtgcagcttgccgagattaaggagtctatccaaatgcgcgcccgcgaggatatagaccagcaacagcgcgaatatttcctgcaacagcagattaaaaccattcaggatgaattgggtggtggcagtcaggagcaggaactggaagaaatgcgcaaaaaagctgaaaccataaaatggaatgaagaagtaaaaagtacattcctgaaagaagtggataagttggagcgcatgcatccgcaatcgcccgattacagtgtgcaactgaactacttgcagactatgatgagtttgccgtggggcgtttatacaacggataatctgaacctgactaatgcagagaagacgttgaataaagaccattacggcttggagaaggtaaaagagcgtatattggagcaccttgccgtattgaagctgaaaggagatatgaagtcgcctatcatctgtctgtatggtcctccgggtgtgggtaagacctctttggggcgctctatagcggctgctttgaagcggaagtatatccgtatgtccttgggtggcgtacatgatgaagcggaagtacgcggacaccgcaagacgtatatcggagcaatgcccggacgtattatcaagagtctgattaaagccggttcttccaatcccgtatttatattggacgagatagacaaggtgagtgccgaccgtcagggcgacccttcttccgctctgctcgaagtgcttgatccggaacagaatactacgttccacgacaacttcctggatgtggattatgacttgtcgaaggtgatgttcattgctaccgccaataatctgaacacaattccggggccgttgctcgaccgtatggagttgattgaagtaagcggctacataaccgaagaaaagatagaaattgcccgtcgccacttggttccgaaagagctggaagcaaacggtatgaagaagagcgatatcaagattccaaagaatacgttggaagcaatcatcgagtcttatacccgtgaaagcggtgtacgtgaattggaaaagaagattggaaaaattcttcgcaaatcggctcgccaatatgctacggacggctatttcgcaaaaacagaaatcaagccgggcgatttgtacgaattcctgggtgctcccgaatatacacgcgacaaatatcaaggcaatgaatatgccggtgtagttacgggcttggcatggactgctgtcggcggtgagattctgtttgtcgaaaccagtctcagccgcggtaaaggcggtcgcttgacactgaccggaaacctgggtgatgtaatgaaagaatcggctatgctggcattggagtatatcaagtctcatgcttcgctgctgaatcttgatgaagagattttcgacaattggaatatccatgttcatgttcccgaaggagctatccccaaagatggcccgtcggcaggtataacaatggctacttcgctggcatccgcacttacgcagagaaaagtaaaggccaatcttgccatgacaggcgaaatcacgctgcgcggaaaagttcttcccgtaggtggcatcaaggaaaagattctggctgccaaacgtgccggtatcaaggagattatcctcagcgacgagaatcgtaagaacattgaagagatacaggaaatttatctgaaaggactgactttccactatgtgaaagacgtaaaagaagtgtttgccattgcgctgactgatgaaaaggtagctgatgccattgacttgtccgttaaaaaagaaaagatagaaaagtaagaagaatgacatttgagttacagtatacagacagcaagacaaatgcccgtgcaggtttgattaccaccgaccacggacagattgaaacgcctatctttatgccggtaggtacgttgggaaccgtaaaaggcgtgcatttgacagaattgaaagaagatataaaggcgcagataatattaggtaatacctatcatctttatttgcgtcccggattggatgttattgaaaaagccggaggattgcacaagttcaacggcttcgaccgtccgatgctgaccgatagcggcggttttcaggtcttttccttggcaggtatccgcaagttgcgtgaagaaggtgctgagttccgttcgcacatcgacggaagcaaacacattttcactccggaaagagtaatggacattgaacgtaccatcggggcagacatcatgatggcttttgacgagtgtactccgggcgatgcagagtatgcctatgccaagaagtccatggaaatgacgcatcgttggctggaccgttgtatcacgcggttcaatgaaacggaacccaaatacggctatcatcaggctcttttccctatcgtgcaggggtgtgtttatcccgaccttcgcaagcgctcggccgagttcatagcctccaaaggagccgagggcaatgccatcggcggtttggctgtgggcgaacctacggagaagatgtacgaaatgatagagctggtgaatgagatactgccgaaggacaagcctcgttatctgatgggtgtaggtacacctgtgaacattctggaaggtatcgaacgcggagttgacatgttcgactgtgtaatgcctacacgtaacggacgcaacggtatgctgtttacaaaagacggtatcatcaacatgcgtaacaagaaatgggaaaccgacttctctcctattgaggcagacggtgcatcttacgtagatacattatatagtaaggcctatctgcgccacctcttccatgcacaggagttgctggccatgcagattgcttccattcacaatctggcattttacctttggcttgccggtgaagcccgcaagcatattattgccggtgatttctctacatggaaaccgatgatggtacaacgtgtatcgacaagattatgagaaagattgactggaagatgctgaaagacatcaagctgcctgtcgggaaaaataagttcctcaagcggttggactggtacatcatcaagaagttcctgggaacatacgtgtttgccatagccctgattatttctatcgccgtagtattcgactttaatgaaaaaatggaccgcttcatgtctcatgaagcgccatggcaagccattatcttcgattactacatgaacttcatcccctactttgccaatctgttcagtccgctgtttgtcttcatcgcagtaattttctttacttccaaacttgcggagaactcggagattatcgcaatgttctctacgggaatgagttttaagcgcatgctgcgtccttatatggtgtcggcggctattatcgcaatcactacgttctgtctcggttcgtatgtcattcctaaaggcagcgttacgcggcttaattttgaggacaaatactataagccccgcaagtccaccacagcccgcaatattcagttggaggtcgattcgggagtcattgcctatatagagcgctttgaggattacagcaaaacgggttaccgcttttcgctcgataagttcaaggacaaacagttagtgtcccatcttaccgcacgcagcattacttacgatacggcagccgtccacaaatggaaggtgaaggactacatgatccgtgaaatggacggtatgcgcgaaagcatcgttaaaggagagcggctggataccattctctttatggaacctgccgacttcctcataatgaaaaaccagcaggaaatgctcaccagccctcagttgagcgagtacatagaccggcaacggcaacgcggttttgccaatatcaaggagttcgagatagaatatcataaacgtatagccatgtcttttgcctcgtttatcctgacgctgattggcgtatctctttcttcgaaaaagacaaaaggcggcatgggattgcatttgggcataggcttgggattaagtttctcgtatatcctgttccagacgattgcctctacatttgcagtgaatggtaatgtgccgcccgtcatagcggtatggataccgaacctgctttatgcattcatagcattctatttgtataagaaagcgccgaagtaggcaactgtaggaagctgttgtcaaagcataccgcagaatagtgtaaaaaataagaagccgtcccactcttgtgtttccacaagtgcgggacggcttttttgttgtattcatttcctcttttgttttgttcttctttcttttcaggcggacagaccgcctttgtcggaagaatccccactttcttcttacaggttctttaatcccttcattgccatgctgtgcattgaagcgcttaattcaagtaagccgaaagctctgcagcagagatgtttttggcaataatcacaccattttcatccagtaaatagttagtaaatccgcgacctaagcgatatttcttgaataagccggaggactcgcctttagtttccacgaaacaggtgggcgtaactatttggtccttacgaacggtttccttaaagatagactgatactcatcgaatgagacggaaaccatttctacattttcattgcgggaagcggaacgaagcacattgctcaaactcgcgttttgcatccgggagtgcgcgtcataacttgcccaaaagctaagcaacacatatttgcctttcatgtccgaaagttcggctaacggttgcccggcagacatagattggattttgaagtccggggctatgtcacccacattcaaaccgccggtcggtttgtctttttctacaaaagaagtcaaggaaccaattagtaatacaacaaaaatccattttacatatttcatgtaacacgattttggttaatactatccgggactgtcctttttggcagtgatttcttcccggaatgtcatcttctcagaccttgcaatgagaggaattcattgatactcaaagcctttaattctgaaatcgggtgcaaaggtaagtaattcttaaagaaacttccaaataaacaagcgattttctcacttttttagtgcaattttttatgttatttagcataaaaggcgggatttttccttacttttgtggcttgttatcctattaatagacaacttatgaaaccattaagtacagaacttatcctgatccgcgtaacaggtgaagaccgtccgggactgacggcttcggttacagaaattcttgccaagtacgatgcaactatccttgacatcggacaagccgacatccataacaccctgtcgttaggtattttatgtaagacggaagaacaacattccggctttatcatgaaagagctgcttttcaaggcatcgtccttgggtgtcaccatccgtttctaccctattacagcaaaagaatatgaggactgggtgagcatgcagggcaagaaccgttacattctcacgttgctcggacgtaagttgtctgcccgtcagatttcggcggtgacccgtattctggcggagcaaggaatgaacattgatgccatcaaacgtcttacggggcgtattccgttggacgaatgtgatacaaagacgcgtgcctgcattgaattttccgtacgaggcacccctaaagaccgtatcggtatgcaagaagaactgatgcggctggccagtgaactggaaatggatttctctttccaactggataatatgtatcgccgtatgcgccgccttatctgttttgatatggactccacactgatagagaccgaagttatcgacgaactggccattcgtgcaggtgtcggcgagcaggtaaaggctatcacggaacgtgccatgcggggagaaatagactttacggagagcttccgtgagcgggtggcattattgaaagggttggacgaatctgtcatgcaggagattgccgagaacctgcctattacggagggggtcgaccgactgatgtatgttctgaagaaatatggttataaaatagctattctttcaggtggtttcacttacttcgggcattatctccagcagaaatacggcattgactatgtatatgccaatgaactggaaatagagaatggcaaactgaccggacgttatctcggcgatgtagtggacggcaaacgcaaagcggaactgctgcgtctgatagcgcaggttgagaaagtggatatagcacagaccattgcagtaggtgacggagccaatgacttgccgatgctggggatagccggattgggcattgcttttcatgccaagcctaaagttgtggcaaatgccaagcagtccattaataccatcggcttggacggagtgctttatttcttgggattcaaggattcctatatagatattccgcggtaaaataagtccgtacgataaaattcacaggctcctgcgataattaattatcataggagcctgttttttaagcgggcttattttgttctgcccccggtttgcattatctttgcagcaaatataaagaaatacatgaagttttctgaactaaatttaaatgacaatgtgcttgaagcactggacgcaatgcgctttgacgagtgcactccgatacaagaaaaatcaatacctgttatactcgaaggccgggatttgatagctgttgcacaaaccgggaccggaaaaacagctgcctatctgttacctatattgaacaagctttcggaaggcgggcatcccgaagattccatcaactgtatagtaatggcccctacacgggaactggctcagcagatagaccagcagatggaaggtttctcctatttcatgccggtgagcagcgtggccgtgtacggcggtaatgacggagtgcttttcgagcagcaaaaaagaggactgactttgggagcggatgttgtaatcgctactccgggacgtctgatagctcatctcagtctgggatatgtagacctttcacgcgtctcctatttcattttggatgaagcagaccgtatgctcgatatgggattttatgatgacattatgcagattgtgaaattcctgcctaaggagcgtcagaccattatgttttcggctacgatgcctgccaagatacaacagttggcgcaaaacattctgcataatccggcagaagtgaaacttgccgtttccaaacctgccgagaaaatcgtacaggctgcctatatatgctatgagaaccagaaattgggtatcatccgcagtcttttcgccgagcagacccccgaacgtgtcattatcttcgcttcttccaagttgaaggtgaaagaggtggccaaagccctgaagcaaatgaagctgaacgttggggaaatgcactccgaccttgaacaggcgcagcgtgaggaagtaatgtacgagttcaaggcgggacgaatcaatattctggttgccaccgatattgtggcgcgcggtatcgatatagatgacatccgtctggttatcaattatgatgtgccgcatgacagtgaagattacgtgcaccgcatcggacgtacggcacgtgccaacaatgacggtgtagcccttactttcgtcaatgaaaaggaacagacgaatttcaagagcatagagaatttcctggaaaaagcaatctataagatacctgtgccggaagagctgggtgaagctcccgaatacaagccgcgctccaatgacggacgcaaacgcagcagctttaaaggcggcggacgccggaacaacggaaccggcaaaggcggcaacagaaataataacaaacgcagggacggcagcaaaaagcccactcaggcaaagaagcaggaataataaaaaaagcggaatttattccgttttttttatgtccatccgattatcgaatccgatggtaatatctgccaggctatatacggagctttccggcacgcgtaaggttgcctgatattggtagcctttattatcaactcccataaaattcatatcggcaagaatcatctgactcagaatatcttcgggaaagatgccggcaaatgccttcttggtaatgtctttgccatacaacattcgtctgccctcatacacgcaaatatgtatgacattgtcatagtagacattgtccacgctgatgccaccctctgaataggatgagcggataactttcattgtcgaagggttgacgtacacatatccccggtagcgtgtgcctttgtacatcactacgctgtcctttttcaccacttccgtagtgggtatgacttccacttccttgttatcaaaggcgagtatatcctccggattttccgatttatgcagttttataatctcatccgccaatgaatgaaaccagaagctgtattctgtctgtcggtcaatcttgtaagtcacggtatgattgccgtacacatacatcgtatctcgtataatcttgaatgatacggggatattctgaggatcggcatagtatatggtatctccttctatacgcatcaggggcagttcggtttcatcatttatccagacaccctgaagcagagccttggccgtagcgtcttcttcgagtgttttttgctctttaccattaccgcatgcagccaacgctatgacgcagcacaactctattacgagttttttcatgtctatctccttcctttatttacctatacagtggtaggtaaatccaagttcttctatttctttcttttcgtagatattacgaccgtccagtaacaccggggttctcatggcttttttgataacggcccatgacggcaggcggaattctttccattccgttaccagcatcaaggcatccgcatcgagtgcggcatcgtacatatcggtggcatagcagacgctgtcgcctatcctgcggcggcactccgtcatggcagccggatcgtacacacgcactttacaaccggcattcagcaacttgtcaatcagaatcagcgaaggcgcctcgcgcatgtcgtctgtttccggcttgaaagccaatccccacaaggcaattgtcttatcgcgcaaatcgccgttgaagtggcgttgcagtttttcaaacaagatgcttttctgcttttcattgacttcctctacagcctggagcacacgcatccggtaaccgttctgttcggcggtcttgatcaatgcctttacgtctttcgggaagcacgaaccgccatatccgatgcccggatagaggaacttacggccgatacgcgtatcggaaccgatgccgctgcgtaccatattgacgtcggctcccaccagctcgcataggttggcgatgtcgttcatgaagctgatgcgggtggcaagcatggagttggctgcgtatttggtcatttcggcagacggaatatccatgaagataacgcggaagttgttcagcagaaacggtttgtagagtttgctcatcagtttctttgcacgttcggactccactcccaccactacccggtcggggctcatgaagtctgctaccgcattgccttctttcaggaattcgggattggaagctacatcgaagtctatctgtactccccgcttatccaattcgttctggatagccatgcgcacctttccggcggtgcctacgggcacggtacttttggttaccaccaatacatatttcgtcatgttacgcccgatggtacgcgccacttcaagcacataactcaggtctgcactgccatcctcgtcgggcggagtacccacggcgctgaatataacatccacttcgttcaggcaactttccagagaagtcgtgaattgcaggcgccctgctttcgcgttccggtttaccatttcctccaatccgttttcatagattgggataataccctgcttcaatgcttctatcttttcgctgtttgtgtcgacgcaaatgacattgacacctatttcagcaaaacaagtaccggttaccaaaccgacgtaccccgtaccgacaatggctatcttcatatcttattcaaaatattccgcatctttgaaagatacggcatgtccgtctttctccgataatatgaactgagattccgcaaccggccagtcgatgcctatggtttcatcattgaagcgaatcgacgcttcggcctgcggagcataaccgttatctactttgtaggtaaagattgcctcttcgctcagtaccagaaagccatgggcaaatccgcggggaataaagaactgacgcttgttctcttcgctcagttccacgctgacgtacttgccgaacgtaggagaagaacggcgtaaatcgaccgcaacatccaaaactttaccttttatgacacgtaccagcttcgcctggctgtattcgcctttctgataatgcaacccgcgcagtacgccgaaagaggattttgattcgttgtcctgtacgaaatgtacatcgccgatattggcacggaattcttcttccttaaaggcctccatgaagtagccgcgtgcatcattgaacactttcggttcgatgatccatacgccgtcaatttctgtctgtatgtagttcattgctttagaatgttttatgtattttcatttgaaatccgaagttgtctccgtatatatctcccatgtccaaagcgagagaggcgttgaagttccagcctttccatctttcgggagaataagagaacgaggcataggccgaaaagttctccagaatatccagtgtgggagcaccgggagtaccccatgttctgttgtggctcattttggctatgtagctccattcggaagttatttgtccgctccagccgatgtgcagcgcttttatgcggttgtacttgaacgtcatgtcaccgtcctggttatagataggcgaagcaatcaacggattggctatcatcatgccccaatgcgcccagccggggtaaagaccgttgttgtaatagttgtcggaaccgccggtcttgtgtacgggaccttcttctggttcgtgcaagccgtgcagcggaccgctcatattggtggtctgcaggaactcgaacacaaccgcattgacgggcttgaaattgttgaagttcatttcaagtccccacaatccgtcccaaccgttctgcttgcccatggcggagaagtcgtcgaaatgattgcacaggtatgcgctgatagagaatttatcggaacggtgggtcagctttatctgttcgctgcccaggaagttgccctgatagaaattgctgtcgttccagggtttgtcttcactgccggagccggggataaatactctgaaataatctttcagcgtgttgcccagatttaccgtgctgccgtccgcattcaccagtgttccgccgaattgcgtatcgagcgtcatgccgatgtcgagctgccatttcccgttgggcacaccgacgcggacaaatccttctttatgatgatatttgatgtctttcgtgtaccaatgccctgctcctaccttccgttcctgatatttgttatcggtgaaccatccgtaagagatttcacctttaatggcgaaacgcggaaggacatacaagtattcggggatgcctatcattatttgcggaatcggcctcgcgttgcccgaccatgtcatgtcaccgctactcaaagcgttattcagcaatggagcacctttctcgcggcttccggcaaaaattcctagccacttgtaacgtgcatctatataggcctgctggataaaaatatccttgtcgcccttgaagttcatgcccacggcagctaccatgtccagtttttcttcgaacttccacttgccgagccggtgtttgtagcccagtccgccccgtatatacgtattgtcgtaaatagagccgagtccctgttggttgctcacttgccacagaggagtattgtcgcccgtgtgcacggtggctccgtattccacaaaaggcgaaacctgtgccgttgccataccgctacctgcaagaataatggccaacaaacagataggaatacgcattacggcaaatagtctgtatttggttaagtgctgacagttatctgtgttcattatcgaatatataatatagtttatagtcctaattaaagagaaacgtagaaaacggtgcaaaagtaggaaaaaaatctaatatatcggtcatgggcgataaaggagtttccaaagtttgccgtgtttataaattcttagtaagaaaagcagcccgaaagtggcatatatccgataaaaccgctacttttgtagcatgattgaattagcacagcacatagaagcattattattggagaatgattgtgtcattgttccggggttgggcggatttgtcgctcactatactccggcaatgagagtggcggaagaaaatacgtttttgccccctacccgcatcatcggcttcaatccgcaactgaagatgaacgacgggctgttggtgcaatcctacatggctgtgtatgatacggatttttccgatgccaccaggattgtaggcaaatcggtgaaagaactgctggctcttcttcatgagaatggaaaagcggatttgcccaatatcggcgaattgcgctataacattcatgattcctacgatttcacaccttacgatgataagcttaccactccttacttatacgggcttggcagttttgaaatgcaggaactggcagtcttgcacaagccctgccggaacggaagcaagactattcctttcgcaccggttgtccgggaagaaaagaagcgtaagtatggaatgcgaatcaacacttcttatctggcgaatgccgttgccatgattgccgttgcggctctgttcttttttcttcccgcacccgtagaaaacaccgaagtgatggaagccaactatgcgcgactgctgccaggtgatttgttcgggcagatagaaaagcagtcattggccatcactccgattgtcatccatcagcaggagacgggtaaaaaggcgaaaaccacccgtagtgccggcaagaaaccggttgctcccgttgccgtaaaagaagtaaaagtccgtcagcagactgcaacaattgcggctcagcctaaagcagcgcccacagttgccgctcctgccgttcaagccgtaaagacatcttatcatattatcatagccagcgtgggttctgaaaaagacgccgacaccatggcacagcagttggttgccaaaggttatgcaggagctaaagcgattatcggtgacggtaaaatgcgcgtcagcattcagtcctgtgccacggaaaaagaggcataccgcgccttgaacctgattcgccagaatgaagcatacaaaagtgcctgggttctgaaaagataactttcttcacagtcaattattaaccaacaactattccgacaattcaatgaaacgtatccgttgccccaaatgtgagaactatctgactttcgacgaaacaaaatatacggaaggccagtccctggtatttgtctgcgagaactgtaagaagcagttcagcatacgtttgggcaagacaaagatgaaagctccgcagaaagaggagaatccggacgaaaccgaatacaaggaagccttcggaagcattacggtcattgagaatgttttcggattcaagcaagtgctgccgctacaggagggagacaataaaatcggccgccgctgcgtagggacggttgtcaatgtcccgatagaaacctcggacatgagcatggaccgtacgcactgcattatcaatgtgaagcgcaacaagcaaggcaaccttgtctataccctgcgcgatgcccccagcctgacgggtactttcctgaacaatgaaattctgggtgacaaagaccgtatccgcattgaggacggagccattgtaaccattggcgccaccactttcattcttcgggcggcggagtaaagagattgcctttccggtttatccaccaatagcgtataaacaatactccggtgaagatgagcgcaagcgacagcccggtatagaacaccgaaataaacgcgtccggcaatatatggaacgagcgcatcgtgacgccgaacgttatcatgaagaccattataatccagccttttacgtcaaagaaagaaaaagggcagttcttctctttcttcttttctccgatacgtttggtgtgcttgtaataaagccttttgaaaacaaacaaaaagaagagaaggaacacgactgtggcctctcctatcttgaaaagccagtattgggaatctgtcagccatgtcattatccctatcctgagaatattggccccggctataatccataccactccggcggtaataagcaatacttttctgtttactccgtatttcatgtttccgttttgtataatcctgctgatacagggaacaaagatagtgaaaatatgttcgtaaattcatattgtgtactttgctggcggtcagttgtatgcatgtaccaataaatttctttgcttggtactgtccgtaccacagtttggtacgagaagtaccttactaaggtacggcgcgtaccactgcgtggtacaagagctaccaacggttggtattccctgtaccacctgccggtagttgaggtatcctgtggtggaatgccggctaccctgcggtggaataccgacaaagtgcttaccagtcgtattcctcggtgtaccggtcgaactgtatctcctctttccagccatgcttccggcatacctggcggatgcactcctgctgcttcggagtaagccccagcttctggttgcgataccggtaatagggcgaatggttgaatatggcttccagattgaggtgaatggcacgggagatgcgtgcgggcatatcatcgtaaagtttcttgaagccccatgccacccgtattttcttgttgctgcggaagtgcgggcactccttccctgccgccggatagcagagggggttgatgacggacagccggatgttttgcgccgtggtgtattgtgtcatactgtgccgcaggcagttttcggctttcgggcatcgggtgttgaagcacaatgtgtattgggctgcttgattgtttaagtcggagttgttttccattagttatcagaattttgatgaatatcgctttatccggtaaagatacgcgaaaaaatccggccggcaccatataacggctgttttattgggtaggtcgggcataaaaaaacaaggcaaagccgaagccctgccctgtttttcttttgtcataccggttctttatcagagaatgctttttactgtttccagcatacccttctcctggatagagttcaggaagccggttaccatatccgtcagtcccggaatggcgttcaagtctccgtgctcgccccagatgaggtctttggctgccaatacgccttccgctactttgcgggtatcgcctgttgcccaaaggtctttcagcagttgcatgatttcgggagcgtcgttcggggtgatttcagcgccgtcggcacgtacgccgcccttgtaatatgtgatgatggcggcaagaccgagtacgaggcctttcggaagttcgcccttgcgttccagataagtcttcaagcccggcaggtcgcgggtctggtatttcgggaaggaattcagcatgatgctggttacctggtgctctacgtaaggattgtcgaaacgttccaatacatcggcggcaaacttcttcagttcgtccataggcaggttcagtgtctgcatcagttcgtcgaactgtactttacggacatacttgccgataacggggtggttgcaggcatcgcgcacgatgtttacgccgctcaggtaagccaccggagaaagcacggtgtgaggaccgttcagcaaagtaacctttctttcgtggtaaggagcttcggacttcacgaagagtacgttcaatcccgccttgtttgcagggaactcctctgccaactggcggagagagagattctcggctgcctcgataacccacaggtggaagatttcggcctgtacaaccaggttgtcggcataacagattttcttctgaatctgcgcaatctccttgcgcgggaagcccggaacgatgcggtctaccagagtggcgcatacatagcagtactttgtgaaccaggtcttgaacttctcgtaatccgctccgaagtcgtctttccacagttcgatgtactggtagatacattctttcaggtgatgtccgttcaggaaaatcaattcgcaaggcatgatgataaggcctttgctcttgtcgcccttgaacgtcttgaaacgacggaacagcaactgggtcagcttgcccggataagaagatgcgggggcgtcgctgaacttgcagttcgggtcgaacgcgatgccggcttccgtggtgttggagataacgaaacggatttcgggctggtcggcaagcgccatgaatgcagagttctgagaatagggattcaatgcgcggctgatgcagtcgatacgcgtgaggctgtttaccgcttcaccgttcaaacggccctgcaggttgacatggtaaaggcagtcctggccgttcagccattccgccattcctttttcgataggctgaaccactacaacactgccgttgaagtcggtcttttggttcatgttgtaaacaatccagtctacaaatgcacgaaggaagttaccttcaccgaactggatgattcgttcgggagcaacggacttgggagccgtctgtttgtttaatgctttcatcttgaaaatgattttaattatgattgttggattatgattgatagtctttcttactgtatgcaggattattcaaactcaaaatagaagtcgatgttttccttcatcaggatgtcgataggcatatattttacggctgtgaccggctttttgaataccacgtgattgcacagtgctttgatgccgcaatagccttgcagtcccggccgctgcccgatgagatagttcacttcgccgtttttcaggtgttccacattcttctgaagcaggtcgtagccgaccagtgcatccagcttcagattctttttctgcaaatagtccgccacttgatacacgcgtgagttgaacacgacccctaaagtggctttgggatgtccggagaagaaagcatccagcacttcctcgttggcggcggtgtcttccttgtggagaacgacatcgtgtatagtcaggttcttgtgctcggccgcaagatactgcataaagccttccaggcgccgttgcatctgaacctcggcggggctgttcttctgattgttcaggaaaagcgccagttcctgcccttcgcggtagcggcgcatcagtattttggcggcgatgtatccgctgaccttggagtcctggcctatatagcatagtgcatgagtctgctccatattgaagtcgatgaaggcataaggtatctttttatcttccagatacgatgtcagcttcagggtatcatcctgaaaattcggggctatcaacaccccgtcggcaacaacggattgaagttgcgcacatgccgtttcataggatgctttatccgcatggctgtaaaaaagatagtccacccctacattgaacggccgcagctcttgcgcggcacggtctatgcccgccgcaacggagtgccagtaatcatgctctatataataaggtatgatacatactatatggtaacgcttctttgccgccagacctatggcaaacatgttgggatgataatcgatttcatcgaggactttttgaaccttatctctgcttgcacgggatacgtcgccccggttatgaagcacgcggtctacggttccggcagagacgccggacatgcgtgcaatgtcttttatcgtataattcttgttttccatcttctcccgccctaaggtgtttaaaggtcttacatttaaaacttaaatattataaatatttgccgcaaagatacgaattattttgtttctccaagtaaaatctctacttttgtgttcgataacggttaataaaagcaaaaagcgttatcgggcctattagctttacaatcaatactatataggtgtaatgacaagaaagtaaaatttttagatacttaaaacacaagaagatgaaaaactttatggacgagaacttcctgttgcagactgaaaccgcgcagaagttgtaccacgaacatgcggctaaaatgccgattatcgactatcactgtcatttaattccacaaatggtagcagacgactaccaattcaagtcactgacggaaatctggctgggaggcgaccactacaagtggcgtgccatgcgcaccaacggtgtggacgaacgtttctgtaccggcaaggacaccaccgattgggaaaagtttgagaaatgggcggaaaccgtaccttatactttccgcaatcctttgtatcactggacgcacctggagttgaagacggcattcggcattgacaagattctgaaccccaagaccgcacgtgaaatctacgacgaatgtaacgagaaactgaaacaacccgaatattctgcccgcggcatgatgcgccgttatcacgtggaaaccgtgtgtactacggacgaccccattgactcgctggaatatcatatcaagacccgtgagagcggatttgagataaagatgcttcctacctggcgccccgacaaggcgatggcggtggaagttcccggcgatttccgtgcttacgtagagaagctggcggaagtaagcggtgtgactatttctactttcgacgatatgattgccgctttgcgcaagcgtcatgacttcttcgccgctcagggatgtaagctgtccgaccacggcatcgaagaattctatgcggaagactatacggatgcggaaattaaggcaatcttcaataaggtatatggcggtactgcactgactaaggaagaaatcctgaagttcaagtcggctatgctggttgcctttggcgagatggattgggaaaagggctggacacagcaattccactacggggctatccgcaacaacaacagcaaaatgttcaaactgctcggtcccgacactggtttcgactctatcggcgagtttacaaccgccaaggcgatggctaaattcctcgaccgtctgaattcggaaggcaaactgacaaagaccattctgtataatctgaacccatgtgccaatgaggtaatcgctaccatgttgggcaacttccaggacggtactgttgccggcaagattcaattcggttcgggatggtggttcctcgaccagaaagacggtatggaaaaacagatgaatgcactctccgtactcggcctgctgagccgtttcgtaggtatgctgacagactcgcgttctttcctctcctacccgcgtcatgaatacttccgccgcacgttgtgtaacctcgtaggccgtgatgtggaaaacggtgaaattcctgtttccgaaatggaacgcgtcaatcagatgattgaggacatcagttattacaacgccaagaagttcttccagttctaaaagacgggaatgagataattttaaaatcagcccttccatgcttgataccttatggcaagcgtggaagggcttttcattggataccgctgaattaagctttcctgtgcagcagataccttacaggagatattccattatatccgtgatgttttttaaccggatgaagttgggatgcgcaatatccccatcatgggtttcatactgccaggtgacgtggtaaggaatgtgggctgcatatccgcccagctccaaaaccggcagtatgtccgacttgacggagtttcccaacatcaggaaattctgcggggcgcattccacggtggtaagtagtttccgataatcggcttctttcttgtcactcattatctcgatgtggcagaagtagtgcatcaatcccgactcccggacttttcttctttggtcgaacaggtctcctttggtcgccagtaccaacctgtattttccttgcaggcggagcagcacctcttccaccccgtccagaagcgttacgggtctttgcagaagctcctgccccagcctgacgatttctttcacgcaatgcatgttaccttctcctccggtaatccggcaggctgtttcaatcatgctgagcatcatgcttttcaaaccgtagccatacatgtgcaggtttttcatctctgtcttgaacagctcctgcgaaacggcactctgcggttggtatgctttcagtaaatcacagaactgatgctcaaactcctgaaaataaacctcgttttcccaaagggtatcgtctgcatcgaatgctactacttctattttatctttcatacgttgtccgttttattgttattgagtatatttgctgcaaatataagtaattaaaacataactattaatcagtaaaggatgactcaatcaccccaaactaacgccaaaggtttcagcaaagccttttgggtaagcaacacagtagaactttttgaacgcatggcatattatgccgtatttattgttcttaccatttatctgtccaacattttaggttttaacgattttgaagcaagtatgatttccggtctgttctcgggcggactgtatctgcttcccatttttaccggagcttatgccgacaagataggtttccgtaaatcaatgattatcgcattttccttactatctgcaggatatttgggtctgggcgtgctgcctacactgctggaagctgccggactggtggaatatggcgaagttacgcgcttttcagggctggccgacagtagcgaacggtggatgattgttcccgttttgtttgtcatcatgctcggcggttcgttcatcaaatctatcatatccgcatcggttgcgaaagaaaccaccgaagcaacccgcgcccgtggttattcaatcttttatatgatggtgaacttcggtgcttttaccggaaagaccattatcgaccccttacgcaacgctatcggtgagcaggcctatatctatatcaacttcttctctgccacaatgactattctggcgttgctgtccgttgtccttctgtataaatcggcacatacggcaggcgaaggtaaaagtatgcgcgaaataggccaaggttttctgcgcatcatcaccaactggcgtttattgattcttatccttatcgtaactggattctggatggtacagcaacaattatatgccacaatgcccaagtatgttatccgtatggcgggcgaaacggccaagccgggctggatagccaatgtaaatccttttgttgtggtttgctgtgtaagtttcatcaccaggtggatggcaaagcgtacggctattacgtccatgaacatcggtatgttcctgattcctgtttccgcgttactgatggcgtgtggaaacctgctgggcaacgagattatttccggcatgagcaatattacattgatgatgatactcggtattgtagttcaagctttggcggaatgctttatttctccgcgctatctggaatatttctctttacaggctcctgagggagaagaaggcatgtatctcggattcagccatctccattctttcctgtcctctattttcggttttggcatagcgggtgtattgcttaccaaatattgtcccgacccggctttatttgcaacccgggaagcttgggaagctgccagcgccaatgcgcattacatctggtattactttgcgggaataggtttggtggctgccatagcgttgctgatttttgccaaaaccaccgaatccatcgacaaaaagaagaaagtataatcttttatattgcatattttcgctatatttgtcgcccgatgtaaagacaggtcgcatccggcataaattaagcatgcttaattctgtcctcatggcactgtctttgaggggtgtcgaaatacacttgatgattttttaggcacggattacacggatttcacggaaaaaagaataaagaaaatctgtgctttccatgtaatccgtgcctaaaaagaaacaaataagaagcgaattttaacataccctctttttaattaaggagattagaatgaaagtaagatttataagccttgcaagtggtagcagtggcaattgctattatataggcacagaaaaatacggaatacttattgatgccggtatcgctgtccgtaccataaaaaaaggattaaaagaggcaggtatcaacatggaaatgatacgtgcggtgtttgttacccatgaccatgccgaccatataaaagcggtaggcggattgggagaaaaactgaatatacctatttatacaacggcacgcattcacgaaggtattaataagagttattgcatgacggagaagttgcattcatccgtccgctatctggagaaacaacagcctatgcaactggaagatttccgtatcgaatcttttgaagttcctcatgacggtacggacaatgtgggatattgcatcgagatagacggaaaggtattctcttttcttaccgacctcggagaaataactcctaccgcagcacattatatctgcaaagccaactatttgatactggaagccaattacgatgatgaaatgctgcgtatgggtacttatccccaatacctgaaagagcgcataaccggtcgtaccggacacatgagtaacattgataccgcagaattccttgcagaaaatttcacagaacatctgcaatacatctggctttgccacctaagcaaagataacaatcacccggaactggcctataaaaccgttgaatggaaattaagagaaaaaggtatcatcgtaggtaaagacgtacaactctgcgctttaaagagaactactccttccgagctatatgagtttgaataaaaatatgccgatttcatcgaaaaaaactcctggaattgtttgcaaaataaaataaaaggactacctttgcacccgcaaatgagacattggcgatgcactcttagctcagttggtagagcaactgactcttaatcagtgggtccagggttcgaatccctgagggtgtacttgaaataaggaggtttaatcctccttat

SEQ ID NO: 4110 - DNA, 44491 bp, Unknown
  gut microbiota DNA sequence
ggattcaaataagtataggacatccaaatggcaagcaccgtattcttctgtcccagcgcctgtccgccactgatacggtcattgtaatgcccaccgattcttttacctaaatagaattggacacagcaggctgccaaacctgctaaagcaatcaggacttccacaaacaccggagcatcactgttcgccaacgaacgcaccgtctgccccgatacaatggcaagcgccaccgcccataagtagaaagcagcatcgtgaaactccaataagcatctatgcactttcttgacaaacacccgcagaaaccaggccatgaagaaaggcagaagcaacagcggaaacaccttactcagtattttcaagaaagctgcaaaaaaagtaacatcagcatgaggttcaacccaagggaataccaacggaacaaccaccgcagccaaaagattggacaacaatgtatacgtggtaagactcgacgcacttccgcccagcttaccggtaatgaccgcagcagcagtagccgtaggacaaataagacataccatagccccttcaaaaacttcccgatacatctcctccattggacagcacaccagcaaagccgccacaaccagacacgccaccgtctgaaacagcaacagccagccatgccatcctttcggtttcaaatcacgcgcttctaccttacaaaaggttagcagcaattgtgcaaaaatcaaagccggagtcaggagagccaccaacccgttcaaacaaggttttaccggtgcaaaccagggaattttcgcaaagaagaaatatccggccgtaccggcaagcatcgccaaaggcaatgtccaattctttataagacgaagaagcatacctgtatctaccaattaatatttgtgcgcaaagttacagatattatcaacaaataggctcatcgcagaaaataaaagggaaaaaagagaagcattgacacagaacgtagtatttttaattcgttagacagtcgtcgccctttcgttagacccgggtcatccgttcgttcaaccaaggtctaacgaaaggatgacccgggtctaacgaattatgcacagccaaccgccaaacagaagcaagtatagaaaacatgtaaattttgcaaatgcaaagactaaatctccctaaaaagaagctgttacgaataaaacttgaaagcaaagtgtgagttttctataaaattacattacttttgcagggcgataatagacctttgcgctatctttgcaacgatattttaatatgaaacgatacagacaacatatcttatatataagcctttgcctgggactgctcattgcgcctttttgttgcagcaatatcggggcgaaggattttgttgtcgttatcgacgccggacacggcggacacgaccccggcgccatcggcagaatctccaaagaaaagaacataaacctgaatgtcgcactcaaactcggcaagcagatacaaaagaactgcccggacgtaaaagtcgtatatacccgtacgcgggatgtctttattcctctaaaccgacgcgcggaaatagccaatgatgccaaagcggacttattcatctcgatccacaccaatgcgcttgccaataaccggaccgccaaaggcgcatccacctggacgttaggtcttgccaaatcggatgccaaccttgaagttgccaaacgggaaaactcggtcattctttacgaaagcgactataagacccgctatgcaggatttaatcccaattccgccgagtcctacattatcttcgagttcatgcaggataaatatatgtcgcaaagcgtgcacctggcatcacttgtacaaaagcatttccgcaacacctgccggcgggtagaccggggcgtgcatcaggccggttttctggtattgaaagccagtgccatgcccagtattctggtcgagctcggctttatctccacacccgaagaagaacgttatctaaacacggatgcaggaaccggcacccttgccgacggcattttccgtgctttccttacttataaacgggaacaggaaatccggttgaacggaagcagccagaccattctgccggaagacctgccacagccggaagagaaaacgtccgctcctgccgatgccacacccgagacagagaaaaaagcgaccgcccggaacaacaaaccggccccccagccttcggaaaaagcaaccgttgcgcagacagaggacaaagcccctgtgttcaagatacagatactcacctcttcccgtccgctggccaagaacgacaagcggctgaaaggattgaaaaatgtggattattataaggaaagcggcctgtacaaatacacctatggcgcatcttccgattataataaggtgttgcgcaccaaacgttcaattacggcaaaattcaaggatgctttcatcatagcctttaagaacggcaggaaagtaaacgtaaatactgccatcagagaatttaaaaacaaaagaaataaataaaatacatcatgaagtatattaccaaagaagtcagaattggaatcgcaggcatagcagcgctttgcatattagtatatggcatcaactatctgaaaggcattcacatgttcaagccttccagttatttctatgtcaagttccataatgtcaacggactcaccaaatcaagtccggtctttgccgacggtttccgcgtaggtatcgtacgcgacctgtattacgattatacccaacccggaaaagtggttgccgaaatagatgtcaacaccgacctccgcattcccaaaggcagtacggcggaactggccacagaaatgttaggcggcgtcaagatgaatcttcttcttgccaacaatccccgcgagaagtatcaggtcggagatacgattcccggcactctcaacaacggaatgatggagaaagtggctaccatgatgccgcaactggaaaagatgctgtccaaactggattctatcctcggctctttaaatacggtattggcagaccccgccatacctgccaccctgcacaatgtgcagaacctgaccgccaacctggccgtaaccagcggacaactgcaaacattgatgaataaagacatcccgcagctcacaggaaagctgaacaccatcggagataactttgttctgatttccaacaacctgaaagagatagactacgcaacagccatgcaaagcatagactcaacgctggccaacgtgaagatgcttacagacaaattaaaccgtaaggacaatacagtaggattgttactgaacgacccttcgctttacaacaatctgaatgccaccacggcaaacgcagcgagcttgttggaagacttgaaatcgcatccgaaacgctacgtccatttctctttgttcggcaagaaagataagtaaaaattcctcttaaatagattttgtctaaataagaaggctcatttgttattgggaaagaaaacccttgataagtctacgtataaaggtaaaaaagaggtttatactcatgctgtttccaatggatgcagcagcttgtgtataggatataatacactacattacaagctgttacataaaagcaagacttccagcaaaggcataggtttcatacatcccgataagtagctgaaagtaaagagattattgttttcctgagaaatgcaagaaaagagagatttgtttttttcaaataagattgccaattttgcaaacgtagaagttttgcttaattaataaatgtattagtaaccgttatgagtggacaggatcatgtcggattgtggaaccgctgtcttgaaatcatcagagacaatgttccggaacagacatataaaacttggtttctccccatcgttcccttaaaatatgaggataaaacgctcgttgtacaagttcccagccagttcttttacgaatttctggaggataaatttgtagacttgttgcgtaagaccctttataaggtaatcggagagggaacaaagttgatgtataatgttatggtggacaaaagttcacggcctgaaaagaccgtcaactacgagtcgacccaccgtactattatgccacaaaagcaaacgatagataaagctattccacagatacctgttcccgatttggatccgcatctgaatccggaatacaatttcgacacgttcattgaaggatatagcaataaactctctcgtagtgttgcagaagcagtggcgctcaatccggctaagaccatattcaatccgctgtttttgtatggagcatcaggtgtgggaaaaactcaccttgccaatgccatcggtacaaaaatcaaggaattatatccggagaaacgcgtattgtacgtatctgcgcatttattccaagtacaatacaccgactctgtacgtaacaatacgaccaacgatttcatcaacttctaccagactattgacatattgattattgacgatattcaggaatttgcaggcgttaccaaaacgcagaacacattcttccatatcttcaaccacctgcatcaaaacggcaaacagcttattctcacttcagaccgggctcccgtactgcttcaaggtatggaagaacgcttgattacacgtttcaaatggggaatggtggcggaactggaaaagcccacggtagaattgcgcaaaaatatcctgcgcaataagatacatcgtgacggtttacaattcccgccggaagtaattgattatatagcagagaatgtaggtaacagcgtgcgcgacctggaaggcattgtcatctccattatggcccattctaccatatacaacaaggaaatcgacctggagttggcacaacgtatcgtacgcaaagtcgtgaactgcgaaagcaaagccataaccattgacgacatcatcaccaccgtatgcaaacactttggtttggaaaatgctgccatacatacaaaatcgcgtaaacgcgaagtggtgcaagcccgtcagatagccatgtatttagccaaaaaacatacagacttctctacagccaagataggtacgctaatcggaaataaagaccatgccaccgtactgcatgcctgcaaaacaatcaagcaactgaaagaggtggacaaatcattccgcgctgaaatcgaagaaattcagaccgccttgaaaaaagtataaggtacggaataaaagtataaggtataaggtatgaggtataaagtcatcatgcaaaaaactgcatggatacgctttatacctcatacgttatactcaaattaaaatccctgttgtttcattactttccaaaggttctcggacatagcctcgctgtctttctttgtatagcgtacatccgtaaagacctgagccaatgtttctttattattttctgcgataaactgtttattctcaggcaaagactccttataggcatacagacggtcgatatcctcaggagtataatcatgataagtttcttcatggataatggcttccaaaggcaggcggtctacctgtgcaggaatctctgccggccagcctacagtaacggtggtgatagggaagaccaattcgggcaactccaatgcctcaataatcatttgggggttgtaggtggtagtacccagatagcagatgcccaaacctttttcttcggctgccacacagaatgtttgcgcaaccaacaaagcatccacggctccggtaacaaaccattcaaaattgttatatcccggttctgccttccgctgctcgcaccatttgctaaaacggcgcaagtcgatgcaaaaagtaagaactgccggcgccgtcttcaccataggctgattgaaatgcgccggtgccaacctggctttcctgtcagcgtcacgggttacaattacgctatacacctgcatgtttccaaccgtagaagcacggaaagaggtttcaagcaaatcatttaacaaatcagaagaaatatctttctgctgatacttacggattgttctcctttgttttagactttccattctttcttttttctgcaaatatatgaaaagaaacacagaatatcatccaatagttccgaatatgtgcaggcatgttttctaaaaaggacaaactacccgaactgtattcgttatggaattttctttttagaaaagtttttgttaatttacaaaaagccattttattataaaccaataaattaaccgattaaaactgaaaactaacaaccggttaataaaaacatcaatttttattttgccataacaaaaaacattcatagatttgcagccacatttgttagcaataagtacaacttctacacttttacttattcataattaaatctaagagttatcgcatcgtggaaaagaaagtttattcttatgacgaagcctacgaagaatctttacgatacttccaaggcgacgaactggctgcaagggtttgggtgaacaaatacgcagtcaaagattctttcggaaatatttacgaaaaatctccggaagacatgcattggagaatagccaatgaagtagcccgcatcgaagccaagtaccccaacgcactgacttccgaagaactcttcggcttgttggaccacttcaaatacatcgttccgcaaggcagcccgatgaccggaatcggaaacaactaccaggtagcttccctttccaactgttttgtgataggtgtggatggcgaggccgactcatacggtgcaatcttcaagattgatgaagagcaggtacaactgatgaaacgccgcggcggtgtaggacacgacttgtcacacatccgcccgaaaggttcgccggtaaaaaactccgccctgacatcaaccggactggttcctttcatggaacgctactccaactccacccgtgaagtagcccaagacggccgccggggtgcgctgatgttaagcgtatccatcaagcatccggattcggaagcctttatagatgcaaaaatgacagaaggtaaagttacgggggctaatgtatccgtcaagctgaccgacgcatttatgcaggcagccattgacggcaagccattcgtacagcaatatcccattgacgcggacgaacctctgttcaagaaagaaatcagcgccaccgatttgtggaaaaaaatcgtgcacaacgcatggaagtccgccgagcccggcgtactcttctgggacaccatattaagagagtccgtacccgattgctacgcagacctgggttaccgtaccgtgtcgaccaacccttgcggtgaaatccccttgtgcccctacgactcctgccgtttgctggccattaacctatattcatatgtagtcaatccgttcaaaccggatgcctacttcgatttcgacttgttcaagaagcacgtagcactcgcccagcgcatcatggacgacatcatcgacctggaacttgagaagatagaacgtatcatggccaaaattgactccgatccggaaaacgaagatgtaaagcataccgaaagcgttttgtggcagaaaatctacaaaaagagcggacaaggccgccgcaccggcgtaggcatcaccgccgaaggcgacatgcttgcagcattgggactgcgttacggcactgaagaggctaccgaatttgcagagaaagtacaccagaccgtagcactgagcgcataccgctcttctgtggaaatggctaaagaacgcggcgctttcgaagtatacgacagcgaacgcgaaaagaacaacccgttcatcaaccgcctgcgcgaagcagacccggaactgtacgaggaaatgaagaaatacggccgccgcaacattgcctgtctcaccatcgcaccgacaggcacgacaagcctgatgacgcaaaccacttccggtatcgaacccgtattcctaccggtatacaagcgacgtcgcaaagtcaatccgaatgacgccaacgtacatgtggatttcgtggatgaaaccggagacgcattcgaggaatacatcgtattccatcccaagttcgtcacctggatgcaggcgcaaggatacgatcctgccaagcactacacccaggacgaggtagatgcactggtacagaagtcaccttattataaagcaacttccaatgatgtggactggctgatgaaagtaaagatgcagggacgtatccagaaatgggtagaccactccatcagcgttaccatcaacctgccgaacgatgtagacgaggaactggtgaaccgcctctatgtagaagcgtggaaatcgggatgcaaaggctgtacggtataccgcgacggctcacgttcgggcgtgcttatctccaccaaaaaagacaaaaaagaagagttgcccccgtgcaaaccgcctacggttgtcgaaacccgcccgaaagtgcttgaagcagacgttgtacgcttccagaacaataaggagaaatgggtggcattcgtcggtttgctcgacggatatccttatgaaatatttaccggtcttcaggacgacgatgaaggaatcatccttccgaagaacgtttcaacaggacacatcatcaagaacgttgacgaaaacggcaacaagcgttacgacttccagttcgagaacaagcgcggctataaggtaaccatcgagggactgtccgagaagttcaacaaagaatactggaactatgccaaactcatctccggcgtactgcgttaccgcatgcctatcgagcaagtaatgaagctggtaagctcactgcaactggacagcgagaacatcaatacctggaaaaacggcgtggaacgtgccttgaagaaatacgttacggacggcaccgcagccaaaggtcagaaatgcccgaattgcggcaacgagacactggtttatcaggaaggctgccttatctgcaccacctgcggtacatcccgttgcggataagattcaggcaagcacaaacgtttgcataggaatttaaatgagatagccggcaatagctgcatgattatgaggaatattttctatacttgcataatcattgcagctattgttgtttctaaatctaatatatatgattttattattcaatatcgagtacagaaccaattggggtgaagaagtcagagtttcaggctccatccccgaactcggaaacgaacatcccgacaaagctttgccgctacagaccatagacggtatccactggactgcggaagtaaacattgcaatgccggaagacggacttgtccgatacagctaccatatcttccgcgacggccggcatacacgtgcagagtggaacagcctgccccgtacgctttacctttccggaacttccaagaaaacgtaccggatacaggattgctggaaaaacctgccggagcagcagtatttctatacttccgcctttacggaatctcttctggcacaccgcgaacgcaacgccgcacccaaaggacacaagaaggggctgctgataaaggcatacgcaccctgcatagacagtgaccattgcctgggcatctgcggaaaccagcctatattcggagagtggaacccggacaaagccgtgcttatgagtgatgccaacttcccggagtggcagatagaggtggatgccaccaaaatcagcttcccgctggaatataaattcattctatataacaagaaagaacgccgtgccgtttgctgggaaaacaatccgaaccggtatatggcagacccgcaaacaggcgccaacgaaacccttgttgtcggcgaccgctacgtatatttcagccttcccgcctggaagggcgcaggtgttgccgtgcccgtattctcactccgctccgaaaatagctttggtgtgggcgacttcggcgacttgaagcgtatgattgactgggcggtaagcaccaaacagaaagccgtacagattctgcccattaacgacactaccatgacgcatacatggacggattcctatccttacaacagcatctccatctatgctttccatccgatgtacaccgacttgaagcaactgggaacattgaaggacaaaaaagccatggcagacttcaacaaacggcagaaaaagctgaatgccctgcctgccgtcgattacgaagccgtcaacaaaaccaagtgggaatattttcatctcatattcaagcaagaaggagaaaaagtattgagctcggcagctttccacgatttttttgaatcaaacaaagagtggctgcaaccgtacgccgttttcagttacctgcgcgatgtttataaaacgcccaacttccgcgaatggcctaaatacagcagctacaatgccgcagagattgagaagctctgccaaccgaaatcagccgattatccgcatatagccatctacttttatatccagttcaacctgcatctgcaactgcttgccgctaccgaacatgcacgcgccaatggtgttgtgctgaaaggtgacatacccatcggcatcagccgcaacagtgtagaagcatggacagagccccactatttcaacctgaacggacaagccggcgcaccgcccgatgatttctccgtaaacggacagaactgggggttccccacctacaactgggatgtcatggaaaaggacggctatgcgtggtggatgaaacgcttccgcaaaatggcggaatacttcgatgcctaccgcattgaccatatcctcggtttcttccgaatctgggaaattccgatgcacgccgtgcacggtctgctgggacagttcgtacccgccctgcccatgacgcgtgaggagatagagagttacggtctctctttccgcgatgagttcctgaaaccttacatacacgaatatttcctcggacagatgttcggcccgcataccgattacgtaaagcagacgttcatcgaaccgacagatacgtgggaaatttaccggatgcgtcccgaattcgatacccagcgcaaggtagaggcctactttgccggcaaaacggatgaggacagcatctggatacgcgacggcctgtatgcgcttatcagcgacgtgctgtttgtgcccgaccgcaatgacccgtacaaataccacccgcgtatcggtgtgcagcacgactatatctaccgttccctgaacgattgggaaaaggctgccttcaaccgtctgtacgaccagtactactatcaccgccacaacgaattctggcgtgagcaggctatgaacaaactgccgcaactgacgcaatccacccggatgctggtatgcggtgaggacttgggcatgattcccggttgcgtggcatgggtaatgaacgatttacgcattctatccctggaaatacaacgcatgcccaaagatccggcacaggagttcgggcatccggactggtatccgtatcgctctgtctgcaccatatccacacacgatatgtccaccttgcgcggctggtgggaagaagacttccagcagacacaacgttactacaacacgatgctcggacattacggtgccgctcctgccgttgccacgcccgaactttgcgaagaggttgtacgcaagcacctgcaaagcaattccatacttgccatcctctccctgcaggactggatgtcgatggatggcaaatggcgcaaccccaatgcgcaggaagaacgtatcaatgtacctgccaatccgcgccactactggcgctggcgtatgcacctgacactggaacaactgatgaaagccgaaagcctgaacgaaaagataaaagagctgatcgcacaaacaggacgataaacagcatattgactgataatgagtaaaaaagcggtggagactttttaatagttttccaccgcttttttactcattgcatctccttacatagaattttctgctatacctctgcttaataaacagacctatgataacaaacaactgactaaatcatacaaaaacttccccacgtttcgcaacgcagggaaggcaaacaaacaaaaaaaccgtatgctctccgaaccgcagaacacttccgtaatccggaaagcaacagttgcatcatctcctcttgcgaaagagacaagtttcatgtcccataaaggggggggatcagtatcttgtaccgttaatagtcagcgaaaaatacctatcctaagtaaaaaacactttttcataccaatcttatttagatatttattattcagacactacctgatagttatactgatttccattctcggttacactaatatcctgaaatttataaccgctttccaaaggagcggacttatcactaaagtagccaccggtagtttttacggttccgcttgctacataaatattctttcctgtcggactataaaagtaaccaccggaaatcgaagtattgccgcctccgttatacaaggcataatacaccccctcacaatataccgaaccacccgaaatatttacttgagcgccaccgatagactgtatagcctctatatcaccgccacttacggtaagcttggcagcagaacctgccgccattaacgcatatcccgtttttatgccaccacattttacagtaccgccggtaactgtcatatctgcattgccggtattcatcagtgtaaatccgggagcatcaaagactccggaattgacagtgcattttccctgattataaacagccactccgttggcatccgtagctgatgtagcagtgaaaatgccgccttcaataatcaattcggctccggtttcattcataagcaggtaatcggtagctttcatggcacctgcaccttttactgtaagtttactcttattattgacttgttgttttcctacaatgagtacggcattcttctccaatgtcaacaccgtttccgcagtaatatttatttcctgacttgattcattgttctttgtcaggtctacatagcgataaatggaaatatctcccccggttctgagcaggtttgccacacgcttcacctctatccaacggtccataatctcaccgtcaatcaccaatttagtggagtaagagacattatttccattaagattgtagtcacctgcccaccaacctatataattattggtacggtcacaagttacggcattttcaagctgtttatccactcgattgttcttcaaaacaacgctatacttattgtatgattcgtctttcttagaagtgtttatcacatttccgataaatgcatggcaataggtctgctccatatcagcaaccttatccgtaacctcgtcaggagaagtatatatataatttatggcaatattgcttacactattattttcgatgagcgtattccgttcgtaagattgcaaataaccgataaaacctcccatcatataggcttcatccatacttgaaagtttatcgagtgttatatccgatgcagaacatccgcggataatcaaatcttggctgctgttgtttacataacccgccagcccgccggccttttgctcactatatatcctggcattcttcacgtggcagttttccaccaatccggcgtccaatcgtcctattaatgctgcaccacggaaacaagttactgttgccccatcaatagtaagatctttcaccgtaccgttgagtacataaaacagaccaccataataatttcctttagtatttgttttattcgtaacattatcaacataaagattacggatggtgtggttgccaccgtcaaactcttcaaggttggcttctccgtttttgagtgcattgtattctgcattcatcggttcccaaagattttcactgcttccgttgaggtctatatcggcagttaatacaattttccggcacttcttttgggttaccaaagcaccggccgccttaagctgtgcggcagtggaaacgctgtaaacagtaacataaccgccgttgtctgtaaagttgatattgtttaccgttccataaatttccacattgcctttcttaacggtcaaatctgcaactgtaacatctttccccacaatcagcgtattatccgctgtagtagcctcaacagccgtataagactgtccgttcaacgttacggtagattccgaagcgtcaatgattatcttgctgacggaaggagtcgttatattcagttccttaggagcatttttactatcccctccggtttctgtcgcataattaatggttatgtcattcgatgtttcaggcaatgttatggataccgcaacatccccgctctcatatttgggcagtgaaatagtggctgcttctttcggtgcttccattacaaccacattagtattggttttcaaggcttcagccacttcgcttacggatgctacctctattactttttcacttaaagcaggagaagagaatgcaggagtaaccattacgtttaccttaccgtcaaccgtcagtaaattacccgttacattcgtcttgtagttacgctgaacaggtatgttattcaggtctttcgtggtaatctgctcaccggcagcgttgtatacggcaagcgtcatatttaccagatgttgtccgcccgctgtattcggtgcaaagagatagtccacagtcaggttaccgttggcatccgccacagccgaagccgctttgtaagctacagccgtcggttcgccgagcaagtcacccgtggcagcattaaaaccggtataaaggttcttgaatgacaaaccagccgttaccggaacaaattcttctttttgattgtcaggaatagaagccaaatcttccgttttgatgttcaactgtccgaacggacgggtcagctccacactttcagaaaaagcattagtcaccagcttctccagactggcaaagaaagcatcccgcgtatcgtccttgctgcttccgttataatccccttgcatggaaatgttacgaaggtcggcagtgttgtaatgcaaatcggtctttatggcttcatcttccactgactcgacgtggtctgcccaaaatacgaacttataagtctgtgaagtaaccaggcggacatcaaagccggccgtcagaccatccgattgaatcgcacctatctgccggctataaagttcgtcgttcaggtagatttccatgatacaacggttcaccgatgtaccgtcacccgccgttgcagcacgggttacagcattgttcccgttcccaggcaactgtacactgaaagaggcggctacttcgccgtttcttccgccattcgccagctcgtcactctgacaggctgcgaatacaagcaggataatacctgccattaataaaaaacactttttcatgttcgttttgtttaaaatgagacatctgtttattctgtttgaataagtcatgtttaaataagccgtcagggaaccaccacatttatctctccgtcgaaaccggggttgataccgatgccgggagcgaactcacgggtaagaaacgcatcacgcaccgtagtaatcctattccgtctgacgggcacttccacgccgccgacccggttcacctcctgtcccttttcgttgcagataaccatttccagcgtaacggaagactccgtaccattcaccagcacatagtcgaaagccagacaagcctcattgttggaaataacaacgggaacggaagtaaattgtatacctgtgaccgcctcattgggacggttggaaacgacattaaaacctgtggggaaataaccggtgtaacccagttgcaccgtaaaatcttctatgcctgcaggacggacagacttcatttgttccaacttgttgaggtacttgatgacatcggtagtaatcaactctattttcgccagcggacgttccaattgtatctcttcgcgatgacgggctgccaaacggcaacgataaggagtaaggtcgagggttgcctgcccgcaaaacacatctttatagtcggttccacccgtataatcgcctttcagcttgacggcagcaaaatcggaggtggtgtaaaaacagtcggcagcagtgttgccggaaacctcggcagcaagtacaaagtcccgccatgccaccacccgatagttacgtgcatgaagctcacattccaatgccacttctcctgcatctccttcctcacaaatcaactgacggcggaattgcaggctttggtcgaacctgtcatcggcatatacttccacaatataacgcaccttgtacttgtgcacaccggcggtacgtgtagagaactccggaacatcgaacggcatcatatcagcaccgggtagcaggacaatttcggtatgtacggttgtagggtctatcccacctccttccggcaattcgcgtacgctgcatcctccccacaagagtgcagacagcaagctacagacagccacaaacagttgtttcatcgccggcctcctttccaatcaatacggtagcccactgaaatacccgcatggtcgatgccgaaaaaattcttatgacgagtatcgacataagcaccaccgggaatattgaaaaagcggtcataatccagataagcatatcccgctcccaaagaaaactccagacaccaacacccgccttttccgagtgaaagccggtaaccggcagtaagccccatgttcagcaatggagtacccgtatcgctattctgatagcgatatgtactgttcttaagagcatagttgtaagaagccaccccgatatgcacaccggtaaaaagaccatccacctgcccgaaccaataacgcacttcgggctgcacgcagaaagtgcgcagtttgcgggaagaagtaaaataattgaaaggagaatagtaaaaaggaataaggacagaaattgcaggcgaaatatcatactccaccgctacgttcataaccgccattccccacgccacagcattggtcttcagcaacaacgaatggttattgcgcccgatactcgaattcggactgaatgttcgcccagcgtagtacaaggtatcttccccattaccggcttttacatacccatcaatcggagtcatgagaaatatgcacaacagaaacagcaacaatcttatctgcataaacgtcttataaacttctgtctgcacaggcagaccggaagcatgcgtcctccaaactccgaaaggaccggttagaaacagaaacgtggagctgcgtgctgtttctaaatggaggccctaggaatagccctttaacgaaaacagacagcagtcccacgctacaaacgtgagaatccactgtgctgtccttcgttaaataatgaaaatttcctaggtttccatttagaggacaaagcacaacgcttctaatatatttttctccttaaaaaatcaagctacagtcgctaccgaacttcaatgcaaagttatagaaatataattagaatgaaaattttcacgccattttttgcaaaaaagcatagaaatcgtgctccacgagttgtagaacaaaaatattatccataagtttgcatgagagactattttttcgtttatgaaaagctacatatttttagaccggatatgctttttcgcccaccacggtgtaggcgaacaggaaacattggcaggtaacgaattcaccgtcagcctgcgactgcaagtaaacatcgcacctgccatgcagaccgatgatgtagcggataccgtgagctacgcagatgtgtatgaagccgtaaaggcagaaatgaaggttccttccaagctattggaacatgtcggaggacgtattgtgaaacggttgttcggcgatttcccccaaatagaaaatattgaattaaagttatcaaagcgcaatccgccaatgggggcagacatcgaagcggcgggaatagagatttgcatctcacgggaagcgacagcaatagctacttaaaacaaaagcaaccctatacaggcacttcggacatccccgcctcattatatgcacagaatgaattattgcttcttctttcttttcttagccgattcaaccgcctcggcaacgacttgcttgttctcgaacctcttggcatagttgctataatcgggaacagtacgttcataagtaggatcaaggaagagcggactcgaaatgatatggtctgccgtactgcggttacagcaaaacacgatgttctccacgctggcaagacgggtcaaagccttaacatccgtatcgtgcggctgcaaagtcatgggatctgtaaagaagaaaagataatcaatttccccgtccacaatgcgcgagcccatttgctggtcaccgcctaaaggaccggatttgagaatggtaaaatcccattcgacatcgggatgcttctctttcaatgccgccaaaataagggttcccgtagtacccgtacaatagaacttatgccccataagcaattccgaattccaaagtacccactctatgaggtctttcttcatggcatcatgcgccaccaggccaatctttctaaccaatttttccataagcaaataacttttacaaaacaaacaatcaagaatagataacagttcctacaactgagagaaaaatttcttcccacgcagataaaaccctaccaagatactactttttacccgttcgggaatcatcgggagtgatgtttttttcaagttctctttacgggcatccgcaaacgagggacggagcaaatggaatgcatgacgtgcgcgaagcactgcccacatattgggaaactgccctttaagcagaaaactcaaagccgcaacataatcaagcactgcgcgcacacgcattacaggccccaattcttcttgcggcagattcttatagagcattacaagattgttacggaaattgagaaaagtcttatgaggattctcctttttcaaggttgcaccgcctacatgataaacggtactttggggtacacaaaccagcatccgcccgcgggcacgaagtcgccagcacaagtctatctcttccatatgagcgaaaaaacgtccgtccaatccgccggcatccaaatagtctttccgacggataaacaaggcagcgcctgtagcccaaaacacaggaacgacagtatcatactgcccgttgtctttctctactgcactcattatccgcccccggcaaaagggataaccgtaacggtctataaatccgccggccgctcctgcatattcgaacagttccttttgccgccaactccggattttaggctggcatgccgcaacttcaggatgagcgtccatgtagcttacaagtggcaccaaccagtgttcggtcacttccacatcggaattaagcagcatcacatactctgcagatacctgctgcaaggcaaggttgtatccttcggcaaaaccgaggttctcttttaatataataagatgcacgtcaggaaactcttggcgaagcatatcaacggaagcatctgtcgaaccgttatccgccacataaattttcgcaccttccgtcttggaatagcgcactacggaaggaagaaacgaacgaagcatttcacacccattccagttcaatatgacaacagcaatcttatccatgttgtatggtatcctcacgctttagtttccaacgcttatgcgaccagaaccaatagggcggttctctacggattgtctgttccaggcgacgggcaaaacattccgttatctccccgtctgccgttgctttgggcgtttcggttatcaagtcaaaccgaacccggcaatatccccttccctgcttttgcagttcacagtagaatacaggaaagtccataagtttggcaatacgttcggcaccatccataaagacggtatcctgattcaggaaagttgtccagtaatgcgcctcgttaggattgggcgactggtcggttatcattcccaccgccacacgcttgttgtcacggcacagttttataatctcgcgcgccgtagaatgtttggccacattgtaaccgccaaaacgggtacggatgcgtttaaacatagcatccatatatttattatgcaacggtttatagatttgcaccggtatatctccctcttgcatgatactgctcattcccgtaatccactcaaagttagcatagtgcggtatcagcaacacaatacccccatgtttttcaatcatggcaagatactcttccttattgtcatattccatgcgtcggcagagttccttgaaagacatacgcagcatcttcacctcctccaacatataatcacagatataacggtagaactcacgttctatatcccgcagttcagccgcggatttttcaggaaacgcattgcacaaattagcacgtactactctgcgccgatagtgcacgacgtgatgcatcaaaaagcaaagcccgtcggacagtatataaagtaccttaaaaggcaataaggccaacaaccacatgcccgcataagtcaaccaataaatcaatcttgatttcaccttgtcaattccttattacagattactgagtaaatcacttatcgccaaacgctcccgaaagcgccgtgccttcttcattaaaatcgcccatacgcaccggaattacctgattatccagcgcatcatcatgcggcacttccacccggatgtaattcggagtgaaaccgtgcatcggcgttcccggtttagaacgttccaacagcacaggcattgtctgcccgatatggcgggcataaaacgcacgtgtcttttcgtccgacaaatccagcagaagccggctgcgtctgtgcttttcctcggaagacaccacatgctctatctttaaagcctgcgtacccggacgttcggaatagctgaacacatgaagctgcgtcacatccagactttgaataaaccggtatgcctgctcaaagtattcttccgtttctccacgcgttcctacgatcacgtccacaccgataaaggcatcgggcatcacttcctttatccgtttcactttagaagcaaacaacgccgtatcatatcgtctgcgcatcagtttcagcacttcatcactacccgattgcaacggaatatggaaatgaggcataaaccgcttggaacgggatacgaactcaatgatttcgtccgtcagcaagttaggttcaatagaagatatgcgatagcgctcaatgccttccacatcgtccaacgcctttaccaggtcgaagaaggtttctcccgtcgactttccgaaatcgccgatatttacccctgtcaatacaatctccttaccgccttcggcggctgcctgacgagcctgttccaccaaagatgcgatgcttccgttacgactgcggccgcgggcaaaaggaatggtgcaataagaacagtaataatcgcaaccgtcctgcactttcaggaagaagcgggtacgatcaccacgcgaacacgacggagcaaacgaccggatatctttcaaggcagaggtatgtgcctctccgctttcgtgcttccgcaaatcgcccagatactgaagcaggtctttcttctgctctgcacccagcactacatccacaccttctatctttgctacggcatccggcttcaactgggcataacaccccgttaccaccacaaaagctcccggatgctgcttcaccaaacgatgaattgcctggcggcacttcttatccgccacctcggtgaccgaacaggtgtttaccacacatatatccgccttctctcccttgcgcaccgtacgcacgcctgcctcccgcaaaaccttaccgatagtcgaagtttccgagaaattcagtttacaccccaacgtatagtaaaccgctgtcttatcttgaaatatactggtatctatcatgagtctaaatcacattttcacgacaaaggtacacattattattatatttttcctacttttgcacaattcatcaaaaaacgtgcaatgatacaagaaaactttatcaagctatacgagcatagtttccgcgagaattgggatctcccctgttacaccgattatggagaaaacgaaagttatacctatggagaagtagcgcaggaaattgccaaattacaccttctgttcaagtattgcagcctgcgccgcggcgataagatagcgattatcggcaagaataatgcccgttggtgcatcgcttatatggcggttatcacctatggcggcatcgtggttcctattctgcaggatttcaaccccaatgatgtacatcacatcgtcaatcattccgaatcggtattcctcttcaccagtgatgccatctgggagcatctggaagaagaacggcttaccggattgcgcggtgtgttctctctcaacgattttcgctgtttgtaccagcgtgacggagagactatccaacgtttcctcaaacatctgggtgataaaatggaagaaacttatccgaatggtttcacacgggaagatgtaacttataccgacctctccaacgacaaaataatgttgttgaactatacttcgggtacaacaggcttcagtaaaggcgtcatgctgacaggaaacaatctggcaggcaacgtaactttcggcatacgtaccgaactgctgaagaaaggagataaagtactctcttttctaccactggcacacgcttatggttgcgctttcgacttcctgaccgctacggccgtgggtacacatgtcacactgttaggaaaagttccttctcccaaaatcctgatgaaggcgtttgaagaagtaaagccaaacctgattataaccgtcccccttgttatcgaaaagatatacaagaacgtcatccagcctattatcaacaaaaagtccatgaaatgggcgctcagcattcctttgctggacggacagatatatgggcaaatccgtaagaaattggtagatgcgttaggtggccgattcaaagaagtgattatcggtggcgctgccatgaatccggaagtggaagaattcttccatcgcatcaaatttcctttcaccatcggctacggcatgacggaatgcgccccgcttatcagctacgctccctggaacgaattcgtaaccacttcttccggacgggtacttgatattatggaagcccgcatctataaagaaaatccggatgacagacttggcgaaatacaggtacgcggtgagaatgtaatggttggatattataaaaatccggaagccaccaaagaggtttttactgaagacggttggctacgtaccggcgacttaggtactttggacgagcataacaacctttatatccgtgggcgcagcaaaactatgattcttagctccagcggacaaaatattttcccggaagaaatagaagcccgcctcaacaatatgccgttcgttttggaaagccttgtgattgagcgcaacaggaaattggtagctttggtctatgccgactatgaagcactggattctttagggttgaacaatccggaaaacctgaagaccatcatggatgaaaatctcaagaatctgaacaacagcgttgccgcttacgaaaaagtcagccaaatacagctttatcctacagaatttgagaaaaccccgaaaagaagtatcaaaaggtatttatacaacagcattgcagaggattaatatgttatagaacatgcttgaagagggcaaaatgggctttcctcaaaaaaaagtataaaaaaagttgggttttggagaacaacatatccaaaaagtacatacctttgcagcgttttaataaagcaattgattgtattacgttttaaaagtaaagaaaatgaaaaaattagttttgatggccgtagctatcgtagcagtatctttcgcatcttgtggtaacaaagcagctaacgctgaacaagcaacagctgattcaatccgtatcgctgactcaatcgcagctgtagaagctgcagcagctgaggcagcagcatcagtagctgatactactgcaacagatagcgcagcagttgtagctgaataatttcagaacaacaattagagagaattgaaagtctgacgtacgaaagtacggacagactttttttatatccaatcagcacaagaagacatcttgccatttaaacatctgtcttatcatgaaacatcactccatcccaaatgaataaccgggaaaaggagaaaatcaaaaaagtccggcttcttttcagaaaccggacttctccttttatatagaattctatatttatgcttcctcagcaactacttcaaaaggaatttccacagaaacttccttgtgcagcttaacgatagccttgtagttaccaacttctttcactgcatccttaacaacgataatcttacggtcgatgttgtgacccagtttagccagctcgtcagcaatctggatgttgcctacagaaccgaagatagtacctgtagcactaaccttagtagcaatcttcaaggatacgccttccagcttagcagccagttcttcagcatcctttttgattttctccagcttgtgagcgcgttgtttcagctcttcagccagcattttctttgcagaaggagaagcgatgacagcttttcctgtcgggatgaggtagttacgaccataaccggatttaacggttacgatgtcgttcttataacccaagtttacgatgtcttctttcaatataatttccatactttcctcctcctattatttcatcatgtcagttacataaggcagcaacgccaagtgacgtgctctcttcacagcttgagctacacgacgttggaacttcaaagaagtaccggtaatacgacgcggaaggattttaccttgctcattcaagaatttcttcaagaattcagggtctttgtagtcgatgtacttaataccactctttttgaaacggcagtattttttcttcttaacgtctactgagggcggagttaaatatctgatttctgattgaacttgttgtgccatgattaatcctcctttttagttgatttaacacttcttctcttcgcagcgtactctgcagcgtacttgtcttgcttgaaagtcaagaaacggattacgcgctcgtcacgacggaagttgatttccaatttctcaattacagtaggttctgcattgaactcaatcagctgatagaaaccggttgacttcttctggataggataagccagctttttcagtccccagttttcttcatttacaatctcagcaccttcagcagtaaggatgcctttgaatttttctaccgcttccttcatctgaacatcagacaaaacgggagtcaaaatgaaaacggtttcgtattgattcatactcgtttaattaaataaataaattatttgtttattaaatgcgggtgcaaaggtaggcattttattttgaactgcaaaaataagcggacttattttgtattgtatccaagttgtactatatttgcaaagttgtttaaacaataatttcatgatagagcaatttaactttgacatccagctgatattcgctattctgaatggtaaggtatctgccgcgattaaccgtaaattatcacgcaacttcaggcagaatggtttggaaatcactccggagcagtggactgtcctcatctttttatgggaaaaagacggagttacgcagcaagagttgtgcaatgcaacctttaaagacaaacccagcatgacccgccttatagataatatggagcgccagcatcttgtagtacgcatttccgataaaaaagaccgccgcaccaatctgatacaccttactaaagacggaaaggaactggaagagcgcgcccgcgtcatagccaaccagacgttaaaggaagcattacaaggcatcaccatcgaggagctgagcgtgagccaggaagtgctgagaaaaatatttttcaatacgaaagactaaccgtaaatccatagggaagagctgaaaaccaactaaattaagcgaataatagtttttttgcaaaaataatttcgcttgttaaagaattatgcttttctttgtgacaagaatacgaaaataataatctattaaaatacacacacatgaaaggcttattaaaaaatctgggattgatattaatcttggtaggagctgtaatcctggttgcatgttcttttaccggcaatgtaaacaacaacgcgattctgggcaccagcgctgttttaattgtaataggattgatttcttacattcttatcaacaagagaattgcggattaataccgagaaaaagaaataaaaaaaggcgattgcactgcaaccgcctttttttattttccattgtccgaagccggattcccatcaggactcggcttccggagttatcagtttatatccctttccgtgaatattgataatctcgatagattcatcttctttcaggtgcttacgcaatttggtgatatatacgtccatactacgcgcattgaagtagttatcgtcaatccagatagtcttcaatgcaaagtcacgttgcaggatttcgttggcgtgtgcacaaagcaagcccagcaattcggattcttttgtagtcagtttggtctgcttttcaggcgttgacaaaatctgtttctgggtatcaaacgtaaacttaccaatcttgtaaatgctgctttctttgttcttcttgccacggacacgtctcaagatagcttcaattctgaaagtcagctcttccatactgaacggtttggtgatataatcgtccgcaccgattttgaaaccttccagaatatcttctttcaaggttttggccgtcaagaagataataggaatttccgcatttgctgcgcgaacctcctgtgccaaagtaaagccatccttcttcggcatcatcacgtcaaacacacacaggtcatatttattcttcaggaaagccttgtatcctgcttctccatcgggatataactcggcagcgtaaccttttgcctgtaaatattctcttaaaagcatgccaagattctcatcatcttcgcacaataaaatacgcagtttctcatccatatcaatcaattttttaatagaggtaatgcaataataaatttagttccaacattcagttcgctttccgcacggatggtccccttatggtcttgaataatcttccttacataagccagtccgagtccgaaccccttaacatcgtgcagattacctgtatgcacgcgatagaacttatcaaatatctttttcaagttttctttcttaatacctataccgttgtcttgcaccgaaatcatcactttacccggttcattccaggtcttcaccatcaactgcaagtccacatccggtcttttatacttcaccgcattatccatgagattgaaaatcacattcgtgatgtgcatttcatctgcaaagattatcggatcggttgctttcaagtccgactcaatcttcccgttgtaccgttccactttcaaggcaaacgtattgattacgccggtaatcagttcattggtatccaattccttcattttcaatgtcgccttctgccggtcgaacatcgacatctggagaaccttctcgacctggaacctcaaccgcttcgtctcatcattaatgacacccgatatatgctggaacattgccggagatttgcctaccgccgggtctttcagcatctgcgccgccaacgaaatggttgaaatcggcgtcttgaactcgtgcgtcatattattgataaagtcattcttcatctccgtcagcttcttctggcggaacacgatgtaaatcgtgaagatgaacgttatcaacagcacaaaggtgaatatcatcgatggaatcataaagctgaccgaatcgaagatataatccctcttgccgggaaaatgtatcttgacgatactcatacgggcaggcgggtcgttcaggaacaagggctgcgagtaggaactctcactgccttcatcactgtaatccgaacagcgatacacttccctgccgtcccggtctatcaccttaaagtgatagttcaactcgataccgttgtcaatcaaccccgatttcagatactggtccagattcttaaaattcacccgttcttctatcggccggctactggcacggtaaatcatctgccaggccacctcatccaacaaggcgcgttgatacagataacggttctttatggcatccgccagcgaacgcgatgtctggggtatcgttttcgttccgtgtttacgcgaaatcattgccctgggcagttctgatgcttcgttggtaaatgtcttcagttcgatagccgaataccttgtaccgtccggcgatgtaaccgtaaaacgctgcgtctgcaccactcctttgccttgcgagctttgctcccacgctttcttctcagcctcggagatatcctcccgcaaccagcggtcgacctccgcagactccacatcttttgaagcagccatcaaggcacgcttcaccgattcatcgaattgctcgttacgcatcttcaccatttcctcaatatagctgatctgcagatacagcaaactgatgaaggaaaggcccataacgacgcctaatatccatattgtcgactttttcatagtcacaaaattaacactccctaattaacactcctaacaaattaacctgatttaaccgggtgttctcgttaattaaccgtagcgtgttttttaagttgtattacgagcattataacaaaatgagacacctttggtttgcaaatttaataaaaaattaaatattagcattcacatttcccttcattcttaaccagtgttaataaaaaagccgttattcctcacaatgagcgaacaacggctttcacgatttattaaaatactttattcgtcagcctgctttgcttcaaattccttgataagtttatcctgtacgtcgctcggtacaagttcgtagctggcaaacttcataatgaacgaagcgcgcccgcccgtcaacgaactcagagccgtagaataggacgacatctctttcaaaggcactttggcaatcagcttttcataaccggcttcgctactcatacccataatcatggcgcggcgtccttgcaggtcacccatcacatcacccatcttgtcggaaggaacaaacacttccacatcgtatatcggttccagaatcttaggaccggcattcttgaacgcttcgctgaacgcattgcgaccggccagcataaaggaaatttcattggaatccaccgggtgcatcttaccgtcgtatacgataacgcgcacatcgcgggcatacgaaccggtgagcggaccttgctccatacgggacatgatacctttcaggatagccggcatgaagcgggcatcgatagaaccgcccacgatactgttgacaaacaccagcttgccgccccactccagcggaacttcctcaacgcctttcacattcatcttgaactcctgtccgttgaacttataggtttccggcatcggcatgccttcataatagggctctacaatcaggtggacttcaccgaactgtcctgctccaccggattgtttcttatggcggtagtcggcacgggcagccttcgtgatggtttcgcgatacgggatacgcggttcttcgaacttaacctgcaatttctcgttattctccaaacgccatttcaatgtacgcaggtggaattcaccctgtccgtgcacaatggtctggcgcaactccttggactggtcgataacccatgtcgggtcttcctcgcgcatacggttcaggataaccatcatcttttccgtatcggcttcattcagcggcttgatggcgcgggaatatttggaattcggatatttaatgaagttgaaacggttctcagcccctttggcattcagcgtattgcccgtatgcacatccttcagtttcaccgtgcagccgatatcaccggccaccatttcctccaccttgatacggttggctcccgcacatgcgtaaatctgcgcaatacgctccttagaaccgcggtcggcattggtaaagtcttctccttcgtgtaccttgccgctcataaccttgaaatactgcacatcaccgatatgcggttcaacggcagtcttgaagaaatacagggaagtaggtccgttggaatcgggtttcacaacttcaccgcgtgtattgtgcaccggaggcatttcgtctacaaacggaacaacattacccaggaactccatcaaacggcgcacacccatatccttgcccgcacatacgcagaatacggggaacatgccgcgggaagccaatcctttgcggatgccctcgcgcatctcgtcttcggtcagagaatcctgttcgaagaatttctccatcagggtttcatcgtgttcggcagcggcctccaccaatgctttatgcatggcagttgctttctccatctcctcagcgggaacatcttcgattgtgggtgctccgccttccggtccccacgaatattttttcatcagaagtacatcaatcaacgaattgaaattaggtccggtagccagcgggtattgaacgggaaccacttttgaaccatagattgattgcagttgctccaataccatatcataatcgcacttctcatggtcgagctggtttaccaggaagataaccggtttgcccagcttctccgtatagcggaaatgattttgagtacctacctcggggccgtattgtccgttcagcagcaggatagccgtatcggtaacgttgagtgccgtcatggccgctcccacaaagtcgtcactgcccggacagtctatgatattcagcttcttaccgttccactccacatggaaaacggtggaaaacacagaatagccgtattcctgctccaccggaaagtaatcgctgaccgtattcttggcagtaattctgccgcgacgttttataataccactctcaaagagcagcgcttccgtgagagtggttttacccgagccgtcattgccaaggagggcaatgttcttaatttcattcgtctgatatactttcatgatatataagatttaaagtgaatactcagcatgcttccgtatgccattattttagtgagccgcaaattagaaattaatcaaaagaaaagcaataaaacgtctgtgttactaaactatgttatgtaacacatcggctatataccttattatatggtatccggaaaagcagcacttcagcctgtaatcaatatcacaaaaccccttccagctcaagtaatctctgtttggagccaagcccgccgccatatccggtcaaggaacggtcactgccgattacccggtgacaaggaacaaatatcgacatcggatttgctccattggcattagctaccgcacgcactgccgcaggtctgcctatgcgccgtgccacttctccataggaaactgacgtgccgaaaggtatcttcaacaattcactccacactgtcttctgaaaatccgtacctataaacaggagcgatatatcgaatgtctgccgctttccggcaaaatactcgtccaactgttgccgggcgctttcgattacagccgaagtaccttcctcaaattcggcattccacatccgtttcagtctgttgtccacccgggcactatgcttttccgtccgccagtcgcaaagacagagtttatcgcctatcgaaccaagcaacagcacgccgcagggcgattgatagggattgactatgattttattcttatctttcatacagcagaaataggataattacatctatctgtttccaattttaagagtttgaaaatgaaaaaacacctgttacgctatcacgaaaccggatacatatacctgattacggtcatattaaagcgcagcagataagtttccttacaagtaaaaaccgcccgtcctctcacaacaaagagaagaacgggcggccgtttatctaaaatgtatcgttcttatttcagcaaagactccgggtcgagatggtctgcctcgatgtctttgaaataacggtatgtaccgactttcagctctgccgtagcggcatcgtcgcaaacgatgattcccttttcgtgcatctgcagcgcgctgattgtccacatctgcatcacaggtccttccaccgcatgataaagggcacgggccttgttatggccatttacgataatcatcacttcccttgcgctgagcacagtgcctacacctacggtcaaagatgttttgggcactttgtttacatcgttgtcaaagaagcgggagttggcaatgatggtgtcggtagtcagcgttttctgacgggtacgcgacgacaaggaagagcccggctcgttgaaagcgatgtgtccgtcgggaccgataccacccatgaagaggtcgataccgccgtaagacttgattttttcctcataacgtgcacattcggcatcgaggtcggcagcgttgccgttcaggatattggtattttccggcttgatatcgatgtggctgaagaagttgttccacataaaggaatagtagctttcggggtgttccttcggcaagcctacatattcgtccatgttgaaagtcactacgttctggaaagatacaatacctttcttgttcaggtcgattaaggccttgtacatacccagaggcgaagaaccggtgggacatcccaatacaaacggtttttcgggtgtagggttggcagccttgattttggcagctacataatgtgccgcccactgtgatacggattgataatccggttgaatgattagtctcattacaattattttatcaggttaataaattaggggtaactttattgtctgtcttttttcaaacgctccgccatggcgcgtgccagattctcgcattgctcgtaggtaatgtccttcatggcctgcttcatttccaccggatcgcccacgatttcaaacttgcttttctcggcaaattcgcccatgcgcttcacggctgcacctgcccagcagaacgaaccgaagtaacccagataacggcctttcacctcgcgtaccaatatcttggagagcagtgattctatctccggataaatctggttgctatacgtgggacttccgattatcagacccctgtatttgaatatatcggctatgatgtaagacggattacttttgctgacattgtgcatcacaatatttttgatgccctgaacggaaagttccgcagcaatggcttccgccatttgttcggtattgccgtacatggaaccgtagacaatgacaacaccctcttcggccgcataccggctcaagcgatcgtagatgccgataaccttggcgatattatccgtccataccggtccgtgagtggagcagatggtggagatgggcagaccgcccagctttgccaatgccttctgcacgggagagccgtacttgcccacgatattggagtaataacgaaccatttcgtcccaatacttatccagattcatgcgtgtatcaaggaatcccccatcgagcgtaccaaagcacccgaagccatcgccggaaaacagcacgccttccgtttcgtcgaaggtcatcatggtttcgggccagtgcaccatcggagtcatatagaaacggagcttgtggtggcccaaggcaagaaagtcttcatcttttaccatatattgctcgcccgtcacgccatagaaaccttctatcataccgaaagtctgcttgttgccaacaatgatgatgtcgggataatgctgtttgattaagcggatagagccggaatggtccggttccatatggttgatgataagatactggatgggacgttcgccgattatgctctttatcttccgaagatatacctcaaagtaacaaatatctacagtatcaatcagcgcaaccgtttcatcgtctatcaggtaagagttgtaagacactccgtaaggcaatggccacataccttcaaacaaatgcttattgcggtcattcactcccacatagtggatttttccttttatcactgtttttgggttcattgttattatcttctaatttagattgattccatatttaatcagcggcaaaaataagtcttttttctcacatttcatacttctttccttgatatgcgtcaagttccttcattcttttttgcacccggtggttaaactcataatttttcagtccccagtcgggtgcaataagcagctctttgggagattgggagacgaagcgttccagaacaatatccggacggagatgctctacatagtccaccacgaggtcaacatattcatcgacattgaaaagatggaagtcttcgggattccgttcatattccaaagccatacgggtgccgcgtatcaattgcaactgatgcattttcagcgtagtaagcggtaaacgcgacaggtccttcgcctgtgccacgatactgcggtgagtctcgcccggcagccccagaattacatgtccgccggtcagtattccgcaagcagccgtacgctccaccgcattgacggtaacttgaaaagtatgcccgcggttaatgcggcggagtgtctcgtcgcgagtactctcaataccgtattccaccaaaaggaaagtatgcttgttgagattttccagataccgcagcaaatcatcgggcatgcagtcgggacgtgtaccgataaccagccccaccactccgtctaccgccaatgcctcttcatatttccgcttcaaggactccagttctccgtacgtattggtgtaagcctgaaaatatgccagatacttcatttcgggatatttatgcgcaaagaaacgctttccttcttccagttgcagggctatcggcttctcggtacggcagtagtcgggattgaaagtctggttattgcagtaggtacagccgccgtaccccttgctcccgtcacggttgggacaggtaaacccggcattcaacgaaattttctgtaccttatacggaaaataacgtttcaggaaagaaggaaattcattataaagaggagtcgcactcataagcctatgttatttagaaacaaaagtaaaacttttcttcgatttttactaatagaaaacggattagatatgttaacaactgccatggaagaggcacatattcgtcaacaaatacatttcagagtccgattacatattctacatgcaaatttataataccggaagcatagcgattgaaataaattcataactttgtatataatatggaaagacacaacaaaatattcctaccatcaaaaaaaacatttgtatgaatagcggttatcataagaatcttgtgttcacggcagcgtgcatcggaatgtgttttttcggtgtttcaatgattacattgggttcggtactgccttctctcgtcacaaaactggaattaagcggactgcaaactacgtcactggtaacctttcttcccatcggcatgctggccggttcgttgattttcggtcctattgcggaccgtttcggacacaaagcattgttggtgcccagttgcatcatcgtattatcgggattggaaggactgatatttttcgaaagcatcccgctccttcaaatctccatcgtaggcataggtctgggcggcggcatccttaacggtgaaaccaacgccttggtttccgacatctccggagaatccgaaaaaggctcccggatcagcttcctgggagtgttctacgggttgggagcgcttggcataccaagccttttgggaatcctgtccgagcattactcttttgaaaccaccctgcaaggtataggcatcattatgctggcaggtatattgttctgcatccccatacgttttcccgcacccaaacaagcgcaggggtttcctgtaaaggaaggattaggcctgctgaaagaaagcagcctgctgctgctcagcttcattcttttctttcaaagtggcattgaaggagtatgcaataactggtccaccagttatttcggtcaggtaaccgacatacctgccaatcagggattgatagcactcacctgtatggttgccggactcaccgtagcacgtatgctgcaaatcgtacttttcaaaaagatacaaccggcaaaggtgctcccctacagtcttatcctcactgcaacaggctttgccctgctgacagcagctcccggtttcatacgggctgcagcgggcatggctgtaataggaatgggattatcgtctacttatccggttatcctgagtattctcggaacccgctacccttcattgtcgggaacggcattcggcatagcgctcgccatcgcccttataggacaaactgccatgaacggactgatgggaatggttttcacatatgacaacggcatcatgctttacccttatataatgataggttcactggctatcatgcttgttttgtttaagcgttcactcaaataaattatttaccctctgcattctgccgggaattattaaagaaaactcacgacatggtggaaaagccggaaaaatttcctgacacaaaacggaatttatcattaattaattagattagattttcgctttatcgtatatttgccctgaataaccgaattaagagatatgaaaaaaataagttttgcactttttttctgcctttgtgcactggcaggctttgcccagaacagcaagccactcgatttgaaagaaatcgtatccggagaatttatccctcaaaacatttcgggtgtcatccctattccgggagacggcgaacattattcgcaaatgaatgcggataagacacaaatcatcaaatactctttcaagacaggtaaaccggtagaagtgctgttcgatgcggctactgcccgcgagtgtccattcaagaagttcgacagctacagctttgctccggacggcagcaaattgcttattgcaacagaaacagtgcctgtataccgccactcttatacagcagtacattatatatatagcctgaagcggaatttggacggcaagataaacaatgtagtggagaaactgtcggacggcggaccgcaacaagtccccatcttctcgcccgatggaaaccaagtggcttttgtgcgcgacaacaacatcttcctcgttaaattactttacggcaacagcgaaagccaagtgaccgaagacggcagccgcaatgaagtgctgaacggcattcccgactgggtatacgaagaagagttcgcatttaaccgtgccttggaattcagtcccgacagcaagatgctggctttcatccgtttcgacgaacgagaagttccctcttatactttcccggtatttgccggagaagtgcctcatattgccccttacgagaaatacccgggagaatatacttataaatatcccaagacaggtgaaaagaattcaaaagtatccgtacatacttttgatatcaaatccaaagtaacccgcaaaatcaatcttcctttggaagaaggcggctacattccccgtatccgtttcacacaagacccgaacaagcttgccatcatgacgctgaaccgccaccagaaccggttcgacctgtattttgccgaccctcgcagtaccgtatgcaagttggccgtacgtgatgagagcgacacttatatccgcgagaatgtatttgacaacatcattttctatccggagactttcagttttgtcagtgaaagaaacggatacaaccacttgtattggtacaatataaacggaaatcttatcaaacaggtcacttccggctcatacgaagtacaggatttcctgggttatgaccctgaaaacggaagtttttattacagcagcaacgaagaaagtccgctgcgcagcgctatctacaagatagaccgcaaaggcaaaaaaacaaagttatcatcgcatatagggacaaatagtgccctgttcagtacagacatgaagtatttcatgaaccgctattcaagcctggacattccgactgtcatcaccctgaacgacaataacggcaaaacgctgaccacacttgtagataatgccgcactgaagcagaaattaaacggatatgatatgccgaagaaagaattcttctctttccagacctccgagggcactgaactgaatggctggatgataaagccggcaaacttctccgcaagcaaaaaatatccggttctgatgtatcagtacagcggtccaggctcgcagcaggtacttgacaagttcggcgtgagctgggaaacttacatggcttcccaaggttatgtcgtagtgtgcgtagacggacgaggcacgggcggacgcggtgcggaatttgccaaaagcacctatctgaatctcggtgtcaaagaagccaaagaccaagtggaaaccgccctgtacttaggacgccaaccttacgtagacaaaaatcgtatcgggatctggggctggagttatggcggctacatgaccattatgagcatgagcgaaggaactcccgtattcaaagccggagcagccgttgctccggttaccgactggaactattacgataccgtatacggcgaacgtttcatgcgtaccccgaaagaaaatgccgaaggttacaaagcctcgtccgcctttactcgtgccaacaacttgcatggcaatctgttgttggtacatggcatggcggatgataacgttcatttccagaattgcgcggaatatgccgaacacctcgtacaacttggcaaacagttcgacatgcaggtctataccaaccgcaaccatagcatcttcggaggcaacacccgtctgcatttgtataccaaattaacgaacttctttaatcgggaattgaaaaaataaatgagcgaaagagtacgtaagccggaatggctcaaaataagtatcggtgccaacgaacgttataccgagacaaaacgcattgtagaatcccactgcctgcacacgatatgcagcagcggacgttgtcccaatatgggagaatgttggggaaaaggtacggccacttttatgataggcggagatatctgtacccgttgctgcaagttctgcaatacacaaacaggcaagcccatgccgcttgacccgcaagaaccggtgcacgtagccgaatccatcgccttaatgaagctctcccacgccgttgtcacttccgtagacagagacgacctgccggatttgggagccgcccattgggtgcaaacaatccgcgaaatcaaacgcctcaacccggatacgaccgttgaagtactgattcctgactttcagggaagaaaggaactcgtagacatggttatcgaagcccggccggagataatctcccataatatggaaaccgtaaaacgtatcagtccgctggtacggagtgctgctcattatgaaacaagtcttgaagtattgcggcagatatccgaaagcggcactgttgccaaatccggcattatggtaggattgggggaaactccggatgaagtggcagcgctcatggacgacctgcgcgacgcaggttgccggatactcactatcggacaatatctacaacctacgcataagcattatcccgtagcagaatatgttacccctgcccaatttaccgcctacaaggaactcggattaaaaaaaggattcacccaggtagaaagcgcaccattggtccgttcgtcctaccatgcagaaaaatcaacccaatatctacaaaaaagatgaaataaagaacattttataccggctgtttgttgaataggaaacggcaaaatagcgtagtaatgggcaagcaacgaattctatcatctaagtttaatatatcgctcggatatattcccgttattatatccattatattatgtgaattcataatacaagacattgctatctacatcggtgcaggcgtaggtgtgttgtccagtatctatatgtggcagcgcaaggggccgcatatcccccaattcatattatacagcacaacaggaatgttactgttattgacaataacttcctttttttccgctgattattgtccggaagcaatgtttccgtttacgctggaaatcagtgcgattatacctccgctcatcatctttctgaatagaagacgctttttgagctatcacacagcccagacccataaatgctgcaagcagttttttgcacaaggagccgaagccgccatagtatcggcccgtgtattactgctcatcggtttcctgcattttcttatcatatcgcttgccatattgttcgggcatccgctgaacgatacgctacgctacattttattccgtatcatgccgccctgcgtattcatactgggtatcttgttcaatcagttcggcatatactatttcaacaagataatgagtcataccgtatttgtacctatcgtgacaaaaaaaggagatgttattggaaaagcaatgccctcagaagccatcaaccggaaaaacgaatatatcaatcccgttatccgcatcaccgtaacttcacacggtatgctgtttttactgccccgtcctcaatgcagcatactcgaaaaaggcaaaacggatatattaatggagaactacttattgtatggagaaactctggaacaaggtgctgaaaggatcttacaagaaatccttccctcagctccgccccaaaatctccacttctgtttcatgtaccactttgagaatgaaattaccaaccgcctggtctacaactttatccttgacctgaacaatgattccatcctatgcaacaaaaagttcaaaggcggaaaactttggacattccagcaaatagagcataaccttcacagaaactttttcagcagttgtttcgaacgtgaatacgaacacacaaaagaaattatttatacaagagaaaaatacaaggaattttagacaaatcgggaaccttccctttccattctttcaccgttttcgttttaatatactctccctcacatgtaatatcggcagcaatgcaaagtttggtctgaggacggcagttatgcagaatatcctctatcatcttattgttacgatagggagtctctataaaaagctgggtctgatgctcattatacacgcgttgttccaacgctttcagttttttggcacgctcaccgggttcaataggcaaatatccgtgaaaggcaaaactctgtccgttaaaaccggaacccataaccgataatatgattgaagaaggcccgaccaaaggaaccaccctcaagttcttacgctgcgctatagccaccacatccgcccccggatcggcaacagccggacatcctgcctcggaaatcactcccattggatttcctgcctcaagcggtttcaaatatccggatatatcttccggtgaagtatgcttattgagcgtatagaacgtaagcgaatcaatatctatttccctgtcgactttcttcaggaaacgacgtgccgaacgcacatcctccactataaaatgacggatacctaaaatcacttctttattataagagggtaatacggtttcaacaggagtatcgcctaaagtaacaggcaacagataaagagcagtttccatgtaaatcaactaaaggaataaaaatagagtggtaagatttataaagggatataaaaaagcggtaaagcggtaaggcgataaggctatgagcctgaataccctatcactttaccgcttcatcatccttttttatccgtagattatatttccgttttcgtctttgtactcatccagacctttttcataagtagccatagcgcgcaaactcatacctacgctggagaaaccgccatcgtggaacaaattctgcatagtaaccttacgggttaagtcggagaacataacgatacagtaatccgcacattcgtcagccgaagcattacccagcggagacatacggttggcaaagtcgaacagtttgtccataccctttacacccgaaccggcagtggtcattgtcggagactgggaaattgtgttgacacgtacattgtgctcacgtccgtagatataaccaaagctacgggcaatagactccaacagtgcttttgcatccgccatatcattgtaaccgtagaacgtacgttgcgctgccacataactcaaagctacgatagaaccgtattcggcaatagcgttcatcttcttggcagcctgtatcatcttatggaaagatattgccgaaatgtccagcgtcttatccaacatatcgtaatccaagtcatcgtatgtacgtttcttgcgtacattaggagacataccgatagaatgaaggacaaaatccacctgaccgcccagcacttccatagagcgtttgaatacattctccaaatcttccacactggtggcatccgctgctatgacttcgcaattcagtttttcggccaatgccgaaacttcacccatacgtacagcgacaggtgtattggacaaggtgatcgttgcaccttcttctactgctttttctgctactttccaggcaatggactgctcattcagagcaccaaaaataatgcctctttttcctttcaacaaattgtaactcataccttttttactaagttttgagttgcaaagatagtgcaaaaaccccgaatgcacacaaagaaaagggtaaaaccgcaaaaaatacaccaaaaccaacaatttgtacacatcttttctaccaaagcccgatacatttgcaaacggtaattaagaggttttttcataataatttatttaaggttagaattaggttaacatgaatcatttattatttctttcgtaagccactcgtgagagcagcttacggggaagtaataagatggaaagtaaagattaggaaatgccgcttaatccgcaaatcaaaattcataaattcattaacatagtatcacgaatgaacacattactaaaaaagctatttacgcttaccacattttctcttgcattactgcctgcacagaatgctgttcatgcccaatgcaaaaattctatagatgagaacatctataaagaattgcctttcaacatgccaaaggttgagcagccgtcgtttcctgattatacagtcagtatcctgcaattcggagccaaaagcgacggaactaccttaaacacaaaagcgattaatgatgccattaaagccgtcaatgcaaaaggcggcggtaaagtagtcattccagaaggattgtggctgacaggtcctattgagttattgagcaacgtcaatctgcatacggagaaaaatgccctcgttgtctttacagatgatttcaatgcctatcccattcttgagacatcgtttgaagggttgaatacccgccgctgccagtcgcctatttctgcgcgcaacgcagaaaacatagccattacaggctatggtgtattcgacggttcgggcgatagctggcgtccggtgaaaaaaagcaaactgactgccggccaatgggatgcacttgtcaagtcgggcggtgtagtagacaaatccatatggtatcccacagccggatcgttaaagggagcattggcctgcaagaacttcaataatcccgaaggtatcgaaacagacgaggaatggaatgaaatccgtccgtggttgcgccccgtattgctcaatatcgtcaagagtaaaagagtcctgttagagggtgttacattcaagaactcaccaagctggtgtctgcatccgctatcatgcgagcacatcaccattaaccaagtaaaagtattcaatccctggtattctcagaacggcgatgccctggatttggaatcctgcaagaatgcattgataatcaataacatcttcgatgccggtgacgatgccatctgcatcaaatccggtaaagacgaggacggacgcaaacgcggcgaaccttgccagaacgttatcgtaaagaataacactgtgttacatggtcatggcggtttcgttgtgggcagtgaaatgtccggcggcgtgaaaaatatttatgtaacagattgcactttcctcggcacagacgtaggtttgcgctttaaaagcaccagaggacgcggcggtgttgtagagggaatctatattcacaacatccacatgattgatataccccacgaagcactgctcttcgacctattctatggcggcaaggctgccggtgaagaaacggaagaagacctgaaaggccgcatgaagacagcagttccccaagtgactgttgaaacgccttctttccgggatattcacatctccaatatcatctgcaagggttccggacgcgccatgttcttcaacggactgcccgaaatgcccatcaggaatgtaaccgtaaaggatgtaatcatcaacgatgccaaagaaggcgttgtcatcagccaggcggaaggtgtcacattggaaaacatacgtatagagactaagggacacacattggatgtgaaaaacgccaaaaatctgaaagtggacggaaaagtatattccgctattggcgcagaaggaaaaatgctggatttttaagtaaagttcaataagcaataagcgcaaagcagacagtctttttgccaaaagggaaagagctgtctgctctatttagtttaattttgccgcagtttattaaacacattccttatgaaaacgacctttttaaccggtttcctgttaatgtgcgcatgcactcttgccgcacaatcacaaccaaataccaaaaccatttcggtaaaagtaaccaactcatggagcaaggacaaaagcaatgctccggtagtactgaaaatcaaagacctgcaacccggcttcctcgtacgttcggctgttgtaatgaacggcagtgaggaaatcccctcgcaactggacgacttgaacggcgatttaaaagccgatgaactggcatttgtcatggacattcctgcccaaagcaagaaaacgctggca

SEQ ID NO: 4111 - DNA, 54023 bp, Unknown
  gut microbiota DNA sequence
ttcaacgaaagttaacgcataaatactggtacttgtttccagcatcagcggatatcttaattccaaaccgagacgtgcgtatgcataaccttcgtagccataaggagtaagagaactgttctcatatccacgcaaggcgacactttcggttgcatagctggaatatcctgtcataccgtcgccacctacgtcaaaggtttcaaacggagatttcttgtatttgttgtagtgccccagcagaccgaattctacgcgtcccatcagtaccggagtgcgttttacggcgatagggtccatcaacgggatgtatactttggatttgaatttccacttgtggtattctatccatttgtgcatcttgttcatatcatcctgattgctggtactgtacttgctgtaatctgtaccgtcgaacagggagtagggcggtgtcagttgtgccgacagcgagaattcggaaccctggcgcggatagataggattgtcgatagaactgcgcgacaaggtgaggtttatgctcaggttgttacacttaccgttggtaacggggaagtattgccagtcgctcagaatataacgctggtaggacaattctgccgtaaattggaagtagtcatccggccatttcaaacgcttaccgaacattacagccaatccccacatctggatggacttgtcggggtcgtaatagttttcataattgttatagttgccatagttgtacataccataaccgtacatgccgctatagtagctgttgtaataactgttcatgtacgcatcgttatagtaacggctgctgatatccgtctggcgggagtagaatgcagatacggagaacgcattcggacgtttgccgccgaaccacggatcgtagaacgatacgctgtatgactgatagtatttggcattggtctggccgctgatagtcagtgtctggccgtcaccctgcggcaggataccgcggtagttctcacccggatgcaacaggttggcaacggagaagttggtgaacttcagactcagtttaccgataataccagtctgtccccaaccggcagagaactctacctggtcgttcgctttggagacgaggtcataacctatatccaccgtaccgtcttccggtttgggctggatatccggttggatttgttcggggtcaaagtgtcccatttgctggatttcacgcatggaacgcatcaggtcttcacggctgaaaagctgtcccggacgggtacggagctcacggcggactacgttttcatacaaacggtcgttaccgttgatgctgactttattgatagtagcctgacggccttcgaagatacgcatttccaggtcgatggagtcacctacgatatttacttccacggggtcgagcgagtagaagaggtaaccgttgttgtagtagaggttgccgatagcgtcttcatctgtactggtacgctcttccagcagcttctgattgtagacgtcgcccttcttcatacggagcaggaaattcagttgttcggaaggatagagggtgttacctacccacgttacattgcgcaagtagtatttctgtccttcttcgatttccatgaaaatatccaccgtacggtcgtcataagacttgatgctgtcttttacaatcatggcatcacgataacccaattcgttgtatttgtctataatcagttgcttgtcggcttcaaaattttcttcaacaaactttttggtacggaaaaggttgagcagtttacctttttcatttgttttcttcatcacacgtttcagcttcttggttgtgatggcctgattaccggtgattgtaatctgatgtacctttaccttctcctttttgtcgatattgatatctaccaggacttggttctcgttgttgggatcatccttttgcgtgatgatgatgtcggcattcttgaaacccttatcgtcaaagtagcgcttaatcaatgtcttggcgcggtctatcaggttgggggtaatctggtttcctttaatcagacctacccgggcttccaaatcttcacgttccgacttctttacaccgtgatagcgaatatcggaaacgcgggggcgcatcgtcaggtggattgtaagccaaatccggtcgccctcgattttatccgcagtaacttgcacatcagagaacaacccgtgacgccagtagcgtttgcaggcttgcgttatttcatcgccgggcacggtaattgtctggccttttgataatccggataaaccgatgattacatagtcttcataattcttggctccaactaccttaatatccgctatttcatatttcttgggtgttcccgaataaagaataaccggtttttcggtttcatcggtattgctggtgtcctgtgccgagctggtcagtacacagctaaagaggcagataaacgttacgagtatggaggaaatacgatagtacatttttttatttactatatttacgatttactatttacaatttgtgtttgtccggtcagcggatttgttcgctggtttttccgaacctgcgttcacgcttctgataatcgtggatggctttgtgaagttccgcttcacggaagtcaggccaataggtgtcgcagaaataaagttccgagtaagcacattgccagagcaggtagttgctcaagcggatttctccgcccgtacgtatcaataaatccggatcgggcatgaagtcggtggcaagatattgggacaacagggtgctgtcaatctgttcgggagtcagttcgcctttttgcactaagactgcaaggcggcgggcggcttccgttatttcccagcgggacgagtagctgattgccagtaccagagacatcccagtattatttgcggtatgtgctatacaggtttccaaacgttcccgcacattgtcgggcagcttggtcagatctccgataacccggaaactgatgttgtttttcatgaatgtttcctcttcgatagagtcgaacagaagcgccatcaatgcagcgacttcattagaggggcgattccagttttcggtggagaacgtatataaagtcagatatttgatgcctaatttagacgcttcttctgcaatgacatgcactgtctcggcgccggcctggtgtccatagctgcgctcttgtccgcgcaactttgcccaacgtccgttgccgtccatgataattgccacgtgttgtggaatccggcttaaatcaagttcttctttatttagcatctttttatacttacatctcttgtcttggttactattctcgttttatacttttatatatataaaggaaacagaagtaatgaatttattgcaccctgactggcatcagtttgttgagatgtccgcgccaaacggcagcatctgttccgtttccgccgaagataacccatatataagggctgtctgcaacaatggagtagggagcagttatatctgtcatatctttatgtaacaagaattttctttgaggctcacgccaggaaataccgtcaacggaagaataaatggcatcaagcttgttttcatctttgctgccgaagatataaaagttctcaccatagtacattacggcaggattggcaaatttcggacaatacacatcataggaactggtgtttgccaatgaataccagtctttgccgttggaagaaacccagggaatggtttgctgaacgtcattaacggtacgacccactaccattgcctgtgactggttgttgctgtcaaagttggtggagtagatatgtgatgtaggaaagtcagtctttgcctcacccatatttccttctatcttgttgccttgattgtcaactgtgtaaacctcaccgtttgaggtaacgacagtcagcacatcggtaaaaccggcaatcagtgtccggatattgttgttcccttcccaattggctggtgtccaatttattccgtcatcggaagaatgtgccgtaccgtcttctgtcacgatgtaaagtctttgtttctcattttctccgtctttgtatttcaggcagacgagggattcctgttttgcattgtcgggaagtttagctccggacactgcatcccagccgtatgtctcttctgtgtccagccaatatgcacccgctcttgtctgtgttttctgtgccgcagattgtgtaaatacccacagttcgttgttgaataggatggccttttgttcacctgaaagtgtcggtgcacttcccattttatcccacactaaggagtccggatcctgcttgtgtactctgatttcaagggaatattcatttacggtaaagccgtccggggcatgtattttgaatttcatcccgttttcggtgtttatggctttcgtaagatttaccgagtcggctctgttgaatatcgtatcaccgctgatactattcatttcatctcttgaagtaatccagccgcttacggtgaacgtgtcaatcaatatgcggtcgataatcgtatctgctcctataggcaatgaatcctggttatagatttttcttcttaactggtctatcgtgaatttataatgtttgccgtataccgtgtcaatgccaaaagcatgtaccgttgcatcggaacttagttctaccgtgtcgtcagagtccaggcacgagcttattgcgattgatacaaaaagaaaacttgcgattatagctaaaaactttattctcatttgaaagatagtgtttatttacaagttgcaaaaataggaacatttttttctataaacagttttatcggcaagttttatataaaattatagataatatggctgtttttctcgataaaaatgcccttgaataaggctgttagcctaatcttgtggcgctgtaatgccggaaattcctgccgaaataaacttcgttggtacagggcgctttattgccaatttcaggtgccttgataccggataatagcgttaaaggactttcttcgacaaaggcttcatcccataattccgcatcgataaaggactgtaacaggatgtttccgccttcgactaacagagattgtagtccctgcatgtacaggtgtttcatgatttgcggcagtatatcccgttggaagtcaatggggatgtattcaacgttgggttgtggcaggcacggtttctcggtgaacacaagtgtgcggacatttccatcgaatacatgcagcttgggagacagccgcaactgtctgtctgttacgattcgtactggcgaccggccttgccagttccgtacggtcaggctggggttgtccagctctgccgtacgtgtacctaccatgatggcactgtgctctgcccgtttcttatgcacaagcatggatgtcaggggggtggatagaatgaccggttgcccgtcctcacggttcttatcgatgtatttgtcggcagactccgcccatttcagggtaatgtaggggcgatgaagggtatgaaacgtgataaaacgccggattagacttctgcattcatcttccagcaccccggtgatgacttcccgccctgcatctttcagcttccggattccccgtcctgctactttggcaaacgggtcctggcagccgattacgatgcgcggaatctctttctctatgataaggtcggcgcagggcggtgtctttccgtagtgggcacaaggctccagactgacgtagattgtagaacgcttcaacaacgaggggtcttttacggagcggattgcattgacttcggcgtgcgcctcgccgcaacgcacatggtatccctcgccgataatttttccgtcgcatacgattactgcgcccaccatcgggttgggggctgcattgcataacccgttttgggctaactgaatgcagcggcgcatgtatttttcttcttccatactttgtattactcttaaacttccactatttttgcagcccgaaatgccgaatgttatgactgtttccgtttctcatatccgccatgctttgcaggagagttactctgcgcaagaagctgccaatctgtcccgcattgtctgttgcgaaatgctggggcagactgcggtcgattattacctgggcaaagatatgattttatccccaaaagagatgcaggatttagacaccattcttgcccgcttgcgtaatttcgagccgatacagtatgtgcagggcaccgcccgttttctggaacgctcctaccatgtggcccccggcgtgctgattccccgtccggaaacggaggagctggtggaggtgatgctgaaggaagttccgtccggagcccgtattcttgacattgggacggggagcggctgcattgccatttctctctccaagatgctgccggatgccaaagtgacggcatgggacatttcggacaccgccctccgcatagcccgccgcaataatgaggcattgcaggcatccgtgtgctttgtacagcgggatgtgctggcgtatgttcccggcagcggggaacggtatgatgtgattgtcagcaatccgccatacgtcactgaatcggaaaagcaggaaatggagcgcaatgtcttggactgggaacctttttcggcattgtttgttccggataatgatccgctgcttttttaccggtgcattgcagagttgggcaagggtatgctggcgtccggcggcagactttattttgagataaaccgtgcgttcggggaagctacggcaacgatgcttcgcgcacaggggtacaccaatctacgggtgttgaaagatatttccggaaatgaccgaatagtaatcgcagaacgatgatagaaattacagaaacagatgctttaagccgcgtggctgcttattgctccactgcggagcattgccgtgcggaagttacggagaagttgcagcgttggggtattccctatgatgccatagaccgcataatcaaccgtttggaacaggagaaatatattgatgaggaacgtttttgccgtgccttcattcatgataagtaccgcttcgccaaatgggggaagataaagatagggcaggcgcttcaactgaagaaaattccccaaagtgtattttaccgttacctgaatgaaatcgacgaggatgaatatcttgccgtgctggataatttgctggcggtaaagcgcaagagcgtgcatgcggagaatgagtacgaactgaacaataaactggtgcgttttgctttgagccgggggttcgaaatgaaagatatccgtcactgtattacgctttctgatgaaaatgacgaattggaataaaatttatccgtattcttttttattctcgtcagctttctgtatttttgcggcatatttatcataatagttagtttggctatgaaaactttagaaagattgtttgcagagaagttgctgaagattaaggcgattaaactacaacccgctaacccgtttatctgggcgtcaggatggaaatccccgttttactgtgataaccgtaagactctttcatatccttctctccgtaatttcgtgaaagtggaaattacacgtctgattctggaacgtttcggtcaggttgatgccattgccggtgttgctacgggagctattccccagggtgcattggtggcggatgcgttgaacctgccgtttgtatatgtacgctctaccccgaaagaccacggtttggagaacctgatagaaggtgaacttcgtccgggtatgaaagtggtggtggtagaagatttgatttctaccggcggaagcagtttgaaagctgttgaagccatccgtcgcgacggatgcgaagtaatcggtatggttgccgcttacacatatggattccccattgcagaaaaagcattcaaggatgcaaaagttcctttggtgacattgaccaattacgaagcagtgatggaagttgcccttcgcaccggttacatcgaagaggaagatgtgcctacgctgaacgaatggcgtaaagaccccgcgcattgggaagccggaaaataagacttattttacataatgatagattatgacaaaagaaccattcggatagttgctgtccggatagttctttttgtcttttaaagaccattgtattatgactaaatttgaaagtgcggtaaaggtgatacctgcttcgcaaaaagctgtttatgagaagctttcagaccttagcaatttggagaaagtgaaagaccgcctgccgcaggacaaagtgaagaatttgagtttcgatgcggaaacattgtcgatagaagtaccgccggttgggaaaatagtattacagattgtagagaaagagccttgcaagtgcatcaagtttgcaacaaccacctcgcctctgccctttaacctgtggatacagatagtgcccgttacggagacggaatgtaaaatgaagcttaccatcggaatggagttgaatccgtttatgaaaaccatggtgcagaaacctttgcaggaaggattggagaaaatggcggaaactttgtcgctgattaattattaattactaaatcttatggctcagaaactttgggaaaagtccgttcaggtaaataaggatatagagcgttttacggtgggacgtgaccgtgagatggatctttatctggcaaagcatgatgtgttgggttccatggcacatatcacgatgctggaaagtatcggtttgctgacaaaagaagaattgtccctgctgcttgcggagttgaagaatatctacgcaactgctgagagcggggagtttgtgatagaagagggggtagaggatgttcactctcaggtggaattgatgctgacccgtaaattgggtgatgtaggaaagaaaattcatagcggacgttcccgtaatgaccaggtgctgctcgacttaaagctctttacccgtgcggagataagggacatagccgaggctgtagaacagcttttccatgtgctcgtcatgcagagcgaacgttataaagatgtattgatgccgggttatacccacttgcagatagcgatgccgtcgtcgttcggactgtggtttggcgcttatgccgagagtctggtggatgatatgctgtttttgcaagccgcctttaaaatgtgcaaccgcaatccgttgggttctgctgccggatatggctcgtctttccctttgaaccgtacaatgactacccggctgttgggcttcgattcattgaattataatgtggtgtatgcccagatggggcgtggtaagatggagcgtaacgtggcttttgcgctggcaagcattgcgggcaccgtttccaagcttgcgttcgatgcctgtatgttcaacagccagaacttcggatttgtgaaactgcccgatgactgtactaccggttcgagcataatgccgcataagaagaatccggatgtgtttgagctgacacgtgccaaatgcaacaaactgcaatcattgccccagcagataatgatgatagccaataacctgccttccgggtatttccgcgatttgcagattattaaggaagtattcctgcctgctttccgggagttgaaggattgtttgcagatgacgacctatattatgaatgaaatcaaagtgaacgaacatattctggatgacgataagtacctgcttattttcagcgtggaagaggtaaaccgtctggtgcgcgaaggcatgccgttccgagatgcttataagaaggtcggtctggacattgaggctggcaatttctctcatgacaagacagtgcatcatacgcacgaaggcagtatcggcaacctctgcaatgatgaaatatccggtttgatgcagaaagttgtggacggctttaattttgaggtaatggaacaggccgaaaaaacgttgctcggccggtaatcataattgattaactgcttgtggtgtacgatgttggctttctctgtttagggtataaacgtattaatgacagtctggttaatatcgtacatccctatttatttaacttttttccggtaaaaagtttggctgtaacgtagaaactgtttatctttgcacccgttctccagaaacctgcggaaatagctcagttggtagagcataaccttgccaaggttagggtcgcgagttcgagtctcgttttccgctctccttttttgaggatgctcgaatggtggaatggtagacacgaaggacttaaaatcctttggccagtaatggctgtgcgggttcaagtcccgcttcgagtactcatctaaggctttgtaaatcattgatttatgaagctttttttatgctctttatctaaatcggaaatcttatttttttttcggaccgccctgtttttcagcaaaaatagagttgcattttaccttgaattatgccgctcatgtaaaccaagatgtaaaccgaaaaagtatatacgttagctgtttcagttggaatcccctgtaagaaatatcgttgtccatagtgtattatgtcgtaaaggagcattgtaaatgcagctgtatatcagcaaaaacctcgttttgcaattgcgggctctacggttgccaattgcgggccgtacagcccgcagatggaaaccgtatggttcgcaactgcaaaacggaatttatcaagagttatgacggcataatataaggtgcaacgcaagaaaaagaacaaggagaaagtgtattttccttgtgcattttgggacaaaatgtaaggggttggggtactttttccccttaatatgggcagaatgcctcaaaatatgatgagatgtgtattattgggtaaagtaacagataattaagtagttatagaagatgaaatgctgaaaaagcggacattttagtgatgaccgatagtttctcgtcaccggtcgtcacacttctcgtcacctctgtatcgccctctggtaaagggatacgggcaataggtgacgagtgacgaccaaaaaacagttttctttatttcaatatcagttcataatctgctacatccagccattctccgaacttcatgcctacttccttgaagtgggaaacttgtgtaaagccaagtttgctgtgtaaggaacaactggccgtattacaagcggtaatacaagctatcagtgtgtgataattatgttgccggcattcttcgatgagaacctgcatcagcagtttgccgagtccttttcctctatgtcgggcagacaggtatactgtcgtttcgagggtatatcggtaagccgtccgttgtttccagggatgtgcatagcagtatcccacaactttatggtctgtttcgcatacgaaaaagggaaagtggggaaaaatttctgctatacgcaggcgcatctcatcttcagatatcggctctgtttcgaatgtataggtactgttgaggatgtactcattataaatatcggtgatgtacttgacatcttgaggttgtacaggtctaatcataccgaaaaatcattgtttggataatttaagcaggtaagtgcttgctaattaacgatacagccggggacgcctgttattaaaccgataccctatacccagcatcagatagttgggttcatgaaaatccttcaggttgtagccgacatgcaggaatgtgtcgcgggtcatatctattttgagcgccaggatttggtagaatgattgcaagtcgtccccgccatgcaggatattggctccgaaacctatgccgacggtaaagtagggcattacccattctccgcgtgccgagacacccagagagagttgtttgcgaagcgggggagtgccgaatgcctcttcctcgctggcatcgtcgagctgggtagcgtaatcctttgtataaatgttggcactggcatcatagacaccgtccagagatactcctgcacggaatttatatccgaagttatacatcggagcgaaacagaacccggctacgccgtatttgccgggagcggggacttgtccgccgggaacgtttacggctttccgtctccacgaaccgaacagcataaggtcatagctgacatgccgggggaatgccggaaccggaatttgctgcaacggttgcaaggttttgtcaatgtcccggttgaaattatatgccactccgattttaaaatctatcgtgttcagtccggtgttggggtaccgggtattgccgttggagaaatgtactgccgttgcgccgatattgaggtcgaaccgcggggaaagtatccagttcaggtgaatgcctgcgctgagataggcgtttactttgcttcccattacagtattgttgggattgctgagatagtcatacggcttccagccaaaagatgcgccgaacccccattcgtagttaagcgacaagcggggagtgattccggcgatgcgggcgccttggaaggcgtagagggcaacgggaattcccatttccctgcggttgccgaaatcgaaatagcccaatcctattccctgataggaacttccgtatacccggtcggcggcagtacccggtggcagccggaatgagtacttcaagtgggcggagcaagcagacctcattattttgcgcatatcgttttcaccccgcagaaaggagctggtggggaaaatatatcccgcccggccttcaatgccgagacggtggatataagcatcttgtgcgcatatattattggacagaaacagtataatcattaagagaatcatatctcttccggtccgcattttactattcatgatgtcgtggcgttctctgaatcttgtgcaaatataatccttttatctttttatttgcatgaaaatcttatatttgcaaggttaataattcgtcatctatgttattcaagaaatatgctggtcaatcggaataacagtggaatttccggtggcttccttattcgttgactattcgacggactgaacttatccggggtgcttatggacagggtatattcctgttacatggaaacggagttctcgctctttcctcgtatggcggcattggccgagaatgtgtggtcgccggcagagaagagtttgcaggatatagtacggaagcggtagtcttcattccaaagaacaggacagcggttgtatcaattatagaatgacagataatacgtcagtcatcattttgatacaaccgctgtctcttttacaagccatctatgcttctgcttattccgaagcggttatttctcgtcgttcttccggatttccacacggcgtatcttaccgctgatggtcttgggaagttcgtcaacgaactctatgacacgggggtatttgtaaggagcggtcactttctttacgtggttctgcaactccttgaccagttcctcgccggcgcggttcttatagtctttggacagtacgatggtggctttcaccacttgtccccgtatttcatcgggaactccggtgatggcacattctataactgcgggatgcgtcatcagggcgctttccacttcgaacgggccgatgcggtaaccgctgctcttgataacgtcgtcggcgcggcctacaaaccagaggtagccgtcctcgtccttccaggcaacgtcgccggtgtaatagatgttgtcgtgccatgcttcgcgggtgcggttggcgtcgcggtaatattccttgaacagaccgagcggcttgcctttgtcggtacggattacaatctgtccttgttcaccggcctctaccgaacggccgtcatggtctatcaggtctacgtcgtattggggattgggcaatcccatgctgcccggcttgggttgcatccacggcatggtggctacggtaagggtggtttcggtctgtccgaaaccttccatgaggctgatgcctgtcagtttcttgaatgtatcgaatacggcggggttcaacgcttctccggcaatggtgcaatactgcaatgaagagaggtcgtacttcgtcaggtcttcgtgaatcaggaaccggaagatggtaggcggtgcacaaagcgaggtgacgtgatagtcctgtatctttgtcagaatatcggcaggagtgaatttctcgtggtcgtatacaaagatgttggctccggctatccattgtccgtacagtttgccccatacggctttaccccagcccgtatcggcaatggtgaggtgcaggctgttttcgtgcaggttgtgccagaaacttccggtaacgatgtgccccaacggatacgtgaagtcgtgcgccaccattttgggttcgccggtagtgccgctggtgaagtacatcaaagaaatatcgtcgttgctgttgggatgctccggtcgtgcgaaaggggcggcatcggcaatgcctttgtggaagtcctcaaaaccttcggctatctccgggcctacgctgaccagcttcttcacactcggagagtcgggcatggcagccgtgatgtggtcggtaatgacgctttcgccggcacagacaatcatcttgatgtctgcggcattgcagcggtatacaatatctttcttggtaagcaggtgtgtggcggggataacgacggctcccagcttatgcagtgcgatgatgctgaaccagaactcatagcggcgtttcagaatgagcattaccatatcgccgtggccgatgccgaggctctggaaataggaagccgtcatgtccgtatagcgtttcatgtcggcaaatgagaactggatgtgctcgcccttgtcattggtccagagcagtgcgggcttgtcgggatgttcggccgcccaggcatccactacgtcataaccgaaattgaaattctccggtacgttaatctttaaattcttgatgaagtcctcttgagatgtaaaggacgtttgcgataaaaatctttctaccataacttttggaatttcttcattcaccgttcttcatttatgtgttgttacatgattacagcaaggaaacgtactttctttccgtccagcgctttcatgccgtgaggcagtttggagttgaaatacaaactgtctccttcgtttaaaatcaagtctttgccgtcgatgctcagcatcatgcggccttccagtacaaggttgaattcctgtccggagtgactgttgtagtgtatcggctcgttatccggcttgggttcgacggtgacgatgaacgggtcggcgttgcggttcatgaagccggcagccagtgactggtatttataggcttttgtacgctcgatgctggttcccttgccggcacgggtaaggaagtagctgctcatcttcggctcttcaccgaacatcagggcatccagtgcgatgccgtaacggcgggctatcttttgcagcatgcttacggagatgtcgaattctcccgtttcggcaagacggtactcttctgccgggatgtcgcaatcgcgggcgatgtcttcggcattcaattccaatacgtcgcgcagtccgcgcaggcgttcggctatttgtttaatctgttcgtccatgtggtttttattaagtggattagtacggttatttacttgctttgatggcattgataatggcggaagagaatccttgatgttccagttcgttgatacccttgattgtaattccgccgggagtgcataccttgtcaatctctatggcgggatgcgtgtcgttgttcagaatcagttcggcggcgccttttaccgactgggctatcatgcgcatgccgtccttggggtaaacgcccagttctattccggcctgcatggctgcctggatatacttcagtacataagcgatgccgcaggaagtcatggcggtggttgccgctatcttatcttcgggaatcagcatggcaagtcccatttggttgaagatgtcgagcaaaagctgttcctgttccttgctggcgttacggcttgcaatgagcgtcatgctttccatctcgctgatggcggtgttggggatgaggcggaacatggtcatctccttgtctgccacgtagtgtgccagttcttcgaaagggatgccggcagctacggagataagtatctgcttgcttttcagcttgagttcgcttaccaccggttttatcagccacggtttgacggcgagtatgatgagctcggcgccggtaacggcttcctgattgtcgcgtgtggtttgcaaagtggggagctcagcctttaacgcatccagtttgccttgcgtgggattagaaacaatgatgtcgctggcggggatgatggttccttttgccagaccgcgggcgatggagccgcccatatttcctgcaccgataattgctgttttcatatcatcttgtcatttaaaaagttgtcttcgggcaaaggtaaagattttaatgaaaaaacgaccgaaacaggaaggtattcttctttcggtcgtatcttttgccggctgattatccgtaaattgtcaaagtgctttcttaaaacgttccaggaagaggttcgcttcgtccatgccgagacacaggggcggcaacaggcggagtacgttcgtgccgctgacaccggtaaacacatgctgttctttcagtaacctcaaacgcagttctttgacaggctcttcaaattcgaggccaatcatcagtccgcgtccgcgcacttccttgatttgcgggaatttcttcagctcttccatcaggtatgcgcctacttgggcggcattctctacaagagcttcctgctctatgacatccagtacggcaagcgcagcgctgcaagccagatgatttccgccgaaagtggttccgagctggccgtaaacaggagtaaacatcggactgataagtacgcccgccatcgggaatccgttgcctatgcctttggccacggtgatgatgtcggccttgataccgttgtactgatgggcgaagaacttgccgctacgtccgtaaccgctttggatttcgtccagaatcagtaccgtattgtgctctgtacaggccttgcgcaaggcttgcataaactcgtcggtgggcaactgtatgccgcctactccctgaatgccttcgatgattacagcgcatacatcgcctttcgccagttcggctttcattgcctctgtatcattcagcgggagataggtaacgtgtccgcagttgttgatgggagcaatgattttgggattgtcggttgcctctaccgccaatgaagtacgtccgtggaaagctttcgagaaggataccacgcgagttcgtccgttatggaacgaagcgagcttcaacgcgttttcgttggcttcggctccgctgttgataaggaaaagggaataatcattgtatccgcagacctttcccaaccgttctgccagttgctgttgcagttcgttgataacggagttagaatagaatccaagcgtggctacttgcttgccgagcatctctacatagtgcggatgtgcatgtccgatagagattactgcatgaccgccatagaggtcgaggtactccgtacctttatcgtcccatacatggcagccttttcctttgacaatattgatgtcaaaaaggggatatacatcgaatagtttcattctttcagtaactgattacaaattaaagatactttagaaagcactgggtttcagtctcaaaccgacagtctcttccagattgaacatcaggttcatgttgtgtacggcctgtccgctggctcctttcagcaggttgtctatgcaggagatgataaggagcttgtcgccatgcttttccaaatggataaggcatttgttggtgttgacaacctgcttcaaatcgatgttcttgccgacgatatgcgtgaaggagtctttggcataatactcttcatacatgcggacaatctcttccaacgccactttggtctttatcacgatagtggtaaaaatgccgcggggaaaatcaccacgataggggatgaaatcgatgtccgaatcgaaactgttctggagctgtttgagcgattgcttgatttcgggcacgtgctggtgctcgaaagccttgtacacactcaggttgttgttgcgccagctgaagtggctcgtagctcccggcttgacgcccgcaccggtgctgccggtgatggcattcaccataatatcgccgttcagcatcagatgcttggcaagcggaagcaggcccaactggatgcaggtggcgaagcagccggggttggcaacatgctttgccgtgcaggtggcacggcggttcagctcgggaaggccgtagatgaagtcatggtcgtcgctcttgatgcgatagtccatggagaggtcgattatcttcaggtcttccggtacgttgtggctttccatgaattttctggtgtcgccatgcgccgtgcagaagaaaagcacatcgatttcgtccaacggaagttcgtcggtaaacgttaaatccgtctctccgtacaacccttcgtgtacgtcggttattttgttgccggcattgctcgagctgtttacgaatacgatttccgcttcgggatggttcagtaacaggcgtatcagttcgcctgccgtgtatccggctccgccgatgattcctactttaatcatgttgataatatctattgggttcttctggtattataactaatagtatgatatatataagcgtacctgcaaacgcagtgaagatcgtagcaaaaacgtagatgatgcgtaccagtgacacgtcgagtccgaaaaagtttgccagtcctgcacatacgccggaaagcattcttccgtttcgggggcgcgttaatttttgcttccggttcatcatttagatttcttcgtctttgtggtttgagtaataggcacgcagtgcggtagaagtcaccttgatgaagcctttggcgtcttccgcagtccagcctttctgcatttcaccgtattcgccgaatttattctttacaaggtcgtcgtcgctttccacgcctacggtagagaaacagagcggatgaagttcgagaatcgcagtaccgtttacattgcgttgcgaagactccagcatggcttcgatgtcgcgcattaccggttccagatactggctttcgtgcaggaacataccgtaccagttggctacctggtctttccagtattgctgccatttgcttaatgtgtatttctcaaggaacttgtgtgcgccgataatcagcatgggagcggctgcttcgaaacctacgcggcccttgataccgataatcgtgtcgcctacgtgcatatcgcggccgatgccgtaagccgcaccgatttcctctaccttctggatagccttgatggggtcgtcgaatttttcatcgttgaccgctttaagctcacccttctcgaaggtcaggcgcaactgttcgctgccttctttcgtgcaatgtttcagataggcgctttcgggaagtccctgtgcggaatccagaatttcaccgccgcaaatggaagtaccccacagacctacgttataggaatatttcagtttggcgaagtcggctgcaaagccgtgcttgttcagataatctatctcttcctggcggctcaaagccatgtcgcgtgtcagcgtgatgatttccacgcccggagccatgacaaggaaagtcatgtcgaaacgaatctggtcgttacccgcaccggtcgaaccatgtgcaatggcgtctgcgccgatttcgttggcgtagcgtgcaatggccagcgcctggaatatacgttcggagcttacggaaataggataagtaccgttacgcaatacgttgccgaataccatgtatttcaagctcttttcgtaatattcctgcgttacgtccaaagtaatatattttacagcacccagtttgtaggcgttctcttcgtttgtcttcagctgttcggggctgaaaccgccggtattggcacaagccgcatatacctcgtatcctttctctttggccagatacataactgtgaatgaggtgtccagaccaccgctgaatgcaactactacttttttcttcttttccataatacttatgaattttgaatgttgaattataaattgggaatcaggcttgtaaacgagtctgtgtgttcccattcataattcaaaatctataattaattatattttatcttcctcgtgtaacttcgggtcgtaaagcattgccgtgcaaatgcagaacttccggtttttggctaccagtatgtcatggttgatacagccctcgcagcctttccagaaagcctcgtcgtctgtcagttcattgaaagtaaccggtacgtagcccagttcggtattcattttcataacggccgctccgctggtcagactgaatatcttggctttgggccaccgcaggcgtgccaggcggaaagaagccgtcttgatacgtttggccagtcccaagccgcggtaatcgggatgtacgatgaggcccgatgttgccacgtactgcttgtttccccagctttctatgtaggtgaaacctgcaaattcgtctccacataaagctatgatagcttttccttctttcattttagtcgccacatattcgtgtgtgcgttctgcgatgcccgttccgcgcaccttggcagcttctcggatggtatccaaaatcttatccacgtaaacttcatgtgaggcgtcggccaccatcacatcaatctgtttcgaatccatttcttttatttcgttatatattcgttgtaatatagttgtacaggtttactttatgttaggaatgatttgtgacagaaacatacgcacctcttcgtgggatgcagcctcgtgcagaaccatcatgatcgtgtcgtcgccggcaatggtgcccagtacggcgggacattcgcggttgtcgatgtcataagccatgctgctggcatagccgggccgggtgcggatgacggcaatgttcttggagaaatggagggaaatgaagccgctggtcatcagcatttcgcttgcgctctggtcgttgctgcgcttgtacatgatgttgttgggaagaacatatacatatttcccgttcatgttggccgctttggctactttcaactgtttcaagtcgcgtgacaaggtggcttgtgtcagctcaaagccctctttgtccaaagcctgcaacagctcttcctgagaactgatgtctttgcttgagataatcatcttgatggcatctaaccgattggctttctttttcatgtttctgtataattattcttaagttggtgcaaaagtagggaatattttggaaagaatatacagaaatgggatttttttattctttaatatgcaaaaaacgtaaaaaagacggtatatgtatgcaggtttggaatataattaaaagccttttatcggaaatcttttaattatatctttgcgacaacttcagacaggtagcctgaaaaactcagtgtggggtaagtgcaagctgtctgcgtgcggtttatctctggctgccgtaagagaaacggcaagtataaccgtgtcttgggcggggtggagtaggtgataaacgacaaaaacaataagagaactgccaaaaggctcagagtccgtttgccgtgaagctcttatttttgcaatacagaataaagttcatttcttaattctattaaaactatcaaaggcacatgaaaaaactacttggattaatttcctttcttttagtattggcaggttccgtttctgccaaagtggtacttccggctatcttttccgacaatatggtattgcagcaaaacgcgcaagtcaatctgtggggaaaggcaacgcccggtgaacgggtttcggtaaaagcgtcatggacggataaaaccgtgacaaccaaggctgcggctgacggcaaatggactgtgaagctgaaaacgcctgcggctgcaaaagggcagtctgttacggtgagcggtgagaatacgattactattaataatgtactggtaggtgaagtatggctctgtaccggacaatccaatatggaatatccggtttccaggcatcccgataaaaaatggatgaccggtatgacaacggaagccgaggagatgaaggacgcggattatccggaacttcgtctgttccgggtggaacatcagttggctcccgacggtgaaaaggatgactgtcaaggccggtggctggtgtgcacgccgaaaaacctgtatgacttctcggctgtgggattcgttttcggacgccggttgcataaggaattgaatgtgccggtaggtatgatacagtctacatggggaggcacgcatgcggaatcgtggacgaaaatgagtgttatgaagaacaatccgctctatgcagatgtacttgaagattttgctttgaagaatgtgaagcaggagaagggatattgcaaggtccccgctacgctttggaacggtatgattcatcctattctgggatatacggtgaaaggaaatatctggtatcagggagaatcgaatgccattcgtcatgaaaaatatcagcaggtattcaccaatatgattaacagttggcggaaagaatggaagcaacccgacatgccgttctatttcatgcagattgctccgcataaaggacagccggccggtattcgtgaagcacagctcaagacatggcaaagcgggctgaagaatgtgggcatggcggttgttacggatgcggcggattctacggatattcatccgcgtaataagcgcgtggcgggtgaacgcatggctttgtgggcgcttgccaaacaatatgggaaggatgtggcatactccggcccgctcttcaaaacgatgaaagtcagcggcaataaggctgtattgagttttgaatatgccgaagacggtttgatgacacctgagaatgctccggtcaagggctttctggttgcgggagccgaccggcgtttctatccggcggtggctgtgataaaaggcagccggctggaagtttccgctccgcaggtagcggagccggttgccgtacgttacggcttttgtaacttcttccgtgtaaatctttataataagtcgggtttgcccgcagtgcctttccgtacggatacatgggaacaaggctcgtatgcgcgttggtttgccgactccgagatgatgcgtttcccgcaggcttaccggttggatcacggcaagcgtctgttcttcggttatgcccagggagtgggttgctgcgccatgttgcagatgtggaagacaacgggcgaacgtcgttattatgattatgtgaagcaatgggccgactctctgattaatgaaaagggggaaattcatctgtatgataagtccacttataacctggatttcattaactccggaaaggtgctgtttgacctttaccgtgaaaccggcgaccaacgatataaagcggcaatggatatccttatcaaacagttgaagaaccagccccgtactttggaaggcggattctggcataaactgatttatcagcatcagatgtggctggacggactgtatatggcttctccgtttatggcgcagtatggtgcggaattcaataaaccggaatggattgatgaggcggtgaagcagttccgtctctgtcataaacatacctatgatgccaagacaggactgtatcatcatgcgtgggacgaaagcaagagccagcgttgggcgaacccggaaaccggacattctcccaacttctgggggcgcagtataggctggtggtttatggcgctggtagatgccttggattatatacccgaaaatcatccgggacgtgccgacatgattggctatatccgcggattggcggagacattgccgaaatatcaggataaggcgggactttggtatcaggttatcgaccaacctaaacgcaagggtaatttccctgaggcatccgtgactacccaatgtatgtatgcttatgcaaaagcagtgaataaaggatatatcgatgccagataccgcgctgtagcggaaaaggctctgcagggcttgaaagataaattgctggtggagaaacaggacggaacgctgactctgacccgttgttgccaggttggcggtttgggtggtcatccgtatcgcgacggaagttttgaatattacataggtgaaaagatgagggataatgacgccaaagcaacgggaccgttcattatgggatgtctggaactggagaaaataaaataggtatgaatcgattgttttgtattgccatgtttgcattttgtgcaggttttttgtctgcacaagatgtttcgtggccggagattggtttggatgccaaaccggctgcacgctggtggtggatgggaagtgcggtggataaggaaaacctgacccgtaatctggaagcatatgctgcggcgggaatgggtacgatggagattactccgatttatggcgtacagggaaatgatgcgaaggatattccgtttctctccccccgatggatgcagatgctgcaatatacggaaagtgaagcgtcccgtctgggcatgcagattgatatgaacaccggtaccggctggcctttcggaggccctgaagtggggatagaggatgccgcctgcaaactgtttgttacggaatatcggttagaaggcgggaatacgcttgatcagagaatagaggttgccgataaaaaacaaaagccttatgccaaactggagcgtctgatggccttttccgatacggggaagtgtctggatttgacggataaggtaaaagacggaatgttatgctggaaagctccgaaagggagctggcgtttgattgccgccttttgcggcaagactttgcagaaggtgaagcgtgcggcacccggcggtgaggggtatgtgatgaatcatttctcggcccgtgccgtgaaaaactatctcggacgctttgaatgcgcttttgacggaaagttcaaggatacggcaggtggtgctacagcttatccccataatttctttaacgactcctatgaggtttacggggcggactggtcggaagaactttttgatgagtttctggcgcgtcgcggttataaactggaagaacacctgccggagtttctggcggcaggggagcgttcggacaagacccggcgcatcatctccgattatcgtgaaactctcggtgaactgttgcaggagaatttcacccgtcagtggacggagtgggcacatcggcacggggctaaaaccagaaatcaggctcatggctcgccgggaaatctgatagacctttatgccacagtggatattccggagtgcgaaggtttcggtttgtctgatttcggtatacggggattgcgtaaggattcgctgacgcgtcccaatgattccgacctctccatgttgaaatacgcatcttcgggcgctcatattgccggtaaaccttatacttcttcagaaacttttacttggctgacggaacatttccgcacttctctgtcacagtgcaagccggatatcgacctcatgttcgtttccggcgtcaatcatacttttttccatggtacgacttattctcctgctgaggctgcctggcccggctggaagttttatgctacggtggatatgagtccgacgaacagcatctggcgtgatgcgcctgctttctttcaatacatatcccgttgccagagttttttgcagatgggacagccggataatgacttccttgtgtatttgccggtatatgatatgtggcaggagcaggacggacgtctgctgatgtttgatattcataaaatggcacggcgtgctccgggctttataaaagcggtgcaccgcattaacgatgccggttatgatatggattatatttccgataacttcattcgtacggccacctgccgtgataagaaaattgtgacgtcaggcggaacagtttataaagcattggttgttcccggtgcacgtttaatgcctgcggacgtacttgcccgcctgctcgaattggcaaaagagggagcgaccgttgtgtttctggaccggtatccggaggatgttccggggtatgccaggttggagcagcgccgtacggactttaagggtactctggagcaggtaaagaaattaggaaataaacaaggtaaaggtaagacggtgttcttcggtacggattatgtccgtacactggcgcagactgctgctataccggaagcgatgaaaacttcttttgatttgagttgtatccgtcggaagaacccggaaggttatcattatttcatttccgcactgaccggaaaagatacggaaagttggataccgttggctgtgcctgcacgttcggccatgctttataatccgatgaacggtgtttccggcaaggctcgtttgcgtcagaaggatggaaagacggaagtttatttgcaattggcttccggagaatctgccatattgaaaacttttacggaagttgacgtacaagctccggaatggaagtatcagactgctgcacggggagctgtcgaactgtccggcttatggaacctgcggtttgtggaaagcgttcctgcggtacatagtgtgccggattccgttgctttgggctcatggacggatttatcctttgaaggtgctaaaacgacgatgggaacaggctgttatacaaccacttttgtgattgaaaatccggcctcggcccaggactggttactctcacttggcgatgtccgtgaaagtgcccgtgtacgtatcaatggccggaatgttgccactttatgggctgtgccctattgttgctccgtcgggcaatacctgtgtccgggaaagaatactctggaaatagaagtaaccaatctttctgccaatcgcatagccgatatggatcgccgtggagtgaagtggcgcatcttcaaagatataaatattgcagcgcttggttataaaaaagggacttatgccggttgggaacctgtgccaagcggattattaggccctgtacgtattataccactgaagataactaaaaacgaaatgcaatgaaaaaaatcagtctgggcggagtagcgcttgtttgcgctttctgctccttatatgctcaagacccgcgtgaacgaaactatttctatgaaatccttgatcctaagcatgaaccgaaaccgttggtagagggatttgcccaagagcggattactgaaaatttaaatcgcggactggcggttgccccttcccgggacagcaaatccgtgtatctcagctggcgtttgctggcatcggatgctcccgccacggctttccatgtatatcgtgaggtgggcggaaaggcttgccgcctgacgaaaaaggccgtttcccgtacttgtgactttgtggacaccgctcctcatgcacaagccgtctattgggtggaagctgttgtcaaaggacagaagccggttgtatcggaaaaacggaaggtcgtgttatccgatttgaagccttatacatctatccgcttgaaagataatgcaaaagcaggaaagatagcattggccgacctgaacggggacggaacttatgattatatcgtccgtactcccgaaacgaacgtagatccgggcatgccgggtgatactaccgggaaaacgtataaaatatccgcttatttgagtgacggtacttacctatggacatacgatatgggaccggggattgaaccgggtatctggtactcgcctttcatcgtatacgatttcaatggtgacggtaaggctgaggtggcgattaaaacagcgggtactgactatgtgaaaaacgagaaaggacgtgtttgcggcgggagtgaatatctttccgtactggacggcatgaccggacaggagatagaccgggtggattggcctgagcgcaatgaccgttacggaaatctgattcgtcagaatcgtaaccagatgggggttgcctatttagacggaaagaccccgtttatattggcggcacgcggcacttacaagctgatggttgtggatgcctggatgttgaaaaacggtaaattggaacgtgcatggcgttgggatggtgatgaggagaatcctattgtccgcagtatgggtgcgcacagcatggttactgccgatgtggacggtgacggccgtgatgaggttatgttaggttcctgtatgcttgatgataacggaacacttttgtggtcttcgggcttgggacatagcgacaaggcatatctttgcaagttgcatcccgatagggaaggcatgcaggtgtttatggtaagtgaacccaaaaaggaggatggccgtggtgtttcagtagtggatgcggctacgggtaaattgatatggagcatcggtcatactacttatcatgtaggtgacggtatggtaacggattttgatcctgctcatcccggtttggagtgttttgccagcgaagaccgtaagggggggagtaccgacagatatttgcttactgccgacgggaagaaactgcaagtagctcaagatgagatacccggctgccgtaactggatatggtgggatgctgatttgttgcgtgagacatttaaaggagacaataaccgttggggagcaggctcctcttccggtggacgtagtcagagcatctggaaatggaaaggtgagatattgacggaaaatatcaagggggatatattactgatggctgatatggaaggtgactggcgcgaggaactgataacggctttgcccggcgaactgcgtatttaccgcaccgatattcctgcgacagaccgtagggtaacgttgatgcaggacgctttgtaccgtagttatgtggctcatcgtagtatggggtatcctcaagcacccgtaccgtcttattatttaggagataattaatacatgtatcggaataagatgttccggtatgtttgctaactttaaaacgctattaagaatgacaaaaccattgtatgtaattgctgctgtttgtttatggatattcagttcttgccagtctacggactataaatatgaagctgtctatcgtaacctgccttttgacatgcctcgtgtggaagcgccgagatttcccgaccgtacggtcaatctgaaagagtttaatgccgtcggtaatggggaaactctatgtacatcggcttttgccgatgcaatcaatgccctttccgaacaagggggaggacatcttgttgttcctgccggtgtttggcttacaggaccaatcgtattgaaaagcaatattgacttgcatttggaaaaaggggctgttatccttttctctcctgatgtggacctctatcctttggtggaaacagtatttgaggggttggatacccgtcgttgccagtctccgatttccggccgtaacctggaaaatgtagctataaccggcgaaggggcaattgacggaaacggtcattactggcgtccgttgaagcgtgagaaggttacggagagcgtctggaagcagacaacagcccgtggcggtgtatataaacgtcctacctactggttcccttatcctgaaactttgaaaggggatactatcagcaatatgaatgtcccccagaatctgaaaacggaggaagagtggcaaagtgtccgtcatttccttcgtccggtgatggtgagtctgatagagtgtaagaatgtgtggttgcaaggggtgattttccagaactctccggcatggaacctgcatccgctgatgtgtgagaatgtgctggttgaagatgtgcaggtgcgtaatccgagctatgcgcagaacggtgacggactggatttggaatcttgtaaaaacgcgctgattgtgaattctacctttgatgtgggagatgacggaatctgtctgaaaagcggtaaggatgaagatggccgccgtcgtgcacgtccttgcgaaaatgtagtggtagatggctgcacggtatttaaaggccatggcggtttcgttgtcggcagtgagatgagtggcggggtacgtaatgtatccgtcagcaattgccagttcctgggaacggatgtgggactgcgttttaagagcaagcgtggtcgtggcggtattgttgaaaatatatggattaccaatgtgtctatgatggatattccgaccgaaccgattactttcaatctttattatggtggaaaatctgccgttgaagtgttggagagcggtgaaaaagttccggctaaagtagatcctcttcctgtggatgaaacaactccttgtttccggaatattcatgtgaagaatttggtatgcgcaggcgcccgtcgtgcattgttcttcaacggtatcccggaaatgccgattgaaaatgtggttttggaagatgttgatataacttcccgattgggagccgaatttgtttatagcaaggccgttacgatgaagaacgtaaccatccggaatacggaaggcgagcaaattgtcacccgtttttgtgaggatgtgaaatagaagaccggatgtggtaatagcggatgaaacggattgtcaaatctgacaccctttcagtcaaaataagtacaaggaataggggatgattcccctatttttgtatcatgaaatagcgactaaaactaattaccatgaaacaatgtttttttgcggtcgatttgggagctaccagcggccgtaccatcttgggaactttcacaccggaaggattggaaatggaagatgtgaatcggttcccgaatcatctgattgaaaccggcggacatttttattgggatatatatgagctttaccggcatattatcgaaggactgaaaatagtcgctcagaagaaggatgtggaaattacttccatcggtattgatacatggggagtggattttgtctgtgtaggtaaagacggcggatttcttcgtcagccttattcgtaccgtgatcctcatacagccggagcgcctgaggctttctttaaaaaggttgcccgcaagcaggtctatgagtggacgggtattcaagtgatgaatttcaactctttgttccagcttgatacattgagacgtaataatgacagtgcattggccgctgccgataaattgctttttataccggatgctttgagttatatgctgaccggtgaaatggtaacggaatataccattgccagtacggcgcagttggtcaatgcaaacacccgtaaaccggaagatgctttattgcgcgaactcggactgacggaaagtaatttcggccgttttgtttatcccggtgagaaaataggaacattgacaaaggaagtacagcgcatgaccggattgggagatatacctgtaatcgcagttgccgggcatgatacggcttctgctgtggcttcggttcctgcaatgaatcctgattttgcctatctgagcagcggaacctggtctttaatgggagtggaaacgaaggggccggttattacagaggaaaccgaatctttgaattttacgaatgaaggcggtgtggatgacactatccgtctattgaaaaatatttgtgggatgtggctgttggaacgctgccgtgcggcgtggggacagacatcttatccggaactgatagccgaagcgaatgccagtgagccgttccgcagtctgattaatcctgatgatgtcctgtttgctaatcctgccgatatggaacaggctatacagacgttctgttcggattctcatcagcctgttccgcagacacgggggcaaattgtacgttgtatctttgagagccttgctctgcgctatcgtcaggttttggataatcttcgcactctttctcctcatccgatagagacacttcacgttattggcggaggaagccgtaatgaattattgaaccgttggacagccaatgctgtcggtattcctgttgtggcgggcccgtctgaggctacggcaatcggtaatatcatgattcaggcattggcggcgggaatggcaaaggatattgcttccatgcgccagttaatcaatcgttctatttctttggaaactttctatccggaagatacggacgtgtgggatgccgcatatttacacttcaaacaggtgacaatgaatcattaatgtttaaaatcatattaaataaatcagtatcatgaaagaagaattaataacaaaggcttatgaagtggcaaaggaacgttatgctgctcttgggatagatgtggaaaaggtaatggaacagctccagaaggttgcaatctccatgcactgctggcaggccgatgatgttatcggctttgagtcgggcagctcgctgaccggcggtatccagactacaggtaattatcccggtaaggcccgtaatatggaagaattgcgtagcgacatcttaaaggccgcttcttatataccgggcaaacatcgcttgaatctgcatgaaatttacggtgatttcggcggtacgtttgttgaccgtgaccaggtggaagtgaaacattttgaaagctggatgcaatgggcggctgaaaacgggatgaaactggatttcaactcgacttctttctcacatcctaaaagcggtaacttgtctttagccaatccggataaaggcatccgtgatttctggattgaacataccaagcgctgccgtgccattgcggaagagatgggacgccgtcagggcgatccttgcatcatgaatctttgggtacacgacggtagcaaggatgttacggtaaaccgtatgaaataccgtgaactgtttaaagactctctcgaccggatttttgctacggaatataaaaatatgaaggactgtctggaatctaaagtattcggtatcggtctggaaagctatacagtgggctctaatgaattctgtgtaggttatagcgtgcaacaccagaaactgataacaatcgatacgggtcacttccatcctacggagagtgctgctgataaagtttcgtccatgttgctgttcgtacccgaactgatgcttcatgtaagtcgtccgatacgttgggattccgaccatgtgactattatggatgacccgactctcgaactcttccaggagattgtccgttgcaatgccttggaccgtgtacacatcggtcttgattatttcgatgcttccatcaaccgtataggcgcttatgtcatcggtacccgtgccgcacagaaatgtatgttgcgggcattgctggaaccgttggctaaacttcgcgagtatgaggctgccggtcagggcttccagcgtcttgccctgttggaagaagctaaagctttgccttggaatgccgtttgggatatgttctgtttgaagaataatgttccggtaggtgaagaattcattgctgaaatagaaaaatacgaagctgaggttacatccagacgtaactaagtttatcagagttagtgatagtgtttagcggggaaagcatatctttgcccgctactttcattactcatagaacattaaccgttgattatcatgaatacactaataggattattaattatcgctgtgggaagctttgggcagagcagctcgtatgtacctatcaataaagtcaaaggttggtcctgggaaaacttctggttggtacagggcatttttgcctggcttgtttttccgctgctcggcgctttacttgccattcctgccgatggcagcctgatagaactttggggagccggtggtgcattgccggctattatttacggtgtcctttggggtgtcggcggtctgacattcggattgagtatgcgctatttgggcgttgctttaggacaaagtatagctttgggtacctgtgccggtttcggaaccctgttcccggctctgtttgcagggaaagatttgctgcacggtgacggtctgatgctccttattggtgtttgcatcactttggcgggaattgccattatcggttatgcgggcagcctacgctccagaaatatgagtgaggaggaaaaaaaggctgccgtgaaagattttgcgttgacaaaagggttgctggttgctttgctggcaggtgtgatgagtgcctgttttgccctcggcctggatgccggaacgcctattaaggaggcggcgctggcaggtggggtggctccgttgtatgccggacttcctgttatctttctggtaactttgggcgggttctgtacgaatgcggcttattgtatccagcaaaatataaagaataggacgggtaaggagtatttgtcggtcagcggcgatgtccttgtgaataatgttttgttctgtgctcttgccggagtattatggtattcgcaattcttcggtctggaaatgggtaagagttttttaggcggcagtccgatattgcttgcattttcctggagtatactgatgtcgctgaatgttacattcagtaatgtctggggaatcctgctgaaagaatggaaggggtgcggttcccgtacaataggcgtattaatattgggattggccgttctcatcgcttctattattgtagtggcgatggcgcaagcataaaaataatatctaataaactgtaattaaatagacacatgaaatcaattcttgaaaatcgtcccgaattggcttatgaagtcaatcaagcggcagaagtggccggttatctttggcaaaaaggttgggcagaacgtaatggtggtaatataactttaaacatcactgaatatgtagatgatgaaatccgggctttgccggctatcagcgaagtaaaacagataggaaaagtactcccttatctgaaaggtggttatttttattgtaaaggtactcagatgcgtatgcgtgatttggcacgttggcctatggcaaacggttcaatcatccgtattctggatgactgtgccagctacgtaattatagcagaccagcctgtaatgcctacatcggaattgccttctcatcttgccgtgcataattatctgcttgaaaaaggctctccttacagagcatctttgcatacacatcctatcgaattgattgctatgacccataacaagaagttcctggagaaggatgtggctaccaatctgctttggagtatgattccggaaacaaaggcgttctgtcctcgtggattgggtataattccttatgaattgccaagttcggtaaaattggctgacgctactattgaggctttgaacgattatgatgtagctatgtgggaaaagcatggagtctttgctgtagatgtggatattatgtctgcttttgaccaggtagatgtgttgaataaatctgcactgatttacattgcagctaaaaatatgggctttgaaccggacggaatgagtcaggaacaaatgaaagagatgactgtggcttttaatttacccaaataaaagtgaagtatatgtacagaatgatattgaacgaaacctcttatttcggagcaggctgtcggaaaacaattgcggtggaagccatgcgtagaggttttaagaaagcgttctttgtgacagataaagacctgatccgttttaaagtcgcagacaaaataattgaagtttttgaaaagaatcgtattccttatgagcttttcagtgatgtaaaggcaaatccgacgattgcgaacgtacagaatggcgtatccgcttttaaagcatccggtgctgattttattgtagcgctgggcggtggctcttccattgatacggcaaaaggtatcggcattgttgtgaataatccggattttgcagatgtgaagtcattggagggtgtagctgcaacccgtcataaggctgtcccgacttttgcattgcctacaacggctggaacagctgctgaagtcactatcaattatgtgataatagatgaagatgcaaagaagaagatggtctgcgtagaccctaatgatattccggttgtggcgattgtagacccggaactgatgtattccatgccgaaagggctgactgctgcaacaggaatggacgctttgacgcatgccattgaaagctatataacaccgggcgcctgggcgatgtccgatatgtttgagttgaaagccatcgaaatgattgccgctaatctgaaagctgcggtagacgatggcaataatgtcgcagctcgcgaagcgatgtcacaggctcagtacattgccggtatgggattcagtaatgtaggtttgggtattgttcattccatggcgcatccgttgggcgctcattatgatactccgcatggggttgccaatgcattgctgttgccctatgtgatggaatataatgcagagtctccggctgcccccaaatatcttcatatagctaaagctatgggagtagatacggtgggtatgaccgaggcagaaggagtgcgtgcggctgtggatgcagtccggaagctgtcattgagcattggcattcctcaaaagctacatgagataaatgtaaaagaggaagacttgcatcaattggctgttgatgccttcaatgacgtttgtacgggcggtaatcctcgtcctacttctgtcgaagatattgagactttgtatcgtaaagctttttaattataatttgaattaccatgaagaaaactattatttcatgtgtgctgtttttaacagctgtcactgctttttcgcagacaccaatgaagacggcagctgaagctaaactttcggcttctgaccttgctgtgaaaatagcagaccgtatccttgcaactactacttatgagtttaagaataccaagaccggtaaaacctataagtctgtcaagaacttgcctttggatatgaatgtcaaggttgcatgtaaatacaataattggcattataccaatggagtaacccatatcgctttaatggaattggccgataaaacgggagcgaagaagtatgatgattatgttcttaaaaatatgaatttcgtatttaacgagggtaatcttgacttctttaagaaacagtatgatcaggcaatgaaaaatgaaggatggtatggcgttcgtaaattgagttggcacatgatattccgtggaaagcgtttggatgataacggccctatgggagccagcctgattgacctgcagatgaagcatccgaataattctttcttgaattatattaatgaaacagccgagcacttgaactatggcgagcctcgtttggctgacggtactattgcccgtatctggcctcatgaaaataccatctgggctgatgatgctttcatggctatctctttccttgcacgtatggctaagatgaccggtgacatgagttatatcaatgatgctgccaatcaggtaatcaaatatcacaaatatttgtggtgtcctgaaaaacggattctctatcattgctatcatacggatacggacgagcacggtgttgctcattggagtcgtgccaacggttgggttttcatggcaactgccgatttgcttgcagtgatgccgcagaatcatcctatgcgtcctgaggttctggagtgcttccgccgtcaatgtagcggtgtagtgcgttatcagggtaagaacggtctttggcatcagcttcttgataaggaagattcctatgaggaaattacgggtacagccatgtttgtttttggtatcgcacgtggtgtaaagcatggttggctgcatcctgatttcatttatgctgccgagcaggggctgaaaggaatgatgacactgatgtccgacaaaggcgatgtgactaaaatctgtgtcggaacgggtatcatgccgtcgcctgcatactactacaaccgtcctacccaagagaatgatccgatgggtgaaggacctgttctccgcgcattgattgaaatgatggatgcgccgaagtatacagagattaaggctgaacagcaatacgataaaattgtagtcaaaaagtaataatccttttagatagtatgttaatcccgtctggaaacacaaagatacttccagacgggactttttttattaaatcttccataggtatctcttatttcacaaatatttcctatttttgtcccgaacccatcatgaaggacacgtggtatgactaagaattacaatgatttaggagtggaatttaagtaccttatcgtaaatgacatggaccaaaagtttggtctgtgggtaaatactgtcggctttcaatccattcagccggactctccgtatccattgaaggatcatccttccggctatttctttaatgcccagaaaggacgtgtcttgcgtgagtatcaattggtttatatcacgaaaggacggggtttgttttcctcggaaacaacgccggaaaagcaggtatgcaaaggacgtctaatggtattgtttcccggtcaatggcatacttatcacccttatcgccaaaccggatggaacgaatattatatcggttttgaaggtcctgtcattgataatttggtgaaaggcggtttcttgtctaaagacaatcaagtgcttgaggtgggtttgaatgaggagttggtgtctcttttttcccgtgctttggaaatagcggaagcggataaaatatcttcccaacagtatcttggcggtatagtgctgcacatagtaggtatgatactgtccatttctaaaaataaaatttttgaggtgggcgatgttgatcagaagattgaacaggccaagattataatgaatgagaatgtctttaaggatattgatcctgaagagttggctatgaaattgaatatcagctattcctggttccggaaagtattcaaggactatacaggttatgcaccggctaaatatttccaggaattgaagttgcgtaaagccaaacaattattggttggtacttctcattccgttaaagagatttcttttatgctcgattataagtctaccgaacatttcttttcattatttaaaaaacgcacagggtttaccccattggaatatcgttcttttggtcgggagactgaggtggagaacgaggattttgattaatgtcaaaatgaatagtctactatcaaaattgttataaaaactttgattgtcagcttcttattatttataaagttccttttttcttaagagaaagtcaaaaaggatagtatttgtatcagtaggtgtattttgttaagtttgtctatatttaactttgcattcataagctctgtgtccgataacagttgcatcggacggttaatcttgaattaattaatcaaccaatttatattaatagtctatgagaattttacacaaaaagttatgcttgttaatgcttcttttaataagctgtcatctaaacattcttgcacaaggcaaaattattacgggtgtcatattagacaaaacgggtgaaacagttatcggtgcgagtgttttagtgaaaggaactactaatggtactatcacagatgttgatggtaactttactcttaacaatgttcaggaaaatgctgtcctacaagttagtttcgttggttataaaactcaggatattgctttgaaaggacaaagcaatgtaaaagtgactttggaagaagatacggaagttcttgatgaagttgttgttattggttacggttctgtgaagaaaagtactttgacgggggctgtggcaaaaatggatactaaaggaattcaagatcgtcctttggcgcgtccagaaacagctttgcaagggcaattggctggagtaacggtacgtactactaccggtgaacctggtgctgatatgcaaattcgtgtacgtggtgctgcttcggtaaatgctaactccgatcctctttatgtagttgatggtgttcctatgactactttaagtggaataaatccggcagatattgcttctattgaagttttgaaagatgcggcttctgcagctatttatggttctcgtggctcaaatggtgtagttattgtgacaacgcagaaaggaaaaacaggtaaaccaaaagtttcttttaatgctagcgttggttttcaaactttggaaaagaaaatagatttactgagtgctacagaatggatggagttcagaacaagatggaatgatgcttattatttatctgaagctcaaaagaaaggaatcactaatgctagtatccgcgatgataatgccacgcgtttggcaaatgtaggagttaaggctggtacagataacgcttatttgtatattcttgatgaccgttggtttaattatttaagtcaagatatgagagattcccatacctatactccaacttcggaaagccttagtctgttggattggcaagatgaagtttatcgtaccgctattgtacaggattatagtttgaatgtgtccggtgctactgataatgtcagctatttattttctggtggttatatgaaccaagagggattagctacaggaactggctataagcgtttttctttccgtgcaaatgtagagtcaaaaataaataaatatctttctattggaatgaatttagctccaacttatattgtaacagacggctcgggacgtgctaatggtaaggattcgcaagctcataaaacgctttcttctgctccggtttcagaaccgggtgtcggatatatgacttacgtacaacctaacggccgttacggatgggcagatacaacttcaagtccaagttatattttgaatacggatattagccaaaatcgtacattacgtatggtcggtaatgctttcttacgtatcactccatttcaggattttcgagttgaattgtctgctgcagcaaattattatgatttggatggaaacaaatattctttttcaagttcaggcaaaggttgggcaaagggtgaaggccaatcttcttcgggtagccactctacaagtcgtatttggaatactttattacaagctgtagctaattatgatcatacattcaataagcatggagtaagcgctatgctcggtttttcgtcagaacaatcttctttaggatataaaacagaacaaggtttcaaagctccttttcccaatgatgccattacaggttcgtttgatggttcaaaggttgccgctggaactaatacagtaacagaacagacacctaataaattattatctacatttggtcgtttgcagtataattatgatgaacgttatatgctttcgggtagtttgcgttttgatggaggttctgttttcggagttaataataaatggggtgtattccctgcaatatccggtggttggattatatctaatgagaaattctttaagaattgggatcaaaaatggtggaatacattgaaaattagagctagttatggtgtgacaggtaataattctatcagtaatacagctgcttatgcaactttgacttcttccgtctatgggggagctgcaggttattatactagtagtttgggtaatgctgatttaggttgggagaaaactcatagtacggatattgcagtggacttgggctttttgaataaccgtattcaattgtcattggattggtatacaaaaaatacgaccgacttattatatcaagttcccgtagaaggtgcttctggtttcagcactatttgggataatttaggtgatattcataatgaaggttttgaaatagagttgaatacgcataatttgacagggaattttaaatgggatacttcatttaatatgtcgtataataagaatgaagtaaagaagttgggtacggataatactcctatttattctggattctccggaagcaattactcaaatatattgactgtgggtaaagctgtcaatacgtactatatgtacgatgctattggagtatggaaaaatcaagctgagattgatgcttatagtgcagctcataatggacaacccgttacatttgaaggtaaacagattcaaccgggtgatatccgttatagagatgtcaataatgatggtaaatatgataaggataatgatagagactatttgggaagtccaacacctaaatttgtatttggtatgactaatagattctcttataagaattttgatttatcaatcttattaacagcacaaactggaggtaaaatttatggtatcttgggacgtgctatagaccgtccaagtatgggagctaaatctaatataatggggcattggagagatgcatggtggtctgaagatgaaccaggcaacggatcggttccttatattttgagtcaaacaactggcactacgctggattccagatggttatattcttctaattatttgcgtattaagaatcttactctgggatataagttaccgattaatcctaaatttatatcatatgcacgtgtatatttgtctattgagaatctagccaaatgggatagttattatggtgggtattctccagaagctgccaatgtgggctcaggtcctggaggagcaagtgcacttggactggattatggtggttatcctaatgctcgtacatttacttttggtataaatgttaatttttaatccttaatacaaagaactatgcttaaacttaaaaatataatatggctggctgcgctggtcgtgactatctcctcgtgtgatgattatttggatactccacctgtagataaaataacttcagatggattttatcaaactcaagctcaatcggagcaaggtattttaggcatttatgcggatttgcgccaagcatctaattgcatgtattggtttatgtctgaatgtcgttcagatgttgcgtgggtagaacctaatccggacgcttttcgtgaatactctgaaataggaacatttagagcaacagatgatatggcgatgtttaatgatacttggaatatgtggtataaggtcatttatgatgccaatgtcgctatttctaagattccgagtgcatcttttgattccgagtctatcagaaatcaatttttaaatgaagcttatttcctgagaggttgggcttattttgagttagttcgtctttttggaaatgttcctatggtagatagaccgatgtctccgtcagagattaaatcggtaaagcaatctactgcagtggatattctcaataatcgtgttattcctgatttgaaaaagtcagaagatttgccttataaagcagatatgcaagatgccaatggtgctaaaatagataaaaaaggccgtgcagataaaatggccgcgaaggctatgttggcacgtgtgtatatgacattggctggttatccatataatgatactaatgcgaagagtttggctaaaacgcaattggaaaacgttttagatgattctcatgcagccgcttattgggcaccatcattggaagaatggcaaaaacagtggatgccgactgatgcatattacaataaatattctattttcgccattcagtatcgtacgggtggtacgggaaacccagccatattcaatatgcttccagttaaaatcgttccggaagattggtctaaaaactataatttttcgcaaaattctatttatgtggaaaagacattgatgcacgaatttgatcgtgaatactctaatggaaaaaaagacggacgtggctataattttggtgtgatggctggctttgctggtgatgcggtagctcctgaatatcagagcccttctgagttgatgacttttgaagatggaactacgggtaatgtgtatactaaagctatgttttataaaatgattcctactaaaactaaaatagcctctttggggatgtcttttgatgcagagagtggcatgaaaaagtatgatgactggggagtaaatctacctattattcgtattgaagatatgaagcttctttatgcagagattttggcgagtgaaggtaacactgcggatgccatgaaaattgtaaatgaaatacgtgaaagggcaaactgcgatccgagaaccgagactggagttagtgtagaggatgccatgaaatacattaaacttgaacgtaaaattgagtttatgggagaaggtattcgttggttcgatcaagtacgttatggcacttggaaggaagatacagaagcaaaatttgagcgttataactttactgaattgaaagcaaatttaaaagaaggtcgttacctctatccaattccgatgaatcagatgaatgttactccaggactttatgtccaaaacgagggatatgaaaattgatgctatttgtttgattatcaagactgaatgtcatatcttagccttggctacattaaatttaagttattaaaaaggggaggtgggtgcttttaaaaggtatgccaccttttcctttatttaaatcagattatgtttagaaaagatatagtattaggtggagtttgtgcgggtatgtttgttatgcctcagttgatgactgcccggcaacttgtaacagacggtggagacaagccgaacattatttttatcttggccgacgatatgggatattgcgacttgtcatgttatggaaataaatatatagaaactcctaatatagaccgtttggcagctactggaacggtctttacgcaatgctatgccggttccggtatcagttcaccttcccgttgtgccttgatgacgggaaagaatacgggaaatacaactatacgcgataacttttgtattgcaggtggtattgaaggattaaaaggcaccaagaccatacgccgcatgcatttacaaccgaatgatacaaccattgccactgtgcttggggctgccggatatagaacctgtttggtaaacaaatggcatttggacggatttaatccggaagcaactcctttgaaccgagggtttgatgagttttacggatggcttatcagtactgcatattctaatgatccgtactactatccttattggcgcttcaacaacgataaactggagaatgtaaaagagaatgaaggcgataaacacattaagcataatacagacctttctacggaagatgcaataaagtttattaaccgtaataaaaacaatccgttttttctgtatttagcttatgatgcgccgcacgaaccctataatatagatgaaacaacctggtatgatgatgaggcttgggatatgaacaccaagcgttatgcctcgctgattacccatatggatcgggcgataggacgtttgttggcagaactggataggttgggactgcgcgaaaatactttagtcatctttgcatcggataacggtgctgccaagcaggcaccgttggaggaattgggatgtaaaggttctcttaaaggaatgaaaggacagctttatgaaggtggcattcgcgtaccgtttattgtaaatcagcccggaaaggttccggtgcagaatttgaataatattatttatttcccggatgtaatgcctactttggctgctttggctggtgccacagataaattgccacaaaaacttaacggtatcaatattcttcccttgttctatgggcaacagcttgatacggataatcgtttgttgtattgggagttcccgggaaagcaacgtgcggcaagacgtggagattggaaagtagtgactgtaaagaaagatgctccgttagagttgtataacataaaagaggatatgacggagtctgtcaatctggcaaataaatatccggaaaaagttgcacagttcgaaaaagagatgaaagcgatgcgtgttcctactcctaattggccattgccgggtgagtaaggaatcgtattgcaccttcgttattgatgagtgattgattattataatttgggttagtgaaaaatgggcggttaacttgtgaaagtcagactgcctttttctttgattattttattattttcgaaaattaaaatccatataaaagaagtatgaatataagaatcttttttactgttttaggactattgtccgctctttgcgtatggtctcagcagacagagcgccgttatctttccggtaccggactgggcgatggtgtaacctggcagttttattgttccgagggtaggaacagcgggaagtggagtaagatagaagtgccttctcaatgggagctgcaaggttttggtgaatatacctacgggcgttggtataagaagaaaggggttaagaatcccagtatggaagagggaatttatcgtcatacatttcgtgtaccggaagattggagaggtaagaacatacgtttgtggtttgatggggttatgacagatacggatgtgattgtaaacggagtttcggccggagaaacacatcggggcggattttatcgtttttcctatgacataacttctttgttgaaatatggtgctgccaataagctggaagtacgggtaaaaaaacattccggaaataagtcggtgaatgcggccgaacgtaaggcggactggtggttgtttggggggatttaccgtcctgtatggttagaagccaaacctcagatacgtatcgaacatattgcagtggatgcgaaaatggatggggaaatgcagctttataccgagctgaaaggagtgaaaggcaaggaaaaattaacggcagctttacatcctttggatggaacggacgtttgttcggaggttcggatgtgggaagtggggcatgacagtgtgtttgctcatatttggaaaaatgtagaaccttggactccggaaaaacctcggctttacaatctcattgttaccttgcggaatgaagaaggggaggctttacaccggacatctgtccgcgtcggattccgtaccgttgactttcgtccacgcgacggtgtttatctgaatggtacgaaactggtgatgaaaggcataaaccgtcattcttttcaccccgatggcgggcgtaccaccaataaggaactcagcattcaagatgccctgctcattaaagaaatgaatatgaatgccgtgcgttcccattatccacccgatgagcattttctggatgcttgtgattcgttgggattgctctatattgatgaacttgcgggctggcagaatgcttacgacactgttacaggcagcaagttggtaaaagaaatgatagcaagggatgtaaatcatccatgtatcgtactttggagcaatggaaatgaaggcgggtggaacatggctacggataaactgttctaccgttatgatccgcagcgtcgtcatgtcatccatccttgggcggactttgatgaattggatacacaccattacccggcttacctgaccggtgtaggccgtttcaccaacggatataaggttttcatgccgacagagtttatgcatggtctgtacgaccagggacatggagccggactggaggatttctgggcgcgatatacggcacaccctttgtttgccggaggttttttatgggcatatagcgatgaagctgtacgccggacagactgtaacggcattttggacagtgaagattataatgcgcctgacggtattgtaggtccttatcgggagaaagaaggcagtttttattccgtacgggaaatatggtcgcctataaagataaagcctctccagctaacgccttctttcaatggccgttttttagtggagaaccgttatctgtttactaatttgaaggagtgttccatgcgctatcgcgtcctttcctatccttccccgctacagagccgggcagagggatgcacagtagacagcggccgggtgaatttgcctgctttggaaccgggtgaaaccggatatgcctgtatagctgcatgggagaatccggaaatccgggaaaaattcttctctaagggagatgttttggaattggaggctataggactggatggaaagagcgtgtgtacacgtacgtatcccatcagttttgcgaaaagctattttgaagggcaactggcttctttgaaaagaacaggaaaaggttgttgtgtgaacgaggctgattctttaataacgttgtgttccgattgggtggacatatcctttcgccgaaacgatgctaccatatattctgtattgcggaagaaagacaaccggataattccgttgaaaaacggtccgctgcctgtaggaatgcaaatgaaactggtgtctctttccgctcgtatggagcagagaggtgatgctgtcctttgtgcccgttatcggggcggagcggattccgttgtgtggcgtttgcgtccggacgggctgttgaagatggatgccgtattgctgaaccgggcatcgggcggtggcggctttgatgatgcttttacggataatgccatacttaacttcgggtttaccttctcttatcctgaaagtgaatgtacaggtatgcgttggttggggcgcggtccttaccgtgtgtggaagaaccgtattccgggcacgaattacggtatctggcagaaagactttaataatactgttaccggagagagtgcggacaaactggtctatccggaatttaaagggtatcacgccaatctttattgggccacaattcaaggcaagcagaacgcttttaccgtctatgcggctacggacggagtgttctttcgtgtattcactccggatgaacctcgtgggcgtcaggatggtatccgtacaatgccggactttccggccggggatctttctttcttattggatattcccgccattcgctctttcaagccgataagtcagcacgggccgcagagtcagcctggaactatccgtatcaaaaaaggggatgagggattgaaactggagttggcatttgactttctgtgacagcttgggcagtgtatgcccgataatcatttctcttagcatttccgccaaaccggacagaatcggtttggcggaaatgcgttatctttgcttcgttcacaactatgagatatattacttacactaaaaataccatgaaaaaactgttttattctctacttgcagtcgtcttggcagcttgcggttcggaaaagcaagcgccgatagatcgtgaggcgctggttgcccgtaacaaccctcaggtatcttcgtttgattcgttggcgtcgttgtcggtcggcaacggtgagtttgcctttactgtggatgctaccggtctacagacttttccttcagtatataagaaaggcgtgccattgggtacgcaaagtcaatggggctggcatagtttcggtaatcccaataaatacaaaccggaagaatacttgaaagaacacgatttcggtcgtggacataaagaaatatacgcttgtcagtttaaagaagacggacgtcagaaagaagcttccaattggtatcgcatgaaccctcatcgcctgcatttgggtatcgtgggactggagttgggcgatgatgtgaagacttctgacattaccgatattgcccagacattggatatgtggaacggtgtcatcaacagtcacttcacactgaaaggtaacgcctttgatgtacagaccgtatgtcatccgcaaatggacatgatttcagccagtatcaccagtccggcacgtgctggggtgaaactgcattttccataccctacgggcgctcatgccgatgatgcctgcaattgggatgccaacaacaaacacactacagatatagtctttgagaatgcgcaaagtgcagttctcaaacgtacactcgattctaccgtttattatgtatctctgcgttgggaaggaaaagcttccctcaaggagaagtctgcaaactattttgtactgacaccgacggaagataaactcgctttttcttgcaagtttacgtccgcttttcccggaactgtattcgagagtgaaccggctgtctatacatctgccgatactctgcctactttcgccgaaactctggcagccggcaacagctattggaacaatttctggaagaatggtgcggctgtagacttctcacattgtaccgacccgcgtgccaaagaactggaacgccgtgtcgtattgagccaatacctgctcgccattcagtcggcaggcagtgttccgccgcaggaaacagggctaacctacaattcatggtttggcaagttccacctcgaaatgatatggtggcatcaggcttggcaggcactttgggggcatcccgaattgctggaccgcacactcggctggtacgaaacggtagaacctgttgcccgtgagatagcccgccgtcagggattcgacggagtgcgttggatgaaaatgaccgatcccagcggaacggaagctccgtccaatgtaggcagtttcctgatttggcagcaaccgcattttatctatttggccgaactcgtttaccgtgccaatcctttggatgaggtgattaagaaatacaatcatctggtgcaggaaactgcaaagttcatgtattctttcgccacttacgatgaattccatggacgttttatcctgaaaggcgctattcccgcacaagaaacattgcgtgcggctactaccatcaatccgccgttcgaactctcttactggcattatgccatgaatgtggctcagcagtggcgtgaacgtgccggtgaaaagcgtaatctggaatgggatgagatgatagacaaactctctccgctggcctataatgaagacagcctttatctggctgccgaaaatgcagtggatacttacaaggatatccgtttcaccagcgaccacatggcagtgcttggctctgtgggtatcctgccgatgaacaagctgatacgtgccgactatatgaagaatacgcttcattgggtgtgggacaactggaactggggcaagacatggggctgggattacccgatgaccgctatgaatgccactcggttgggtgagcccgaaaaggctgtaggagccttgctgatggataagcgcaccaatacttacttgttgaacggacacaattatcaggacggacgtctgcgttgctacctgccgggcaatggcggcttgctgactgccgtagcgctgatgtgtgccggttgggacgggtgtgaggtgaaaaatcccggtttcccgcaagacggtacatgggatgtgcgttgggaaggattgaagccgatgccgtaattgcctctttgtatataaatattattatatataactaatctggtacttgatagtactaccccttttctgaatagcttgcagaaggatgcattcagtatacgactgatataggttcagtcgtatactgaatgtgtttcaatcgtatagtgaatggctttcagttatgctttcatcctttgaactaaataaaaccttatgaaccgtatttctgtttttgcaattatttttactctgtttatccctttgggttcttacgcgcaatatgcttcttcgtctaaaactccgaagaaagcaggcgatttgatagaatccacttcctacaatgaccataagcggggagctccccgtatgttgcaatacttgccgtccggtgaagaatttgtctgcgtcaacggcaagaaccgctacacacgtgctttgtatggcggacatacggcatggcgcctggaaaccggcgaccgtccgatatttgccacgtatgtcaagaacgactgccgtaatatccgttttcgcttgcatctgccggacggtacggttacaccgttggaagaaaccgattggtgcgaggcgcgttataatccgggtacgcgtacgtatgccttgaaagacaaggcatggggagaaaattgcagcctgaaagtttccgtattggcaagtcttacggaagagatggccgtttgggagctttccggtgagttgcctgccggctgcgagctggaagtgctgaattcgcccatccgccggaagaagctttcccgtagcggagatatgggggcagaccctccgggatgttttgagccggcagaagacggcacagtgctgcaaatactgaaatgccgctttccggccgacgggcatttgtatgtgggcatttccggtaatgaactgaaggaaatacgggatggtggtgtacagtatcttgcccttcaaaaggcttgccgtgaactggccgaacgcatcagaatcactactcccgatccttatttcaatacgcttggcggtgcacttgctgttgctgccgacggtatctggggggaagagggcgtgtggctgcatggagctgtcggctggcgtatgccgttgagcggttggcgtgccgcatacgtaggcgatgtgttgggctggcacgaccgcgcacgcactcatttcgacaactatgctgccagtcaggtgaccgaagttcccaatacgatttcgcatccggcacaggattctgcccttgcgcttgcacgttcggccaagatatggggaacaccgcaatacagcaacggatatatctgccgcaatcctcgccgtaacaatcagatgcaccattatgacatgaacctatgttacatagacgaactgttgtggcacttcaactggacgggcgaccttgagtatgcccaccgcatgtggccgttgctgacactgcatcttgcttgggaaaaacgcaacttcgacccggacaacgacggcttgtacgatgcctacgcctgcatttgggcaagcgatgcgctgtattataacagtggcgccgttacgcacagctctgcctataactatcgcggcaataaactggctgcactgattgctgagaagataggcgaagaccccacaccctatcgggaagaggccgataagatattgaaagcgctcaacacccgtctctggttgccggagagaggacattgggcggaattccaagatttcatgggtcatcgccgtctgcatgaagatgctgccgtatggaccatctatcacgctctcgacagcgatgtggccgatccgtttcaggcatatcttgccacaagttacatagaccgtgaaattcctcatattcctgtcgtgacttcggatgatgtgcttgccgccgatgctgctttgcctgtcaatgcaggcccgtacgctcattggcaggaacagttgaaaacagcgggtgctgccgtcaatgccggaaagtatgccactgtggccactaccgactggatgccgtattcatggagcattaacaatgtggcctttgccgaagtgatgcacacgtcgctcgcttattttcaggcaggacgcagagaggcaggcttcaaattgctgaaaagttctgttctggacggcatgtacctgggcgatagtccgggcaatttcgggcagataagtttctatgatgctgcccggggcgaatgttaccgcgacttcggcgaccctatcggagtggcttcccgcgcattgattcaggggctttacggaatcttgcccgatgctttgaacggtcgtctgctgataaaacccggtttcccggaagagtgggagtatgcttcactgcatacgccggatatagactttgactttaaagcgggcgaagcggctaccggtaagtattcttcccgcgactgttcgctttataccgttacacaccgtttgcctgccgtacggaatctggaattgcaattcccagcacgtcgttcggctgtggcgcgtttgacggtaaacggccagaatgcagcgtggagactggttgaaaattcagttggacggcccatgctttccgtttccgttcctgctgcttccggtgaggaggtaacaatcaatgtcgcttgggaaggagagttgcttgaagctcctgcttctgtcgatgcttatcctgcaactcgcgtccgtaaggcgggacccgtcagtttcattgctatggaacagggacagatgaaatggtgggcgccggtagagcacccggtatccgataagggtaataaacctgttccggcaggtgattttaaagcagtcgattcagcccgatgcactcctgtcgatatgcagaaagtgttcaatgcgaatgtaacggatattttccgcaatgaatacctgtcgccgcgttctccgtacaccacgttgcagttgcccaaacagggaataggcgagtggtgtcatccgctgaagacagtagatatagatgattcgggtttgcgtgccgctgtgcgtaaaggcttgttggagacaaagctcgggatacctttccgtactcctgccgaagggcataacattgctttcacctctctttgggacaattatccggacagtctgcaaattcccctgcaaggcaaggcttcccgtgcctatttactaatggcaggtagcactaaccacatgcagtgccatatcgacaatggcgtaatccgtgtgtattatgaagacggtacttgcgacaccttgtctttggtgaatccggacaactggccgcccatcgaacagatattctttgaagatggaaagtcttttaaccgtcatgcaccgtctctctatcgcctgcgtctgaagaccggtgaactgagcaataatttcggtgaggaacttggctttaccggagtgtctcgcgaggtggacggtggtgccgccgtactgttggaaatgccgttgaatgcagggaaaaagctttcgcatcttgtactggagacactctccaatgaggtggtgataggaataatgggcattacgcttcaacgatgaaaccgtattttaaataaaagattatggaacat

SEQ ID NO: 4112 - DNA, 10129 bp, Unknown
  gut microbiota DNA sequence
aagtcgcgtttgatggcttccgccagtttcccggtaggttcgctttgcgacggtttcggtgcgaattgcaggaagtacaacgtatggttcagcacctgtccggcattgttgaatacggcgccatcgggtgcagtggctacgatagtaaccaggtctttgttttcatactccgtgcccggaacaaggttgttcaggttgtttacgtacgtttgcaggtgcttaccgtaatggtaatctattgtttgctgactgattacaggttccagcgcgttgtttgcgtaaggaagtttaggcatttcatgtgtcataatcattattgttaaagacattaataacgtattcataagttcaatttatttagttttgaaactttactatactaacgcgataacctgtggaattgttcgcaggtgtccgaacctttcactatctttgtgcccgaactttacccgttagattattaggaatatgtccgattacatacaagaactgaatgagggacagcgtgctgcggtgctctacaacgacggcccgtcactggtgatagccggcgccggttcgggaaaaacccgtgtgctgacctacaaaatagcttatctgattagagagaaaaaatatgatgcacgtaatatccttgcgttgacttttacaaataaggcagcaaaagaaattatagaacgtgtaaatcgtgatataggttatccgtggtcatattatatctggatggggacttttcattcaattttctctcgtattctccggcgtgaagcgaatattttaggttttactcgtaactatacaatttatgatactacggatagcaggagtttgatacattctattattaaagagttgggattgaatgataaacaatataaacccagtactgtactatctcgtatatccaatgccaaaaattatttgaatactccagcagattatgctaaaaataaagaggcttatgagagtgattgccttgctaaaatgcctgctattcgtgatatttatgatcgttattgggagcgctgcaggcaggctgatgcaatggactttgatgatttgcttttctatacttttttgttatttcataaccatcccgaagtgttggcaaggtatcaggagctatttcgttatgtccttgttgatgagtatcaagacacaaattatgcgcagcactgcatattgtgtcaattaatgaaagatagagaaaaacaacatatttgtgtggtgggtgatgacgcgcaaagcatctactctttccggggagcggacattgataacatacttaatttcacaaaagtatatccggaaacgaaagtctttaagctggaacagaactaccgctccacccaaaccatcgtttctgccgccaacagcctgatagagaagaaccagcggcaaattcgcaaggaggtcttttcggagaaggataagggagaacccatcggagtgtatcaggcatacagcgatgtggaggagggcgatattgtaatcaacaagatagccgaactgcgccggcaggagaattacgcctattccgattttgccatactctatcgcaccaacgcgcagagccgtgtctttgaggaagccatgcgcaagcgcagcatgccgtatcgcatttacggcgggctgtctttctaccagcgcaaggaaataaaagatgtaatcgcctacttccgtctcacggtcaatccgaatgatgaagaagccttcaagcgtatcatcaactacccggcacgcgggataggcgacactaccgtaaataaaatcacggctgccgccaccagccacaatgtaagcctgtggaccgtgctctgcgaaccgctgacctacggggtgaacatcaataaaggaacggcgggcaagttgcaggattttcgctgtttgatagccggctttatcgagagcgttgccgaaaagaacgcctacgagcttggtacggagataatccgtcagtcaggcattatcgctgatgtctgtcaggacaactcgcccgagaacctcagccgcaaggagaatatcgaagagcttgcaaacggtatgagcgacttctgtgcacaacggctggaagaggggaatgccaataccacgctgagtgatttcctttcggaagtgtccctgcttaccgaccaggattcggacaaggacggagacgatgaaaagataacgttgatgaccgtgcactccgccaaggggctggagtttaaaaatgtctttgtggtgggcatggaagaaaacctgtttccgagcggtatggcgggcgactctcccagggcgttggaagaggagcgccgtttgttctacgtagccatcacccgtgcggaagaccattgtttccttacttatgccaaaagccgttaccgttacgggaagatggagtttggaaatcccagccgctttttgaaagatatagatgtgcgcttccttaagctgccgcaagatgccggattggtgcgcaaggtagatgagcatgccgcatctttccgcagggagaacagggagaacttcgtttccgccatgtatggaaaacgtgatggaggagctcgtccccggcaggaaatcattgccccgaccgttccccgcaacttaaagcgggtgacgccttccatgggaacagcttctgccgcttcccattcgtcggcagccgcaggcgggaacgctgtgctgccggggcagtttatcgaacacgaacgtttcggcctgggcgaagtgctgaaagtggaaggtgagggcgacaacgcaaaagccaccatccgttttaaaaatgcgggcgacaagcaacttcttctgcgttttgcgcgtttcaaagtgataggatagatccggtttttactataaaagtttatataacaagaaaaatgacagacaaagatttcgaccttttcccttctccctgttatatcatggaggaagaactgttgaggaagaacctcacattgataaagagcgttgccgaccgggcaggcgtagagattatccttgctttcaagtcctttgccatgtggcgttcgtttcccatattccgtgagtatgtggagcattctacggcaagctccgtatacgaggcacgcctggcgttggaggaattcggcagcagggcacatacatactctccggcatatacggaagccgactttccggaaatcatgcgatgcagcagtcacatcacattcaattcgctggctcagttccggcgtttttatcccatgattcaggcggccgggcaggatatatcctgcggcatacgcgtcaatccggagtattcggaagtggaaacggaactgtataacccttgtgctcccggcacccgtttcggtgtaatggccgaacagcttcccgatgtgctgccgcaaggcatcgacgggtttcactgccactgccattgcgagtcgtcctcgtacgagctggaacgtacgctggagcatctggaggcgaagttctcccgctggtttccgcaaataaagtggctgaatctgggtggcgggcatttgatgacccgtaaggactacgatgtggagcatctgattcgcctgctccgcggattgaaagagcgttatccccatttgcgcattatcctggaacccggttcggcatttacctggcagacgggagtgttggcttccgaagttgtggacattgtggaaaaccgcggcatccgtaccgcaatcctgaatgtcagcttcacctgccacatgcccgattgcctggaaatgccctaccagcctgccgtccggggtgccgaaatgggtgacggcggtgcgtacgtctaccggctgggcggcaactcctgcctgagcggcgattatatggggttgtggagctttgaccacgaactgcaaatcggtgagagaatcatctttgaagacatgatacattacaccatggtgaagacgaatatgttcaacggaatccatcatcctgccattgccatgtggacaaaagagggaaaagctgagatattcagaaaattttcttacgaagattatcgcaaccgaatgagttgataatcaaaactatgctttcactccggacagaatgtttaattttatgtgtgaaaaaaatgcgtagaatgtttgcaggttaaaggaaaatatctacctttgcaaccgcaaacgcggaaatagctcagttggtagagcataaccttgccaaggttagggtcgcgagttcgagtctcgttttccgctctttctatgaaatgattgcaattacctatgcccaggtggcggaattggtagacgcgcacgtttcaggtgcgtgtgtcgagaggcatgcaggttcgagtcctgttctgggcacaaaggtatgcaatggtctatgaaatgtttgaaatatgtcggagagatggcggaattggtagacgcgctactttgagggggtagtgacaattatgtcgtgggagttcgagtctccttctcttcacatagtatattgcggaaatagctcagttggtagagcataaccttgccaaggttagggtcgcgagttcgagtctcgttttccgctcttctttgaattaatgattgcccaggtggcggaattggtagacgcgcacgtttcaggtgcgtgtgtcgagaggcatgcaggttcgagtcctgttctgggcacgctctttgtgaaaagagcatcatttgcggaaatagctcagttggtagagcataaccttgccaaggttagggtcgcgagttcgagtctcgttttccgctcttttttatgttttgttaaagagacggaaatccccgcaagttttatgcttgcggggattttttatttccgcatttattcctttttcaaggcaaatcccagcatcataccatcgtagctgtttgccagcgatccgattgttttaagggtgctattgttgctcttgctggaaatcagggtaatcagctttaagagtttgtccgaattgaacagcaggtccatattggcggatgtacagtttattttggcattaagcgggatcagtttcatgaatttcagacttgcattctgtgtggaagcatcgtaggagtaagttccttttatgctttttgcgccaactttggctgtgaaggtgctgtctgcattgaaagtgaaagacatttgtccttccttgatgcctaccctggccaattgttcgttcagcttgttttcggcagcattggcggctaccgcaccgccggccttttgcagcaggttgtccgattcgaattcgatagcagaaccggcatacgtccatgtcccttccatgctggcggtgcttttaccggttatggcatttactgccttctcgatgttttctttgttcaataagtctttcagagattgtgcctggctgttgggagccatcagcaatgcggcaatgagtatttgccaaaaaacaaatcttttcattttggttgtaacagttatgatttggaattaatttctttattgatttgttcgatatagcccaggagttcgtcacgtcccatacggttctcggaagatgtgatgaaatggggcggaagttcctcccattgttcacgcagcttctccaggtagtggtggatgttgctgtttatcctgccgcctttcagcttgtcggctttggtgaaaacgatggcaaaaggcactccgttctcgcccagccattctatgaaagcgaggtctatggcttgcggttcgtggcggctgtcgacgaggacaaagaggcaggtcatctgctcgcgttgcagaatgtaggtctctatgatgcgctgaatctgttcctggcctttctgtccgcgcttggcatagccgtagcccggaagatcgacgatgtaccagttcttattaatcaggaagtgattgatgagcatggtctttcccggagttgcggatgtcatggcgagtcctttacgccccgtcagcatgttgatgaggctggattttccaacgttggaacgtccgatgaaggcgtattcggggaatgttccgccggggcattttttaacgtctgtattgctgatgacgaattcggcgcttgttatctccattttattacttgtttttttgttgtttcttcatgcaaaggtagcacttatttcaaaaatctccgtccgtaatgcggaattctctctgtttttggagaggacaggctgcattccggtcatataatttcaagcgaacttaattgcattgcacccaatttgcactatctttgcccaccgatagaagaatttaaggtatgaatggacaatatccctcgacattactggaaaaagcggtgaatgagtttgccaaactgccgggtataggcaggaaaacggccatgagactggtgcttcatctgctgcgtcaggatacggcggcggtggaggctttcggcaatgccatcgttacgttgaagcatgaagtgaaatactgcaaggtgtgtcataatatttctgatacggagacttgccgcatctgttccaaccctcagcgcgactcttccgttatttgtgtagtggagaatatacgcgacgtgatggcggtggaagcgacgcagcaattccgcgggctttaccatgtgctgggcggggtgatttcaccgatggacggaataggccccggcgacctggagatagagagtctggtgcagagggtggctgcaggtggcattaaggaagttgtgtttgccctcagtaccaccatggaaggcgatacgaccaacttttatatttaccgcaaactggagaagctgggagtaaagctgtccgtgatagcgcgcggcatctctgtgggagacgaactggaatatgcggacgaggtgacgcttggacgcagcattgtaaaccgtactccgtttacaggtgcggtgtgatatggctttaaagaacgagtgtatggaagaaaagataaagcgggttgtatcccgcacaaaaatgatgtttgtatatttctggctgctgcccgtatttctcgtggcatttggagaaacgggcggagaatgggtaggtgcctatgcaggggacgtgcgtgccgcttattttgcggagactgtcacgattttgcttactgctgtgttggtgcctgtttccttgaagctgttttcatggatgctgaccaagaagatagatgtcgttgccattacggatgcgctacgtctgtatgcactgtggagtggggtgcgcctggctctgcttgccatgccggtattggcaggatttcttacttattatatgatgctgagcaataaaggagtgctttgcgctttaattgctttgactgcgtctctgttctgcctgccgggtgaaaatcgtttgcgtaaggaactgcatatagagaaagaatgatgaaaccttcttattttgtaagtgagcgtgtgcgtcttcgggctatggagccggaagatttggagataatgtatgccatggagaatgacccgcaaacgtgggatgttacgaacttctcggtaccgtattccaagtatgtgctgaggcaatacatggaaaattcgcaatgtgatatgtttgccgaccgtcagctccgcatgatgatagtacgtcgcgaggatgatgccgtggtgggcactattgacattacggattttgcaccgatgcattcccgcggtgaggtggggattgcgatacggaaagagtatcagggtaatgggtacgcttccgatgccttgagacttttgtgcgattatgccttcggctttttatttctgaaacagttggttgtgcatgtggctgccgacaatgaagcgagcttgcgcttgttcggctcttgcggctttgtacaatgtggactgctgaaggaatggtggtttgcaggcggcaaatttaaggacgttgtcttgatgcaatgtattcgtcttgatagtgtggggcgggtagaggatggtaggtaatcggatgattgtccggttactgtcagttcaaagtggggatttgcggaaaacgtgaccacatttcgtattttccgccaagtttgctaagtgcatctttccacaagtttctgcaggctttttcatccatgagcgaaggaatatccgctttgtccaccagccaggtattttcttctatttcctttttcagttgcccgggttcccagcccgaataaccgagaaagaaacgtattcttcctttgatggaattaccctctgtcataaattgcttgatagcggtgaagtcaccgttcaggtagagcccgttggctatggggagcgagtctgttatattttccaatgtgtgcaaatagaaaagggtatcggtgctcatcggtccgcctttatagataggaatatcttcccgacagttgatttcgcttagtaaatcatttaggaacagaggtaacggcttgttcattacaagtcccatggttccgtcttgcgtatggtctgccagtaaaacaacagaccgcccgaacatatagtcgcacagaaaaggttcggaaataagaacttttcctcgtgtaggaactatatggttagtttctattttgaatatgtctgcattggtatacatgcccccaaattaagtatttttctataaaggagcaaattatctttctcttttttatgggagtctgtttaatttttatccggaaagtattttttcggggagttttaaagttttacagagaatgaagcgtcgtcagagtttggcgcattcattctctgtaaaggggatatatgtcctatctgacaggatgattttctgcaaagacggccatgcgttcgtccaattgggcgtattgatggtcttggatgaatgaggtgcaagcccgcaatccttcctggtggcttccggtagttaccagtgagatagcgcttactccatagtacatcagctctttggcaagttcaccgctactcatacccggataaccgatggtaaagtaaaatccgtcggctacaggctctccgaggtcgttgtcgtataccagatggaaaccatggcgcaggaaaatctctttcagtcgccgtgcacgttcgccatatacttttacttcatccaggaagttgtatttgtcttcattggcggctttcagcatggctgcaagtgcgtattgcgccgagtggctggttccggaagaaagggcgtacaggacacgatggataaatactgtgccgaatgtaccgccgccgtaacgttgtgtcagtcccggatatgcccgatgataaagtttgtccgagatgcagcttaccccgatgcgttgtcctgcatagctgaatgctttggaaccggatataagcagtatgtaatggtcggtgtaatgggctacggatggttggtagggcgcatggaacggtttgcttaagtcctgacggaagtccatggcgaaataggcaaggtcttccagtacgattacatcataccgggtggcaagttcgccgatgatacgcagttcctcttctttcaggcatatccagctgggattgttcggattagagtagacaatggcggatatattgccttttttgagatagctttccagcttttctttcagtttgcagccacgatagtcatacacatcgaaagtttcatatttttgtcccattacaaccaattgttgcttttgtacgggaaaaccagggtcgataaacaggattgtgtcttttttctcgtcacattggctgcatgtaaggaaagaggcaaaagttccttgcatggaacctgtaacgggtacgcatccttccggcgctacgtctacattgacgaatgccttgataaagcgggatgcttcttctttcaatgcaggcaagccgttaatatccggatacaggcttgctattcctttttgtagcgattcaatttctgcctttacacctacggaggagggtggtagtccgggaactcccatttccatttttataaattccacaccggagtccgcttctgcttttgctgcaatagcttttacttcgcggatagtggcttttgcaaaatcagtaatatgaaaattttcgatggttttatcgattagttcacgtgcaataggggtattttccatagtttctattttttttgtctatgcaaagataacataaatctcttataatcaatagatgttgaaaaaaaagatattttttttctttcaaactattgcagattcaaaaaaaacacctacctttgcaaccgcaatcgagagagatagcaacgataaaatgaaatgatggtgcgttagttcagtt

SEQ ID NO: 4113 - DNA, 17949 bp, Unknown
  gut microbiota DNA sequence
aacaagaagaggcgtcaaaactcctttgatatttttttagttttgacacctcatcctatcagaaacaaccggtaatcagatattcattaaatagcgcttgaagtctgcaaaatctttcgacataggcagactcttcttttcgccacgcataaaggcttgcaacttctccggtatctgtatcgcctcaccgataatattctctaccgtatctttgaacttggcaggatgagccgtttccaggaagacgcccgtctcacccggctgcaagccctcttgcaatgcacggaaaccgcatgcgccatgagggtcgagcaggtaatgctcatctgtccaaacattcttcacggtttcggctatctgttcgtccgtataagcagcaccgcttatctcggcagagatagctgcatggctaccgccatagaggtcgagcacacgggcaaagttactcggatcgcccacatccatggcattggctatcgtagcgacgctgggtcgcggcgcataaacacccgtctgcaaatattgatagaatatgtcgttacggttgttggatgctatgaaacgctttatcggcagtcccatgcgtttaccgaacaaaccggccgttatattaccgaaattgccgcttggcacacagattacggcattggcagccttacccgcccgcttcaactgcgcataagcataaaaatagtagaaagcctgcggcagaaaacgtgccacattaatggagttggcgctggtaagttgcaaacggctgttaagctccttgtccatgaaagccgctttcaccaatgcctgacaatcgtcgaacgtgccatccacttcaagagccgtgatattctgtcccaacgtagtgaattgcttttcctgaatttcactgaccttgcccttcggatagagcacataaacatgaataccttctacgccgaggaaaccattggcaacggcactacccgtatcacccgaggtagcaaccaatacattaacctgcttcttaccctcttttctaataaaatagcccaacaggcgcgccataaaacggccgcccacatccttaaaggcaagtgtagggccatggaacaattcgagggaatagatattttccgtcactttcaccaaagggacatcgaagctcaatgtatcgtacacaatctgcttcaatgtatctgcgggaacatcttccccaaagaaagcatccgccacccgataggctatctcctgaaagccaagcgtatcaatgctgtcgtagaattcctgcggcaacggtttaatggtaaagggcatgaaaagtcctttgtctgcggcaagccctttcactaccgcctcttcgagggtaacatcgggagcttgtttgttggtactataatattgcatattaaattaaatattaaagaattaataattaaagactatgacgctgcaccgaatgataatcagcacatttgggcatgtcatctcattatcccttcataaattcgtttataaactcatcttctttcagcagaccgtagctgccgctgcaagccgccacttcatcaaaagtctgcacctcgtccggctcaatacccggataccaaataaagaaaggtaccggttcgttggtatgtgtacgcagctcgcagggagtgggatgatcgggcaaaacggcaatggcgacaggttcttcccaatctttcaccgcttcataaataggacctacggcgcggctatccagattttcaatggtcagcatcttcaaaggaatgtctccttcatgtcccgcctcatcgctggcctcgatatgcaggtaaacgaaatcatccgttttcagtgcgtcaagagcggcagccactttattctcgtaattggtatcgtacagtccggtcgctccttccaccgtcaggcggcgcagtccggcataatagccgataccgttaatcaaatctacagcagagattacagcgcctttcctcacttgaggaaacttatccgaaagtgtttccatctgcggacgataacccggactccacggccaaatactgttagccgggtctttgccttcggctgcacgcttcctattgacggggtgttctttcagcaattcttgcgaacgcatgattaaatcgttaatcagatcggcggtttgttgcggggtcaaatcggcttttccttcgggaacggtgatactttctgtacctgccataggctttaccagcaacggccgatagggtttcagagggacatcatgcggaggagtacagtctatacgcttgtctccgccttttattaccaacaaatgccggtattgcacacccgtatggaaacgcacgcgctcattacccaaatgttcctgcagatatttcaccagcacatcggcttcttcggtcgtaatatgtcccgccgaatggttcttgatagcacctccttcaatgcagataatattacagcgcatcgccatttcacccggcttcaggtctacaccgatacttgccgcttccaacgggccgcgtccctcatatactttcggcaggtcatagcccaaaacggacatattggcaacctcactgccgggatgaaatccgtcggcaacagtttttaacctgcctacacgccccatccgggcaagcttatccatatagggcgttttagctgcttgcaacaaagtcctgctttccaaagactttacaggccagtcggccataccgtcacctaatataataatgtgtttcatacccatgaatcttgaaatccaagtacgaagttcgtacttaattaaacgttcgcaatactcattatgtccgcaaatactcccgcagccgttacaccggcaccggcaccgtagccttgtatcatcatcggatattccttataacgctctgttgtcagcaagataatattgttgctgccttccagcccatagaacgggtgattgacacccacttcctgcagtcctacggaggccttgccgttctccagtctggcaacgaaacgccaatgcttgttttccgcttccaacaccttgcggcgtgcttcaaagccggcgtcgaggctcggcactttcttccagaagtcatccaaagaaccttcgaagaaatcatcgggtacaaagagattcttttccacatcactttgctcaatgcgataaccggcttcacgtgcaaggattaccagtttgcggattacatccttgccactgaggtcgatacgcggatcaggttcggaataacgttcctcctgagccattttaatggttctgctgaaaggaatatccgcgcttatcttgttgaatatataattcagcgtaccgctcagcacggcttcaatcttcagtatcttgtcaccgctatgaataaggtcgttaatggtattgataataggcaaccccgcacctacgttcgtctcaaacagatatttcacgccgcgctggcgggctatctgcttcagttcccggtagttttcatactccgaagaagctgcaatcttattggcggctacaaccgaaacgttgtgcatcaaaaggtctttatacaaggaagccactcctgcgcttgccgtacagtccacgaatacggagttaaagatattcatgccgataatctcgttacgaagcgtatccaaagagctttccttacctttctccgccaattcttcgcgaaagcgtcccaagtcaaatccctcgcggctgaagattgctttggaagcatcggcaatacctaccacattcagctgcaagccgttctcctgcatcaatttctgacgctggctgtgaatctgttctatcaaactgccgcctaccgtaccaactccgcagataaagagattcaatacctgatattccgacaggaagaaagagtcatggatcacgttcaaagacttgcgcaacgacttgctgtctaccacaaacgaaatattcgtttccgaagcgccctgtgcacaagctatcacattgataccgttacgtcccagcgtaccgaacagcttaccggcaatacccggcgtatgcttcatattctcacctacaatggctaccgtagccaaatccttctcagcttgtatgggtgaaatctctcccatttcaatctctttgacaaactcttcgttcagaacttcacaagccaggtcggcatccgcattacgcacaccgatggaagtagaattctccgaagatgcctgcgatacgaggaacacactgataccgttctttgccaaagccttaaagatacggtagttcacaccaatcacgcctaccataccgagtccctgcaccgttatcagacttgtatcgttgatagacgaaatacctttaatggctttactttgcggattggaaacatcctgcttgatgaccgttcccgctccgtcgggattgaacgtgttctttattataataggtatgttcttgtggcaaaccggatagatggtaggcggatacactaccttagcgccgaagttgcaaagttcggtagcttctacatagctcagttcattaatggtataagccgtggaaatcacacgcggatcggcggtcatgaaaccgtccacatccgtccagatttccagtgcatcagcatccagcgccgcagctatgatggcagccgtatagtcggaacctccacgaccgaggttggtcacctcgcccgtaatcttatccgtagagataaatcccggaaccagcacccgtcggggcatatccttgaatgtctcgcgcaccagggaagtggtaagctccgtatccaatacatgcttggaatgtttcttctccgttttgatgaaccggcgcgaatcaaaccattccgcacccgtcagttgcgctgcaataatggatgaaaggcgttcgccgtaactcacaatcgtatcggatgttttcggcgagaggtcctttatcaggtaaatcccctggaagatatctttcagctcattaagcaactcccccacccggcgttgcagtgatacttgcgcctcacctgccggaattacttcctttatcatttccacatgacgatagacaatctcacgaaactcgttttcataagaggaatcaccggcagccgccattttcgaagtattgatcagcttgtccgtaatgccgcccaaggcagacactaccactattaaaggttcgtttatagcctctacaattctcttaacgcttaaaatactgttcgcagaacctacggatgttccgccgaattttattactttcatatctttttatcggattgaaacggttgatacaattgtcaaaacaagctgctatggcccgtatagactttaactaaataagaaaaactgctgaaaaattggtgtaacacgtagaaacacaaaatactatccctaacccctaagggtcatggtacacatggatgtgactgtatgttgatagtacttgttcattctctcttactgctatcgcttatgataagtgttgcaaaagtaacaataaaaacattcaaactattacattttatgacttttttgcgataaaaatacagattcattctataaagggaagaaatatatacatattacggctaccatattcacgcttttccaaacaaagagatataaatactggcatagttttataacactttgctattattttagagatatattactatctttgcatggtaattatgtaagaattgagcgtatgtccccaaataatacttccgttttgttaatttacaccggtggcactatcggcatgatagaaaatgcggaaaccggagctttggagagcttcaacttcgaacatttacagaagcatgtacccgagcttcagaattttacgttccgcattgatacctatcagttcgatccgcctatggattcttcggatatggatccggatgcctggcgcaaactcgtacgcattatcagcgacaactacaatcaatatacgggctttgtcatccttcacggcacggataccatggcctacacggcatccgctctcagctttatgctcgagggcctcaacaagcccgtcatcctcacgggttcgcagcttcctatcggcgtgctccgtaccgacggtaaagaaaatctgctgacaagtatcgaaattgccactgcccggcatcccaacggccggcctatcgtgccggaagtatgtatcttctttgagaatcatttgacacgcggcaaccgtaccaccaaaataaatgcggagaacttcaatgctttccgctcgtacaattaccctgtacttgcttctgccggcatacatattaaatataataatgtgcagattcatacggagaacgtacaaagagagttacagccacactacctgctcgataccaatatagccatattgaagctcttccccggcattcaggaaaacgtagtggatgccattctcgccataaagggactgaaagctgtggtgctggaaacttacggttcgggcaatgctccgttgaaagagtggtttctccatcatctgcacaatgcctgcgaacaaggcattatcattgtaaacgttacccaatgcagcgccggtacggtagaaatggagcgttatgaaacaggataccgtctgatgcaggcaggcgtggtgtgcggatacgacagcacaacagagtccgctgtaaccaaactgatgttcctgttaggccacaactatccccccgcaaaagtacgcgacctgatgagccgccctcttgcaggtgagataacgatataggaagagaggtgcttacgccactacgggagtcaaggccccggtaatcgaatcgatgataaacccggaaacatggacatcctccggtatcagcggatggtcaagaatggctttcaccgtttctcttacggacttctccgtatctccgaagccataaagccacgaatcgaaatccactccgcagaaacgtatcatatctatcgtttcctgtttgatgccgcgcgccttcatgtgctctatcatctgggcgctgctcatgtggcacgcaccgcaatcggaatgtgcaatgaccatgacctctttcacccccaactcgtagatagccaccataaggctgcgtataacgctgccgaaaggatgcgaaatgattccgcccgcattctttatcatctttacatcaccgttctttatgcccagagctgccggcagcaattcggtcagacgggtgtccatacaggaaaggatggcgattttcttatcgggatatttattggtgatatacttctcatatcccttattctctacaaaccgcttattgtattcaagaatatcttctatcatagtataatccccgttttatatttttgagaacaaatatagaaaaaactctgtgacacaccgccagccctgaaacgaaaaatcgtacctttgggcaattattctaaaggaagttcttttatggcaaaagagaaaacggtatatgtatgcagcaattgcgggcaggaatcgcctaaatgggtaggcaaatgtccgtcgtgcggagcgtggaacacctatgtagaagagattgtacgcaaggaaaccgtaaacaaacgtccggtatcgggcatggaaaccgccaaagcaaagcccgtgacactggatgaaatcgctgccgatgacgaaccccgtatcgacctgcacgatgcggagctgaaccgggtattgggcggcggtctggtacaaggctcgctggtgctgataggcggcgaaccgggtatcggaaaatccaccctggtgctgcagaccatcctccgcataccggagaaacgtatcctctacatatccggcgaagaaagcgcccggcagctgaagctgcgtgccgaccgtctgtcaggcacatccgccgactgcctgattgtctgcgaaacctcgttggaacagatttacgtccacataaagaatacacgccccgatttagtcataatagactccatacagaccatctccacagagacgctcgaatcctctcccggcagcatagcccaggtgagggaatgctccgcctctatcctgcgcttcgccaaagaaacgcatacggcggtcatcctcatcggccatatcaacaaggaaggaagcattgccgggcctaaggtactggagcacattgtggacaccgtgctccaatttgaaggcgaccaacattatatgtaccgcatcctgcgcagcatcaaaaaccgtttcggcagcactgccgagttgggcatctatgagatgagacaggacggactgcggcaggtaagcaatccttcggaactgctcctcagccaagaccatgaaggaatgagcggcatagccatcgcttcggccatagaaggcatacgaccgttcctgatagaaacgcaggcattggtgagcagtgccgtttacggcaacccgcaacgttccgccaccggcttcgacatacggagaatgaacatgctgctggcagtactggaaaagcgggtcggcttcaagcttgcccaaaaggacgtctttctcaacattgccggcggactgaaagtgaacgaccccgccatcgacctggcagttatcagcgccattctgtccagcaacatggataccgccatagaacccgaaatctgcatggcgggagaaataggcctgtccggagagatccgccccgtaaaccggattgagcaacgcatcggcgaagcggagaagctcggtttcaaacggtttatattacccaaatataatctgcagggactgaacacgtccaaattgaagattgagctgataccggtaagaaaggtggaagaagccttccgggcattgttcggctaagtcctccataggatgagtccgccgcaggagatacggattgatacacattatatatagatatagaaagaaacccaatgatacaagaataccaattgcgcgtgttgcctgaggttgcagccaacgaacaacgcataaaagaatacctcatacaagagaaaggagtgagcgcacgcgacattacggctacgcgcattctgaaacgcagcattgatgcacgccagcgaaccatcttcgtaaacctgaccgtgcgtgcttatctcaacgagttgccgaaagagaaagagtatcaggaaaccgtctataacgatgtgtcggacaagccgcaagtcatcgttgtgggagccggtcccggcggactgtttgccgccttgcgtctgatagagctgggcttgcgccccgtcatcgtggagcgcggaaagaatgtacgcgaccgcaagaaagaccttgccctgataggaagggaacagaccgtcaacccggaatccaattacagtttcggagaaggcggtgcaggcgcctattcggacggcaagctctatacccgcagtaaaaaacggggaaacgtagacaaaatcctgaacgtattctgccagcacggcgcttcatcttccatactcgtagacgcccatccccatatcggcacggacaaactgccgcgggtcatagaaaacatgcggaacaccattatcggttgcggcggtgaagtgcactttgagacacggatggatgctcttattattgaaaacgatgaagtgaaaggcatcgaaaccgataccggccggacattccttggtcctgtaatacttgctaccggacactccgcacgcgatgtataccgctggctggcagccaacggagtggaaatagaagccaaaggcatcgccgtaggagtacgtctggaacatcccgcttccctgatagaccggatacaataccacaaccgcaacggacgcggcaaatacctgcccgccgccgagtacagcttcgttacccaagtggacggaagaggcgtgtacagcttctgcatgtgtcccggcggctttgtagttccggcagccagcggtccccagcaaatcgtagtcaacggaatgagccccagcaaccgggggtcccggtggagcaattcgggaatggtagtggagctgcgtccggaagacttggagaataaggagttaagaatgatgaatgaagagccggctttcaactcccaactcaacatgatgtattttcaggaagctctggaacgcctctgctggcaacagggcaacatgaagcaaacagcccccgcgcaacgcatggcggactttaccaggaaaaagctcagctacgacctgccggaaagttcatacgcccccggactggtatcgtcgcctctgcacttctggatgccgccgttcattgccgaccggctgagcaaaggtttccagcaattcgggaaatacagccacggtttcctcaccaacgaagctgccatgattggcgttgaaacccgtacatcggctccggtgcgcattgtcagagataaagacaccttgcagcatgtccgtttgaaaggactgtttccctgcggagagggagccggatatgcaggcggcatcgtgtcggcaggtatcgacggagaacggtgtgcggaagccgcaggccggcttttgctgcaatgagagcagcagagttccgcatgcaggtgaaattcatttccccgcattgcaaggatgatacaaaaataatccgtacttttgcgggtaaacctataccgttatgacagctcccgaaatagcaatcgtcgctcccaacacattgacctctttgggattgcagaaccttctggaagagattatcccaatggctaccatccgtgtgttccgctccttcgccgaactcatggatgatacgcccgacatgtatgcccattatttcatctcttcccaaatatatttcgagcatacctcattcttcctgccccgaaagcccaagaccatcgtactggcaggcggcgacaaccagcctcagctatcgggcgtgccgaccctgaacatctatcaggacgagaaaggcctcgtaaaagacattctgcagcttcatcggtacggacaccagcacggacaccccgacaagcaaccggacggtctccgctccgccatgccgcctcatgccgccggcaacgccgatgcccacgagctttccgcccgcgagatagaagtgctggtgctcatcaccaaaggacttatcaacaaggagattgccgacaaactgaacatcagcctcaccaccgtcatcacccaccgcaagaacattgtggagaaactgggtatcaagtccgtatcgggactgacaatctatgccgtgatgcacggctacatcgatgccgacaggatataaaccggatggcaatccccctgccgccccgcatctcccggcatcataatcctcataaattaggattgcacgggctggagatttcgcgttactttgcaagcgaaacaaaaccagttatgaaacaatataagattattcccctgattctgacgttcctcactgccggtaatgtgtcggcagcagatttggacaccttgaaagtagtagacgtggaagaagtcctcgtcatcgcagcccccaaagaaaaccgcaagctgcgcgaacagcccacagccgtcaccctgctttcgcagcaggacatgcaggcggcacaggtgaactccatcaagaacctgaccggactcgttcccaacatgttcatccccgactacggttcgcgccttacttccgccgtctatatccgcggtatcggttcgcgcatcaacacgccgtccgtgggactgtatgtggacaatatcccctacatcgacaagtccgctttcgacttcgactactccgacatcgaacgcatcgacgtactgcgcggcccgcaaggaacgctgtacggacgcaatgcgatgggcggactgattaagattcacaccaaatcgcctttctcctatcagggcacggacttgcgcatcggcgcaggcacgcacaatgcctacaacacttcgctgacgcattaccaccgggtgtccgagcatttcgctttctctaccggcggcttctatgactacgaaggcggcttcttccgcaacgcagcgctggagaataagaagacagacaagagccaatcggccggcggacgcttccgcggcatctacctgccttccgagaactggaaagcagacctgaacgtgagctacgaatacagcgaccagggcggctatccgtactattataccggcagcgtcaaccccgccgcccaaagcgaagagatgaaatcctacatcggcacaatctccaacaaccgcgaaagcagctactaccgtaacctgctgaatacagggctgaacctcgaatatcaggcgcagcgcttcaccctgagcgccgtaacgggctatcagttcctgaaagaccgcatgttcatcgaccaggattttacggcgaaagacatctatacgctggaacagaagcaacgcatccataccctgagcgaagagattgtgatgaaaagcaaaggcagcagccgctggcaatgggctacgggcgtcttcggcttctaccagtggctgaaaaccgacgctccggtgaccttcagggaagacggcatgggaatgctggggcagatgctgggcagtgtaatcccgtccaaaatagaagttcccctgcccatgcccggtatgggaatcaatatcctgccgtccttgcggcccggcaacagcaatctgctcatcaacggtaatttcgacacaccgcttctcaacggagcgttgttccaccagtctactttccgggacctgttcggccttacgggattatctttcaccgccggtctgcgcctggattatgagaagatgaagatgacctacgactccggcactgcaatggactatacggtaggtatcaaaggagaaatggtgcggggcgggcaggttatcaaagaaataccgatgatgcccgaaacggcgctcaccgtacagtcgcgctaccacggttccatcgacaaggattacctgcaactgctgccgaagtttgcccttcaatatgacttcaagaacaatcggggcaacgtctatgcaaccgtgagcaagggctaccgttcgggcggatacaacatccagatgttctccgacctgttgcagtccagcctgaaaaacgacatgatgcggcagacaaaagaggagattctgaaagccgtagagggttctcccagcgcatcctacaaagaccttatcaacgaaatgttccccgacgcaggcgagaatcccgacgcccgctccgccaccgaatacaaaccggagcaaacctggaactacgaaatcggtactcacctgaatcttttcaataaccgtctgcgtaccgatgccgcactcttctggctggagacgcgcgaccagcaaatctcacgctttgcaggagcaagcggcttgggacgcgaaacggtgaatgcaggcaaaagccgcagcctcggcgccgaactgtccctggctgccgccattactgccgacttcacgctgaacaccagctacggctatacgtatgccacctttaaggactacgtaaccaatgcccgcgtcaacggacagcttcaggaaatcagctacaacggcaactacgtgcctttcgttcccaaacacacgctgaccgtaggcggacagtacattttccgcatcaacccgggatattggctggagcgcatccaactgaatgccggatacaccggtgcgggacgtgtgtactggacggaagagaacaccgtcagccaatcattctacggcacactgaacggacgcatcagtttccagaaaggccgcggacagatagacttctgggtgcgcaatgcactggacaaggattacgccgccttctatttcgaaagcatgggcaacggatttatgcagaaaggacgccccatccaggccggaatagaactgcgttgcagattttagcaaacagagtttgccgacttttacaagcaggtaaatcaggattgtaagcctcttaatataaaccggttgcgtgtaccaaagtaataccccgctttggtacacgaaataccaaccgttggtacgggagctaccaagcattggtacgtgaagtaccacactatggtacgcggactaccaagcgttggtacacggagtaccaactgccggtagccgaggtacctccctttggaatgcgaagtaccgccagccgataccggcaaataacctattcgttgattgccccgcaatgcgggcaaacccctttcgcccctattttctgtccgcaattgccgcagcgatagcgagatgccgccagtgacgaacgcagtttcctgaagaacacccacacaaatacggctataaacagataaccgatgtatatatgggtagtcagtataaagaagaaataacagaaaatgcaacaggaagccagccccaacagatagaacacagccgcttccggactcagttggcggaacaaatcgtcgagcaccgccagcagtacgatgacaaacagccaaaggctcatcaggaaaacggatagcacgaacggcactttaaacggtgagagtgtggggttgaaataaaaatgctgccacgtctccggcacaaacacctgcatcgactcgtacaccgtggcactgaacgccagcaacagacacagcaacaacggatatacactgtctatatcattgaagtagaccatttgcaactgcttccgcctgaacgcgcgaaacaaccatgccgccacaaacagcgcaaaaataacgatgaaataggaagcatgcgtatcgctgaacaggtaaatggcctgcgagatactgtccgtaggcacaaacgcccggatcatgtccttttcccgaagccagccctgcacttcctgagaatgggcgagcttgacccatacgctgtccacactgtccgtcgggtggatggcaaactccgccaccaccactctgtctcccttgtacagtgtattatagcagtcctttacaggcaggcaggctatcgtcaccgaatcttcctgcacttccagattcgtgttccacgtataatgacgctcgtacagataagccagcgaatcgcgggtctttgcccccagtttcccgtcttccaggtccggacggggataatggcaagaagaaccgagaataaggtataaaatataaaatatgaaatttaagtataaggtatgaggcataaggtataaagagcgggacgcacgttgtacggtggcgctgtgtttacggctgtttatgtttgtttcttctttcttcatattatatactttgggcattcattctcaatcatcttcactatccgttatgcgtattcccccataccttatatttcattctttataccgtatgctttatacgtaagctccatccttggcttttaactgctgactttcatttggcagttcttgcagtcgaaagtgaggcggaaacgttttccgtctgttcctaccaggtagtagggttcccggtacggggaatgtcccttttgatgtgtaggacaccagcccatgctgtaacgcaggcaatgtttgcagaacatgagtacggcttcgggtacggcctgcttctcgtatgccggttccacggaagctactccgtgagcctgataaaagctgcgggcggcggtattcatcacattgcccagataggtcagggatgttgccgggaaacggtggcgggtgggtttccacacgtgcaactcacgacggtaagtaatgcggcgggcggcagtcagcttgtctatcgcctggcgacgccagtcggctatcaccgaggcgggtatgaaccagttctgcgacaggttgattgcaatggcgggagctgttgttgccgaggggctgtccgtgccgccgagaggcatgacctcgaaaggagtattccccaatttgccaagttgggtacgcaggttctccggttgcggagtacgcgcaagttcttttggataggggaaagacaaggttatgcggttgccgtcttcgtctgccactgtcagggcaaagcccgaagaggtatctgccagctcccatccaacgccgattttacgttcggcggacttacgggcaaggatgcgctcaaattcctggtcgaaattgcggaaaagacgggtgcgcggtttgatacggggcacatcgcctgccggatacagcttgttgccatccacccgattgatacggaaaccttgcaaacggccctgttcatcgagaaagcagacaccgtctccgttatggaaaggtttcactccggcaacggtaaggtagttgccgcgctgctctttcatcgtacccatctcctcgcccagggacttcggcgtatcgaaagaggagatttcccggtcgcgaccctgcaggaagtaatgggtgaagccgcggctgaaactcttgtccaactggggcgtgaagtcgaaacggcaagtacccgaagaagcacgtacgtactccttgcgacgggcgaaaatggcatccagcttgctgcggtaggcagccgtaacgttcttcacataggaaacgtccttcaaccgcccttctatcttgagggaagaggcgccggcatccagcaggtcttccagcacttcgctttggttcaggtctttcaaagagagcaggtgcttgtcgcggacgattgttttcccgtcggcatctaccaggctgaacggcaggcggcagaactgggcacactctccccggttggcgcttctgccaaaacatgcctgactgacgtagcactgtccgctgtagcttacgcaaagcgcaccgtgcacaaacacttccaaaggtgtttccggacaagcctcgtgaattcggcgtatctcctgcaatgacagctcgcgcgccagcactacctgacgaaagcctgcatccgccaggaaacgtactttctccggtgtacggttgtccatctgcgtactgccgtgcagggggatgggcggcaggttcagacgggtaattcccatatcctgcactatcagggcgtctacaccgatgcggtacagttcccaaatcatcttttccgtttcggcaagctcctcttctttcagaatggtattgaccgtaacgtaaatgcgtacgttgtacaaatgggcatacgccaccaaagcggctatatcttccaaagaattgaccgcagccgcacgtgcgccgaacttcggtgcacctatatatactgcatccgcaccatgattgactgcttcaataccgcactccagattcttggcgggggccaatagttctatttttcgttgcttcatcatatttctttcaccacagaaaggggcacaagaccccactgggttttcggagttcttatttaatttcttcaatattgaacggggtttcctgatatacaaagtagttcagccagttggagaacagcaggttggcatgcgcccgccaccgtaccgatacgcctttgtccgggttgtcgtccacatagtaattgcggggcatctcaataggcaatcccttagccaggtcgcggcggtattccgtatcgagcgtcaggggggagtattcggaatgaccggttacgaaaaactcgcgcccgttacgtgccattaccatatatacccctgcctcttccgattccgaaagcagggtcagtccgggaactttcagaatatcttccttgcggacttccgtgtggcggctgtggggaacataaaacacatcgtcaaaaccacggaaaatgggatacagaggctgcaaggtgcgatgtgcgaatatgccgaacattttcgcgtccagcggatacttgggcacaccgtaatggtggtagagtccggcttgcgccgcccagcaaatataaagcgtggacgtaacgtgcgtacgcgcccaatcgaatatttcggttatctcgtcccagtaggtcacttcctcaaagtccatctgctccacaggggctccggtaataatcataccgtcgtacttctcgtcacgcatcttgtcgaaatccgtatagaaagctttcatatgctctatcggagtattctttgaggtgtggctcttgattttcatgaacgaaatttccacctgcaacggagtattggagagcagacgtaccaaatcggtctctgtcgtaatcttcaacggcatcagattcaatatgacaatccgcagcggacggatgtcctgccgggtggcccgtgaattgtcaatgacgaatatgttttcctctttcagcagctctatcgcgggaagtttatcgggta

SEQ ID NO: 4114 - DNA, 86601 bp, Unknown
  gut microbiota DNA sequence
ttactttttgaaagcgggtgcaaaggtaagaactttatttcatatcttccaaatgttttcggaagttttttttcattctgctttttcaaagggaaatattcagaaagaaataagccccaagcagaagaaataggtaagagttcctacgccgttcctgtcagaatgtcaaaacatcgctgctcccgttctcgaaagcgggtgcaaaagtaggactttataacatacacaccaaatatataaggggattttttcgcgtttttcttgaacatttttataaaacgctgattgacaaatgtgttgaagaacatatctttttaaggaggatggaaagtctggaaaaagggacacattataatatatgcgcatgcgcgcggaaagaaacaacggaaggctgaaagaaaacacggagatacggaagggtattgcatgacacccgggtcttgacatgtctgacatccgggtctcggcacgtctgacacccgggtctcggtatgcacgacacccgggtgtcggacacaagataaaggctaacgggagaaatgacacaggaagaaaacaatacagaaacatgcaacgccaaagaaagacagaaagaaagacggcagaggaaaggatacaaaaaaacaacgacacagtaaaagaacagaagacacagaaaaaaggagaaaggcggctgacagcctggaaaacacgaagcaagccacaaccagacaaacctgttaaaggaagacgcacgttgtattaaatgttaacagaagcaacagtctcataaaccgtgttaccaaacaatagatttccagaaaaaatattggataataccaggaatagaataactttgcaatgtgtttttcatagtattagatttaaggttaacaaaaagattggctgtctgggagagatagcctttttttatggaatatgataaagaaatatgcagcgctcctctgtacataattttttttcgtatatttgcgagaaacttattaaaaaccaatcaaatctatgcttacgaaacttaaccacgtactccttgctggtgttgtagctttggcatgttcttcgtgccaaacagaaaaaaaggccgattaccaagtaatacctctcccccaagaggttgttctgacacaagaaaagccatttctattaaacaaaaatgtttccattacctatccagaaggcaacctcttgctgaaacgcaacgctgaattcttatccggatatatccggcaagccacagggtatactcctcctgtaaaaggcttaaaggacggagaaacggcaaagcatgcaatcaatttaggtttagatgcggatatagccaataaagaaggttatgtgctgacaacaacttcggaaggtattcaaatcaacgggcagacagagaacggcgtgttctacggttgccagacattacggaaatcaatccccgccgaggctcagggagttgatattctgctaccggcaggcagtatcaaagacgaaccccgctttacatatcgcggtatgcatcttgatgtatgccgacatttcttcccgctggagttcataaaagaatatatcgacttactggcgctacacaatatgaatactttccattggcatctgacagatgaccagggatggcgcatcgaaataaagaaatatccgaagctgacggaagtcggttcaaaacgcaactgcaccgttgtcggcaaggcaagaagcggaaaatatgacaacattccgtatggcggcttctacacgcaggaacaagccaaagagatcgtgaagtatgcacaagaacgttacatcaccgtaattcccgaagtagacctgccgggacacatgcttgccgctttggccgcctatcctgatatgggatgcaccggaggaccgtacaaagtatctcccgactggggtatctttgaagatgtattgtgcatcggcaacgaacagagcatgcagtttcttgaagatgtaatggcagaaatcaccgagatattcccttctaagcttgtacacatcggtggagacgaagctccccgtacccgctgggccaagtgccccaaatgtcaggcacgcatcaaagcggaaggtttgaaaacagacaaacaacatacagccgaggaccgtctgcaaagctattgcatgacacgcatcgaaaagttcctcaacagcaaaggaaggcagattatcggttgggacgaaatactggaaggcgacgtggcaccaaatgccaccgttatgtcctggcgtggcacatccggcggcatcaaggctgcacaaatgggacatgacgtaattatgacacccaatctttactgctattttgactatctccaaactgcggacagtaaagacgaacctctcggcataggcggatacgtaccggtagagaaagtatacagtctcgaccctaccgctgcgcttaccgaagaacaggccaaacatatcctcggtgcacaagccaacttatggacagaatatatcgccactaccgaacatgcagagtatatgatactcccacgcatggctgcccttgccgaagtgcaatggacacagcccgaaaagaaagattacgcggacttcacccaacgcctgccgcgtctcatcaagttctaccaacgggatagcatgaattatgccaaacacatattcgatatccaagcggaatataccactacccaagaagaggacggaagcggtagcggagctatagtagccacgcttcgcaccattgacaatgctcccatttactataccttagacggtactgaacccactacagcctccgaacagtataacggaaccggcatcgttatccgccagtccgccgacttgcgtgctgttgctatccgccctgaaggaaaaagcaaggtaacagaaaaaagcttctacatcaacaaagccactttctgcccgattgagctgacaggtacacagcccactccgaaatacgcctttaaaggtgctaccgctttagtagacggaatgagcggaattgacaattatgcaaccggcgagtggattggctttttggatggagacgtaacggctgttatcgacctcggtgcgtcaaacggcaatgccgcaggcaagacagttgccgaattaccggagataaagcatgtctctacccatgccgtaatagacatgggcgcctgggttgcaggatgtacaggcctgacagtatcagtgtctgacgataacaaaagcttccgtgaggtggcagccaaagaatttcccgttgaaatggacagccgtaaaaaagctgtggcaaactatgaagttactttcgaaccggtgaaagcacgctatgttaaagtattaatcaagcgtacccctgccctgcccaaaggacatccgggagaaggaggaacacctttcctgtttatcgatgagattgaagtggaataaggcaacttatcaaaaacagtaacatatacaacaactatcatcctgtcattcggaggaatctaatatccaagaacgacaggatgatattttctgcgaaagtgcatctaaaacatttattcaatcacgaaactcctacgttgcaaatcccgatcctgcgagcttttccccaccatcacatcgtacctgcctgcacaaacccgcatcgtattactttgagcatcccaccattccaattccttgccgttcaaatcgaacactacctcaacactctttccggcaggaatgcggacacgtttaaaagcacgcaaagtcttgcccggtccttctgcgtcatcttgcttcttgaggtaaacctgcaccacctcttcaccgtcacgctgaccgttattcgtaacgttaacggtcaacttcaaaggctctcccaccttaatctgttccttggtcaaggataagttgccatattcaaaggtagtgtagctcaagccgtaaccaaacgggaacaatggttgttgagtcatataacgataggtacgtcctgtcatattatagtcctcaaagtcgggaagctgagacatattgcgataaaaagttacaggcaagcgtccacccggattatagtcaccgaacaatacatctgccacggcagtgccgcccgcctgtcccggataccaagcctgtaggatagcttcacaattctttgtttcaggctccaaagcgatgggcgaaccggaacaattcaccaaaattatcttctttccggcacgatgcaatgcgtggatcaattcacgctgaacagccggcaattcaatgtccgtacggtctccgcccctgaaaccgggaaggttcactcccatctcctctccttccaaaagaggagatataccaccggcaaaaactacaacatcggcatctttcacacaagctacagatgcatcgatatttaccttttgcttgaagccgatatcgaaattcagttgcgcatcgcttctgaaatattcaaagtcaagctcgatgtcgtaaggaacacccgcttttacctgtagcgtatagtccagtgacctgccaccatgcgtattgcggaaacgctttacttcttcgccattgatacgcagacaaccggaaccgtatgtataaatttcgaataccacttcgcccgattgtagaggggtgagcacgctgttgtaagttgcagagaagtcggtcaggtttacgcccggtgcaaaaaccgtagctcccgaggtacagaagcggaaaggagtggttacttgtgtagtagtcaccggggtgccctcatgctttacattgttccaataacgtgccgtaaacccctgtccgtctgccgacttacactggttgaacacactttgaatcagtgttctttccacccaactgcaaccctgttcataaatcagcttatcgtccgctcccaacgcgttccgtattccatccagaatggtgactgtatgtgacggcataccgttataattgccccattgcattacggagtcattagcattaggtcccatgacagctacagtcagaccgccacgtttcaagggaaggatattgtccttgttttgcagtaatgtcatggacttgcgggccatatccaatgccaatgagtcgtgtgcagccgaagctactacggagaaaggaatcttcgtccaagacacatcttccggagcatccatctctcccaaagcaaaacgggcttccagcaggcggagcacagccttgtcaatgtctttctcatcaatcttgccttcttgagctgcctttaccaatgccttataactggagccacactccagatccgttccgttcagcactgcggctgccgaagcagactctgcatcggaatatgccttatgcccgtattcattataaaaatcggcaatagcaccacaatcggaaaggacaataccatcgaacccccaatcgttacggagaatttgcatcagcaaacggttgctgccgcaacaaggctctccctcgaaactgttataggcacacatcacctcctttacaccggcttccttcactaacgcctcaaaaggcggcagataggtttcatacaaatcacgtgtactaaggttctccacgttgaaagaatgacggttccattccggaccggaatgtacagcaaagtgtttggcacaagcatgcaacttatcgtatctcccgtcattggttccttgcagacctttcactaccatgacacccatgcgactggtgagataagggtcttcaccgtaggtctcaataccccgtccccaacgcggatcacggtaaatattcaccgtaggcgtccacatggtaagcccctgataacgctcgtaactgccctgcgatgcgtaatatgtattttttgcacgcgcctcatccgatacggcattgaatacttcatatactgtttgaggcgagaaagaggctgccatacctatcggttgcggaaaaaccgtagccaatccggcgcgtgccacaccgtgcagcgcctcgttccaccagttatagggtttgatacccaagcgctccaccggttgggaagtgtccatcatcaatgctactttttcttccaaagtaagttctttcaataaaagttccgcccgcttatccggagtcaaagaggttgttctgtacgtaggttggctgcaccctatcagcaatagaagaggcaaccaacagataagtttccgtttcatggttgttgctgttttaatgatagtaatcagatttatttaccgtacaaagatacagggttacccgatataccattgtgccaaatgtttcataaagtttactgtatgtatcatgacatatactatttacacatattaatccggtaggaaagaataataccggcagcatgctaataatgaaagggatacgtgtaccaagatatttcacgccgtggtacacgccgtaccacacagtggtacgagcagtaccttgctaaggtacgagacctaccaccctttggtacatgagctaccaaagagcggtacagggaataccagcagccggtaccggcagtaccacccttagaactggaagtaaatgaacggttgtatctccgaactcttcatctgaataaccagatagactatggcaaccagcagcaacgctttccctatcaacggaaggcgaacgaccgccttgctgcaagcgtgctcccaactgtcaggcacgaaatgcaggaaaaagccgagcgccatcaaggcaaacacttcccaatagcccactatcagttgcgggaaaagcccgggacggaaagtcgtaaatatctgcctcaacatatccagcgaagcggagaaatcggcattgcggaagaatatccagcagaagcaaacgaagtggaacgtaatgacgataccgaagaagcggcggatgccacgactgcgttcgcccttcttccgtccggtaacgcccatccagaacttatggacagccaaagcaacgccatgcaacatgccccaaaacacaaaattccaggaagccccatgccacaagccgcccagaaacatggtaatgataaggttggcatactggcgtatcttgcccttacggttgccgcccagggatatatagagataatcgcgcagccaactggaaagcgagatatgccaacgacgccagaactccgtaatggatgccgacttataaggcgaatcgaagtttatgttgaagtgaaagcccaataacaaggcaatgccgatagccatatcgctatatccggagaagtcgcaatagatttgcagtgcatagccgtaaacacccataaggttttccacacccgaatacaaggtaggattatcgaaaatgcgctccacaaagttgatactgatatagtccgagataaccgccttcttgaacagtccgctcacaataaggaaaatccccctgccgaacatctctctggaaacaaacaacggacggcggatttgcggaataaagtcgcgtgcacgcacaatgggacccgccaccaactgcgggaagaatgatacatagaatgcatagtccaacaagttggtgagaggcgttatctccttgcggtacacatcgattgtatagctcagcgactggaacgtaaagaaggatatacccacaggcaggaagatgtccattgcggtaaacgtgccacccgtgagcgaagcaaagaaatcgcagagaaagttcgtatatttaaaatagcacagcagtcccaggtttatcgccagactggctgcaacccacattttgcgttgccactgcacggtggcacgcgccataaggcgggctatgaagaaatcgctcaccgtaacgatagccagcagaaagaaataggcaccgctgcttttataatagaaatagtaagaaaacagggtgacgaacatcaggcgggcggtggtgcggcgctgcaaaagcaggtagaacaggataaaggctgcaaacagccacaggaaaatgccgctgctgaatatcatcggtgcatgcggattgtacaccagcaggtcgtgcaggcgggtagggtctatattcagtttgttcaaaagttcgctaatattccacatcggtcggtttacggctaaatgagttaactacattcactgactgcaatagtcattatatgctttcagcagagcgcgatagaacatctcgccctgcaatgcatatccttccggaagataatgcacatggtcgggacgcatcagacgcgcttcctgccagttgagacaagcccggcggacaccgccgaaagtctcgtacatatcccacaccgccagtccgttggcatcggcaaaacggcggatggtctgtacggcaacagcagtacggggattaatcttataggtacgccggcgacggcgctgacggaaactatcgtatgaaccgggcggagtagtcatcagcatcggaacatcgggcagactcttgcgaagcatgcacaccagttcttccatctgccggtaatgcagtatggagttataacgccggttgtggctctcgttcgttccgaaagagagaatgacaaggtcgggatgcaacgcagcgatatccgccacacggtccggacgggtaaaggttgtacaaaacgcaccgtttatccccatgtccgtataagacagtgctccgaatgttctttgaagcaacccgcccgtggtttcgggaaagatatggccacggatatgactgtcgcccacatgcacgatgcgtaccgtatcgacagcgatgcccaggcggagcatgcgcagtttctcccaaaagggcttcaggatgccgatgctgtctatcagctcgttcccacccagttgccgaaaggctgcgggcagggtgatgagaggaatgggcagcgtatccgtacgctgtccgtagattctaagcgtgtcgcaatcaaatgccgttttctgaagccggggacaacccggaagcacatcttgggcatagttccgttgcaccggcaggaagagcaacgccaataccgcgcagcaaacggcaaaccgtaaatcggccaagtaccggctccttttatggctccgcttcataggcacgcctcctgtcgtattgttctttgccataaaccagagcctcataaagcagttccgccagatgcttgccgccacggaagttgatatgcgtataatcgtaattggctaaagaaggtttggcatgcaccatatccgccatactgccttcaccgcccatggcttcgaacatattccagaaagccaccccgctgtcggccgccagattctgctggtaacggataaggtttttaatgccgggcatggtccgcaggctgccctcttcggttttatactcgcggtcgcccacaccgacaatgagaattccggcttgggggaaggcttgcttcaaatgggcaatggtcgtcagcataccgtcgcgatagcggtcgtaattacgcccgcgttccgtagctacgttcagtccgtactgaaggactatcaaatcgtacggacgcagttcgttaaattcgcgcatagtccggacaggtatggagcgcaaagacagaccagaactgccccgaagcgaaaaattatcgacggcaatcccttgcgtgccgtccatagccactccgtagaataaggtagaatcggcgctctccactttccaacgcacagagccgatacgtcctgttacatccatttcacgaagtccgtcggcaggcgggaatgtcccggtctgcggttcgcccttgtttacggatgccgaaaggcgggcttcgcctttattataaaagaagatagaagcacgttcgcaagtatcgagccgggaagcatacttcctctgtccgccaagctctacgtacgctccgggggtcggaataaaataatggcccgaaacaccttgtttgccacggtcgaagaatacggagtccgtaacggaatggctctgccagccgccaaagctgtgccgcaccgtaggccgatagccgttgaccggagaagtaatcgtcacgaagcctaccccgcagccgccataacgctcctgcaacatcgcacgcaggtcggccgtcaggatatccgcctcaatgaaagaatctccgaaataggcgatacgcaccggacggggctttgccgccaactcatccagcgcgcgatagaaaggtgtcatgccgcgcagggtggagtcgctgtaatcctcaatgcaggtcatgccgctgcgacaggtatccacaaaggcgggcttcactttcgggggcggcggcaacagactgtccggttcgctcacgacttccggcacgggacgcacatcgccaagtatgtctacccgcctcaacacatggccccctatcgtgccccctggcagcaagttcagcagcagaagtaccgccagcacaataagcatcagccaacctgtatgttttaaaacgctcttttccataactaatccggacgcaaagataaagaatcggatgaaaataaatatcgtccttcctaaaaagaaatcgtcaggttcattttaacacagtcttgactgctgtttgtatggcagaaactttaaacagtccgctctatgttccagacaaatgcccggagtcccaattgctcggtctgcttgtccatgttgtgaaggacctccagcaggggctctacccgctcgtcctctaccattgtaagaatggcggagcacatggaaggccaggcgtgactgccgtaatgaggctcaccggtcttggaaccgcgcccgcgaacctgctcccaataagtgaagccccggcaattgagccggtcgagtgtagcaatgatacgctcgtaatatgcctgatcgaatgtgattaatactgatttcattattcaattattaaatgtcaactattaattattagcctgttcctcaaagtaagcatccaattgcttgcgcatcttgcgacgttggcgtttgatgccgacaccaccgaagatacaatacatcgtaggaacgtaaatcaaagtcagaatggtggaaaccgccagaccgccgattacggcaatcgccataggactccacatctcagaaccctgaccgctgctgatggccatcggaatcataccgagaatggtagtcatggtcgtcatcaacaccggacggagacggctcttgcctgccgtaaccacggcattcagcaccgactgcccgcgttcgcggcagagaatggtgtagtcgatgagtacgataccgttcttcaccacgataccgatcaacatgatactgcccagcagactcatcacactcagcgtcgtattggttatgaacagcgccatcagcacaccgctcatggcaaacggcacggagagaatcagaataaacggataggtaagcgactcgaactgggctgccattacgataaacacgaggatgataatcaatacgccgagtgttcccaaatcgcggaacgaatcctgctggtcttcaaaggaacccgccacctgaatggttatgtcggacggtttctccattctatcgataatggcattgcccgcagccaccacgtcacccaacggagcgccggaaatgacagcagacaccgttacgatacgttcacggtccttacgctcgatagtaggcggagcaaaacgttccaccacctttcccaaatccttgatacggacgccctcgcctttggcattgtataccaatatgttctcgatactttcaagactggtacggtattcgggggcgtagcgcaccttgatatcatactcatcgccgtcttcacgatacttggaagccgtagcgccattgatacggttgcgcagataggtggcggcagtagagaggttcagtccgtgaagcgccagcttctcgcggtcgaagtccacctggtattcgggctggtaatcgctgcggctgatgttgacttcggacacgccttttacgttcagcagttcgcgcttcaggcgggcggcaacgctgtcggtttcttccatactgtagccatatacctcgaaatcggcggatgcctgggccgacatacccgtattactaccgccgaaaataacctgtgccttactgaattcgggataagccttcaggtcttcgcgcatttcctcgcagactgtctccagcgtaacatcacggtctgccgggtctaccaaactgatattgaaggaaatgatgtgcgaaccgttgtcctgcatggaagcccaggtattatccgaatcggcctgccctacggtatagttgcatatcttcatgacacccttatacttctgcagccactgattggtaagtttctgcgaaacctcctgcgccacttctttacgcgtaccgataggcaactccaactgtacggcaatacgggcattgtcctgcgccgggaagaactccgtaccaatggtctttgcacagaacaggctcaggataaagaatatcacacaaccgacaagcacgaccatacgatgacgcaccgcccagttgagcatacgtgcataccagttgtccaagccgtccaatgtgtgctctatcggcccgaagaatattcggaacatcttggactgtttacgctgcaagcggagcagttgcgaacagagcatcgtcgtcagcgtcaaagccgaaacggtggatacaaacataatggcgcacatcatccagcccaactgcttgaacagcacgccggacataccggttaccatggtcagcgggaagaatactgcaatcatcgtcagcgtagaagccactacggaaatagccacctcgttcgttccgtgaaccgctgcctgcttcgggtcggaaccgcgctcgatatgtgtcgtgacattctccaacaccacaatggcatcgtccaccaccataccgatggctatggagagtgacgaaagcgaaatgatattaatcgtattccccgatattgccaggtatatgaacgaagcaatcagagaaagcggaatcgtaatacagataatcaatgtagcccgccagcgtcccaggaacaggaataccacaatcacgacgaacagcagggcgtacatcaccgtctccgtcaaactgtcgatagtgttcaggatgttttcggacgtatccacaatgacgcccaacttcacatcgctcggcagattcttctgcagacggggcaacgcctcttgtactttcctggaaatctccaccgagttggcgcccgactgtttctgaaccacaatcatcgcaccctgcacaccgttgttataggtttcctgcgcacgttcctccacggtatccacaatccgggctacgtcgcgcaggtaaacggtagcaccgttataggtgcccaccaccacatccgccagttcacgggaatcgtcaaactcaccctccacacgcaaggaataagtctcattgccgatgtcgaaattaccgcccggtatgttcttgttctccgcaccgataatggaactgattgtttcgatactcaagttgtacgcctccagcttataggggtcgcagtacacctggatttcacgctgcggcgcaccgctgatagacaccgtacccacaccgggaatacgcgccagagggtttaccacacggtcgtccagtattttgtaaagtgccgactggctttcgtttgcctgtacggacagcagcacgataggaatcatatccgtactgaacttgaagatgataggattctccacatcatcgggcagttcggaactaaccatatccagcttgtcgcgcacatcgtttgtcagcacgtcaatatcattaccgaactcaaactccagcgtaatcagcgacatattctccgaagaacgggaagtgatgtgcttcaaatcgctgactgagttcaaaacattctccaacggacgggtcacgttgttctcgatatccgaagcacttgctcccggataggccgtcatcaccataatcgtattcgtatcaatgtccggatacagatcaataggcaacttggacaacgagaacagaccaaatatcaccactgccaggaagcagagcgaagtcataatcggtttcttaaccgcaccttcatataaactcatattattagggattagggattagcatttaatgattagggattagtgattaacgtttagtgtttagagattagcaacttatttaccgacaaaccactaatcacgaatcactaatcgctaaccgctatttctacttccattccgttcaccagtttggtttgtccggctataaccacccgggagttgtcgggcacaccggaaatcagctcgtattcggcccccatgcgacgtccgagctctaccttattataggtaaccttgccgtccttgtacacatatacataacggtcgccggaaccggattgctttacgatggccaaatcgggtacaaccacattgtttttggttccgaagttaagcgtggcgcgggcaaacattccgggacgtaccctccggtctttattggcgagtttaatctctaccggaaaagtacgggtgttcgggtctactgtaggatacaccagactgatatagccttcaaagggttcgtctccgtaaacatccagcttcacggctaccggagcgcctttcttcacttgggtgaagtaagtttcggaaacattgataagcaacttcacaggcataatctgctctaccaccagcacgggttcgccgccgctgtacatatcgccgctgtcatagtttcgggcagttacaaccccgtttatcgggctgagcaacgcggtattctccagcagattgcggtaggccgtttcttttatgtccagcgccatcttggctgcatcccactccgatttggatgcaccgcccactttatacagttcgtccatacgcttgaactcaatctcctgattgtccaactggaactttgtctgtttcaggttcgcctcatccatgctgaccagcttctgacctttggacacgcggtcgcccacttccaccaatatcctgtcgatgcgtaccggagaggaaggagctatgttgttctttacctctgcttctacggtagctgtgtactcatgaatctgctctaccggacgtgcttttacatccgccagcttcactctcggcttttcgtccacctgctcaacggcaactttgtcttttccaccgctgcaagcgcccaacagtgctactgcaagcagggcaatcaattgaaaacgtttcttcatatcgttgttcttgttttatttctgattactgatgatatagtctcttcccaacacctggtcaaggtcggccttagccaccaggtagtcatatatggattggttgtaagtaagctccgcctcggtgagctgaacctgcgaagtattcagttcgagtaccgtaccctttcccacttcataacgcttgccggcaatctgcaccgccttttcggcctgcatcacattctccttgttactggatacctgctccgagctggctgccatattatcctgatagcttgtaatctgcatgttcagcttacgttccgtatcgatacggttctggtccaactggcgcatctggatgcggttggatttcagtttcgtaaagttgcttgccttatataaaggaatactcagattgaataccagcgaagagctgccgctgtaatggtaatcgaagatgttccaactgtcgttgttcatggactggtactgataagaataccccaatcctatcgtcggcatgaagttggtgcgcaaggacttgatattcttctgaagcatcagacggtttaactccaattgcttcatggtagtattgttcaccaaaccttcgtgagcgtcattctccaactgattggcaaacacgatgctttcataggccgccaaactgtcgtcaatcttaatctccacatcggcggtaacgcccatcagcaccttaagttgcagtttggaaagcgtaacggcatttccggcggaaatgacactcggcttcacgctacgcatctgcacctcggcggtgattttatcgaattcgcttaccgctccctgctgatatttagcattgacaatattatagttctcttccgccagttcatagcttttctgcaaaacttcgtatgagtcctgcgacagcatcagctgatagtaggctttggtcacctggttcaccaaatccagtttggaagcccgcgacttctccactgccagctctatatccgtctttgtcatcgacatggcgcgatagacggaaggggcaaacaatggtaaactgatattcaatgttcccgcagcggtattcgccttgtcctgccccattttcacgatttggtcgccgatactgaactgcggagccgtgatggtatggctcatacttcccgtaatacttgcctcgggcaacaagttctgccaagtttccttacgactcactttcttgagggcaatctcctcttccgccactttaatggtgggattgtcgctcaaagcaatctccaaggctttatcaaggttcaagatcagggtatccctcgtcccttgcgcccgtgcatggctgcctgccaagactatggcaataagcaacagccattttttaccctcaaaaaatctctgcatcttcataaactattaattgttattctatttggtttccgtgtcattgtctgcaggcacaacctttttacggtattcccggataaacgcttccagctcgtgcgccccctgttccgtagagattccgcgcagaaaagtgaacattatagactcatagacttcaaggaaggaatactctttgcagatgtccgtattcatcaacacgtctatctgctcccttaccaacagattgataatggcaaagtttacatcatcacggaaaatgccctgcttcacaccttccttaaagaagtttaccgtttcttccgaatcctggttatgacggttcgtcatcagcgcataggctttgggatacttcttgatgtcttcaaagaatttcttattggtggcatggaactgttcgatgctgcgctgatagcatttcagcaggacttccaatacatttccggaggtggcaagtacattcttcaaaaattcatccccttccttctgacctttcagtatgcactcttccaacaaagtttccttatccgaaaagacttcataaagggtacgtttggaaatgcccagtgaagtggcaatatcatccattgtaatactcttgataccgtgcgcagaaaaagcttccaccgcagtgtcaattatccgctctctcagttccggacgggggacaagatgcttggtatattcgctcatttctctttcttttaaaattcaaaaactctttttatccatttttcaaaataaaaacaagcaaatatagaaagaaaacttaattaagcaattaagttttctttcttttctcaaatggttaataaaaattagggatataacagatatacaaggagaaatatcctaataatcaaatttggtgcggctgaggaatgccactgtcttatggatttccttgtacattacaatatcgtccttcacaaaggggacttccttgcggtattcgcacaggaaacgttccagaatgggcgaagtcttttgcggacggcggaagtcgataccttgcgcggcattcatcaattcaatggcaaggatatgttccagattgtccatgatgcggaacagttttgttgcggcattggcgcccatactcacatggtcttcctgtccgttgctggatacgatggaatcgctgctggcggcataacagtacatcttgttctggctcaccatggaagcggcggcatattggggaatcatgaaacccgaattcagaccgggattggcaaccaggaactccggcagtccgcgcaaccccatgatgagctgggcaatgcggcgttcggagatattacccaactcggcaagggcgatgcccagaaagtcgtacgaaatagccaacggctgcccgtggaagtttccacccgaaatgatgcggtcttcatcggggaagatagtaggattgtccgttacggaattgatttcggtcagcagtaccgaagacacatacctgatggcatccttcgtggcgccatgcacctgcggaacacagcggaaagagtacgggtcctgcacatgcttgccgggacgggcgatgagttcgctgccttccaacagcttgcggacgttctcgcctgtctcgatttgtcctttgtggggacggatttgctggatacaatccatgaaggggtcgatacggccgtcaaaggcttccaacgaaagggctgctatcaaatcggctttcttggagaggcggaaggctttgaggatggcaaagacaccgttggcgctcataaactgcgtaccgttcaacaaagcaagtccttccttgctcatcagcttgacgggctcccagccgaactcgtcgagtacgctgattgcctcgcgcttcttacctttataatatacatcgcccacaccgataagcggcaggaaaagattggcaagcggcgcaaggtcgcccgatgctccgagcgaaccgcggtcgtagacgataggcatcacatcgttattgaaaaagtcgaggatgcgctgtacggtaatcacctgcacaccgctatgccccaaagaaagcgcatgtgccttgagcagcagcatcagcttgatgatgaccggacgtatctcctcgcccacgctgcaagcatggctcttgataaggttctcctgcaagatgcccacttcgtcttgcgatatattcttactacacaacgagccgaacccggtagttattccatacaaaggctctgccgattcaacggttttcttatccagatagtcgcgacatttctgtatgcgttccttagcttcgggagccagctcaagtttcaggttctcgttaatgatgcgttcgataagttcgaaagtcagctcgcccgaaccgacataatagacattcttcatactttgagctcctcattgatttcgtccaacaattctttttctttggcgcaggcaaggcgttccagttcatcggcttcggcttgcagtttggcaacgagctccttatccttcagcgaaccgaggttaatgcgcacattcatcaaggcccccaacacggcagagcgggccgacatcattgccacgcaagcatcggttacggcattgcggttgcccaggcgggctacgtccataatgacggtcatcagttcgaaggcattgcgcgccacctgcataggcacaagtgcggcaaacttcgtagcttcctgaatggctgcgctgcgggcggccttttcctcatcggtggccttcggcatcttgaagcaggcaaatacgctgtcgtaggcttcggagtcgcggtctatgtcgccgatgaaggtatctttcacttgcaaagccacttcggagatatgtttcatcagttcttcatgctcctcatagcctttcttaccgatagtgaggttggcaaccattgccgccaaagccgaagcgacggctccattcaatgcggcgatgcttccgccgccggggacgggatcgctgcccgccactttattcaaaaactctttgactgttaaatcgactaacatgggatttaagtattaaatataaagtataaagtattagttttctgtttcaaagcaccggataaagcacaccttccttcaccgtggtgtgtacacagttcatccccacgtaatagggcaggaaatggtaattgtccgtgttcagcaccacaaagtctcctttctttcctacctcgatactgccgatgctgtcggcccggttcaaggcggcggctccgttcagcgtgagggcggttatggcttcttcgatactcatcttcatatagatacatgccagcgcaaaggtcagcgggatagaaccggagaaacaactgccggggttgaggtcggtggccaatgctacggcacagcccgcatcaatcatctcgcgccctcgggcatacggctctttcagggcaaaggcggtgagagggagcaatgtggcaaccacgcctttatccgccatggcacggatgtcggcatcggaagcatgcagcaagtggtcggcggagacggcggagagttccgcagccagccccgcaccgcccagcggtacgatttcatcggcatggagtttcagtgccagtcccatttcacgggcggcggtcagcaagcggcgggactgtccgatagagaacacgccttgctcgcaaaagacatcgcaaaactctgccagccggttttgaacaacggcgggcatgacttcacggataatgaaatccacgtaatcgtccgtgcgtccattgtattcctgaggcactgcgtgcgcgcccagaaacgtaggaacgatgtccacacgcttgtgctcgtcattgttcagactgcgcatcacgcggagttgcagcaactcggtttccttgtccaggccgtagccgctcttgccctcgacggtggtaactcccatagtgctcatttgcttcaagaagccctctgccttggcgcgcagttggataaagttgcactcacgcgtagctttcactgtactgacaatgccgccgccacgctccataatggacatatagctctcgcctttcaaccgccaggagaattcctcggcacgttccccgccaaacacgaagtgcgtatgcgaatcgacaaagccgggcaaaaggcacttgccgcgggcgttgtaatgccagtagcgctgataatagccgtcgcgctcctcgccacggttagggcctacgtaggtgatgacgcctccggtaacttccaccgtagcgtcatcgatgatgcaaagttcttccatttccctgccgcggcgggcggaaaagccgacgggagttacgacacgggcattgaagattatcagattttctgtcatagctgtttctgtttcattttcttccggttactcgcacagtctgtgtattcctgcactcattccattatccgggcttccagcacctgctgcatcgagaagttctccagtccgaggtaataggaagccgtatcaatcagcgcttccataggtacgagacctataatctcactgcccacgatgctgacaccgtagcggcgcgcttcgatgcgtaccagttcgaaggcacggtaaagcgccgtgcgggtatagtcggtcatgttgatggatacctgggtaatcccccggtctttcagttccacgcccatagccttgcagtagcgcagcccgccgccgatgaaacgtatctttttggcaatgtcgtgcgcaatctccagactcggcgtattgaggttgatgttataggccaccaacggcatgcgtgctcccactgccaccgtacctgcggtaggatgacgttcggcgggaccgaaatcgggttgccattcgggaagctttatcttctccgccatgccctcgaactctcctttacggacagccgcaaggttctcgcggtgaggtgccgaagcggatttctcgtagaggaatacaggcaggttataacgttttgccacttccgcacccacttccttagagagcgcaatggcctcttccatggtcacattcttgattgggataaaaggaacaacgtccacagcgcccatacggggatgctgcccctggtgtttgttcaggtcgatgagctgtacggccacgccgatggcttcgagcacggcatcgcggagcggttcgggctcgcccactacggtaaccaccagccggttgtggtcttcatcgttactgtaatccagcaacttcacaccttgtttgccacggaaaggggctacaatacggtctattttctgcaagtcacgtccctcgctgaaattggggacacattctacgattcggttcataacggttatgtttttggagcttactacagaggagacggtatttttctttgatattatctccggacagacctattattttttcagacagaagaacaaaaggacataaactatgcaggcggatacctgccggacatcacaattaagtttatcctcttaaccttatatctttttgcgcatttgttctttggttctcttatattctgaatatcctttatgttctttggttcgtctgtctgaaaaaagaatactcttatgtccttatctcctctataaataagcctgttactattattttatatatttatcaatcagttcttcatccgccacgtaaggcatcgtgatgtgataaccttccgcatgggtgcggttaaactcttcactggtttccatggcatgtgcatttcgtgcccacgaacggcgtgccacaccgcccatcacatcccaaagcatggcagagcgcaagatttcgtccacccgttcggaaccgtcgcacaccatgccgaagccgccgttaacggccttgccgatacctactccgccgccgttgtgcaacgccacaaggctcatgccccgcgcgcagtttccggcaaagcattgcaccgccatgtccgccattacgttgctgccgtccttgatgttggatgtctcgcggaaaggagagtccgtaccgctgacatcgtgatggtctcgtcccagcataatgggccctacttcgccgcggcgcaccatttcgttgaagcgcaaggcaatcttcatgcgtccctcggcatcctgataaaggatgcgcgcctgcgtgcctaccaccaggttgttcttctcggcatcgcgtatccagttataattatccaaatcctgtccgcggcgggtagggtcaatgcactccatggcggcacggtcggtctttaccaggtcctcgtgcttgccgctaagacatacccaacggaaaggcccgtagccgtaatcgaagagttccggccccataatgtcttctacgtagctgggaaagatgaaaccgttcttgtcgctgccgttgcgcgctatttcgggaacgccggcatcataaacggctttcatgaaagagttgccgtaatcgaagaagtacgtgccccggccgacaagctcttttatggcaaggaagtggcgcttcaacgtagcatccaccttacggcggaattcggcaggattctcatgcagcatccgggtacgctcctcgaaggtcagtcccacggggcagtagccgccgtcgtatgccgcatggcaggatgtctggtcggaaagcaggtctatatgtatctgttcctttacggcatattccaaaaggtccaccacattgccgtgataggcgatggaaatcggagtgtgactgtccatggcctctttggccagcgcaaaggcttgcggcagcgaatccgttacgtgtcccacccagccttgacggtggcgggtttcaatacgcgaggcatccacttcggctatgacagccgccgcaccggacatctcggcagctttgggctgggcgccgctcataccgcccaggccggaagagacgaaaagccgtccgcgcaggtcaccgtcctgagggatgccgagcttcagccgtccggcattcaaaagggtgttgaaagtgccgtgcacaatgccctgcggcccgatatacatccacccgccggcagtcatctgaccgtaattggctacacccatctgcatggctgtatgccagtcctgctgattatcatacagccctaccatcatcgcattcgtaataatgacgcgcggcgcttcgggtttcgacttgaagagtcccagcggatgcccgctttcgataacgagcgtctggtcatcggtaaggacttcgaggtattgttttatcaggcgatactgcatccagttctggcacacctgccccgtctcgccgtaagtgacaagttcgtaagggtaaagggctatgtcgaaacaaagattattgtctatcatcacctgaaaggccttgccctcgatgcagcgtcctttgtattcgtcgatgggctttgccttgaggtcgccttgcggacggtagcggtagccataaatgcgtccgcgtgtacggagttcttccataaactccggagcgagtgtttcgtgcaattctttagggatgtagcgcagggcattcttcaatgccatagcggtttgtgccgcgtcaagagtgtagccgcggtcgggtgcccgccggataccttctacgaaggtgggataagggggcagtgttttgcttaaagttatctccatagtatataaggtgaatagttacaaattgtcagaatacactggcttgtatctgccgcaatataaaaataattcccgatattcgcaatagaatgccgggaattttatcatttagtcaataaagactccttatcgtattacttgaaatactgtctggtccactcacctgctattcaaaaataaacaaaggcaatgaatccactttttttgcataataagaaaagtaacttaatatagctcagagaaatacaaacagaccattttaataaagttgatattgaacggtgagggcagctacagtgccgttatgatccaaagtataatccgtaatcagaatacgaagatatttcacttcatcattctctgtcttgaaagctacagcataaccatgattaggctgagccactggaaaatctttgacataatatctattgtcatctggtagaatcaacttttttattacttccggtaagctatttactttccctacatcttctatcattacatataaaccattataggattgcacctcaaaggcattataagaaggaaacgtactattccataccccactttgacgtataaaagaaagtacaccaagacacccacgcgagagatacagtccatactttcgattaaaatcttcatagtaaacaggtatttcggcactgctccattttaagttgtatttcaacaccgccgtcttcactgccgttgttgccgtatagtcccctttcacttccgttcccccagctcccggctcatcagtaggttcattatcatcgcttccgcaacttgcacaaaacgtcccgaacaagaacatcaaacagggtaaccaaaataatctcattttcatatctataaatgtttatttaagatatacccggttccaaagtataacaatgtatttttcaatctcttttgagacagggatacaaaagcgacgtggaaccaaactttattgtacttcaaggttctggaatacctatacactgaataaagttaagcccacgtcgtagagagacgcgggcgttacaactttatattctcagtgtatttgaattttccagattctgaagtacaggaataaaagctaacgctctcttatatatgtctatttcctaatttgtctttataccataggcattcttttttacatttataataaattataataaccgcaaatatataaataaaataattatccgcaacacaagcagacactctttatgcaaatccacccaaccgatagctactccacatttgccctactctattcaacacccggcttacccgccaactgacgcaggtattttccgacaacctctgccgattcgttcgtttctttttcaaaagcctctttcagctccggataatccgccagcagttccagcatcttctccctgcccacaaactccgagcgtcccgtttccggattcaactcataatacacgcgcgcaaagaccagccccgaggcattgatggcatctcccacttcaccgcccagcttggttgcatcgggcggagttgccgtacttgcggcagcctgccccacaggttgcgcacagaaataaatcctgcctttcacccacatggcaggtgcataccagccgccaaagcggtagcgtttataacgcattttcttacaatttacatatagcgacgtatccatccgcaccgcataacagcgagacttcaaatatctgcaaagaccggaattgtccttcgcttctatacggtaatccgctccccccatcagataaatctgattcttggaacgcttctccactttcagtatggtgaccgtatctccacgcccttccaccaactctttcaaattggaatacattatctgctgtgccgaacatggcaagaccaataatgccaatagccctaacacccaacctcttttcatatcgctatcctttctttttgaaactttgcatactcaggcgaaaggtacattttttattgatattcagcaaatatagaagagaaaaaacatcatattccccgcaaaatcatttgcatatacctatcatcggccttgcatgccgccatcgccgcggacggaaacctatggtacggaagcccgaagccaccttgccgctacaagcaagatacgatactgattacaagcaagatgcgtgtaccaacaatgtacctcctgctggtacacgccgtaccaaccgttggtagctcccgtaccaagcagtggtagctctcctaccaaaccgtggtaggcttcgtaccaacccgcggtacttcgaataccgccagccggtatttcgcatatccttaggggaaaaaacatatatttcgttatctttgtcgttctctaaagcatggaaacaaaatggaaagcattgaaaatataaaatcggtctaccagcgtattgaggatgaagcccgatgcgaattgaataaagtacagcaacagatttatcgcatcagcacactgcggctgctgctgttcgtggcaggaattgcggggattatctatttccggacggaaagttggtcagtgctgacgggcattgcacttgtcaccctgctgccgttcattctcctgataaaataccacaaccgcctgtttcaccgcaaagattatctggaaaagaaggcagaggtcaaccggcaggaactggctgcgctggactatgacacatcctgcttcgacggcggcgaggaatttgcagaccctgcacatctgtatgcttacgacctggacgtattcggcacgcattcgctgttccaatacatcaaccgtacctgtaccgaaccgggaagacgcctgctggccgactggctggggcagcatcttacaaagaaggaggatatactggagcgccaggctgccgtacgcgaacttgctcccgaactgaaattccgccagcggttccgtatcctcggcctgctgcataaaggcaaggcagccgatgaaaccgagttgaaagcatgggcggcaagtcccgggacatttcgcaagagcagactcttgcgtgtgctaccggcaaccgttacgggtatcaacggtgcatgtttgcttttggtcgttgccggttacctgccggcaagtatgtggggagtaatctggacactcttcgtcgttgccgggtttgcctttaccggaaagattaccaagatacaagccgtgtacggcaagaaactgcagattctcggaacgtatgccgggctgctcaggcttatggaagcccgccccatgcaatgccgcctgctgaaaagcattaaagaggaaatcggcggcgaacagcggaaagcatccctctccatcagccgtttgagcaagctgatgaacgagttggaccaacgcaacaatatgttcatgtacgtcatcctcaacggactgttcttctgggaactgcggcagattatgcgcatcgaggcatggaaagagcaatatgccggcgaactgcctcagtggctcgacgccctcgggcagatggatgctcttaactcactggcaacctttgcctataatcatcctgcatatgcttatcctactctgctcgacaaggctgatatggctgccgccaaagccggcatctcttccgatgcaaggaaagccggtgcggcaaataccggcagcaatgcccgtttcatactccgtgcaaaggctttgggacatcccctgatgcatcgcgaccgttgtgtgcgcaacgacatcgacatggagaaacgccctttcttcatcatcatcaccggcgccaacatggcaggaaaaagcacgtacctgcgtacgataggcgtcaattatctgcttgcctgcaccggcatgcccgtctgtgcggaggaaatggaagtgtatcccgcgcgccttatcaccagcctgcgcaccagcgactccctgaccgacaacgagtcttacttctttgccgaactcaagcgcctgaaactcattatcgacaaactgcaagcgggcgaagagctgtttatcattctggacgaaatactcaaaggaacaaactcgatggataagcagaaaggttcattcgcacttatcaagcagttcatggctttagaggcagacggcatcatcgccacccacgacctgctgctgggtacgctcatcgaccttttcccggagaatatccgcaacttccgcttcgaggcggatatcaccgacaatgagctgaccttctcctaccgtctccgtccgggcgtggcgcagaacatgaacgcctgcttcctaatgaaaaaaatggggattgccgtcaccgactaatccccgttttataccgataagctaaagcgctcgcttttatctgcacaaacttacactgtcctgcacttagacaggaaagccgagaccgccgctgcctcgctacccgtgaagtaacgtacggaagtcaccggagtataggtgtaaggcacaaactgaaacagttgcaatgcggcaaatttattgtcctgcgaaatcataatgtccatacgtacattaccgctcgattcgctctttatacccgcctcgcagtccggattgccgcgctcaatcatttcggtcagctcacctatatgcttcaaatcgaaaaacatgctgcgctccttcgtcacgcttcctgtaggcaggtacaccatttccttcgacttccagaacaaacggaatacccccagcagaatcaatgccgtgcccactaccatcagcgccatgcttatggtggaagatttatcgtgcatttcaaaaatagaaacaaagataagaagacccgccaccatcatcgccaatgagatgagcagtccggaaacacttgtacgttttgcaatatcgggatgtgaagacgcaaaaagagttgcgtcgatagttttagttgccatattataaacagttttataaattaatgaattattgtaatagagaataagggagtacaatctcttctctatacggacatttatccgatgcccatacacagaaaaaagacctgaatacaataagacattaaatcagaatccgcctcagtgtgaaaatatagtattcacacacaggcttgcaaccatagtaagcggtggaatcataaagcttctctttatgcaaagacagaaccgcttcgcgccgggcaagcttatccacccagtcctttagtgaaaagatgtattcggcggtataggaacgctgaatgcgggacatggcaagcgagtgcagatgaccgctgttactcgccagctccgctactggcagatagggcaactgaggtgaagtaaagcatgtgccatcctgagaatgagcggcagtcaccgcctgaatatccgtagaatctcctgtactcaccccgccatcggaagtaaatacagtgcccgacgtctgccacaaggccaacgcaagcaccaggagtcctatgattttcaaatatctgcccataactgtgtgcaaatatagcggtttatttcacaggtttgttttatacacacatcttttaaggtttgttcatgtaaaaagaggattgccaaaatacgtttgattgaatctctaaaaaatcttgcttcgtcataaatagaaaggttatagctgttgcaatattgaagtggcaaaattacaccacaaccataacctttgaagtaggtacttctgttagtgcttaccgtaaaaatgataaaagcgtaaacaaaaaagccgccccaatcgctgggacggctttctatatataaaaagaatagttgaattattctgcttttgcttcttcagcagcaggagcttcggcaaccggtgcagtttcagcagcgggagcagcttcggcagcagcgctcttctttgaacgacgggtacgggtagctttcttagccactttttccttagccatgttttcgttgtagtcaacgagttcaatgaagcacatttctgcgttgtcacccaaacggttaccagtcttgatgatacgagtgtaaccacccggacggtcagcaatcttcacagagatttccttgaacagttcagttacagcatacttgtcttgcaaattgctaaatacaacacgacgagagtttgtcgtatcgtccttggcttttgtaatcaaaggctcaacgaacttcttcagagctttagcctttgcaacggtcgtagtgattcttttgtgctttatcaaagaacacgccatattagccaacatagcgtttctatgagaggcagtacgacccaaatggttgaatttcttattatgtctcattttttattctttatctaatttatatttagaaatatcagttccaaacgacagattcagactttccagcaaatcatcaagctcggtaagcgatttctttccgaaatttctgaacttcagcaaatcggtcttgttgaactgtaccaagtcgcccaaagtctctacatcggcagccttcaaacagttgagggcgcgaaccgagagatccatatcgacaagcttggtcttcagcaactgacgcatgtgcaatacttcctcatcaaactcttcattgccgtcagcatcgttgctttccagcgtaatcttctcatcggagaagagcatgaagtgataaatcagaatctttgctgcctctttcagagcttctttcgggtgaatggaaccatccgtagtaatctcaagcaccagcttttcgtagtcggtcttctgctcaacacggaagttctctacctgatacttaacattacgtatcggagtataaatagaatcgataggaattacgttcacatcggtgcaatattcgcggttttcgtcagcaggaacataaccacggcccttgttgatcgtaatatctatctgcatagttgattttgaatctaaatgacaaataactaattcaggatttaacacttcaaatccagtcaaatacttacctatgtcacctgctttaaattcacttgaattctcgattgtaatacttaccttttcgctctcgaattcttcaactacttgcttgaatctcacttgtttcagattcaagataatgttagtaacatcctcttttactcccggaacactggaaaactcgtgctcaacaccttctatcttgatagtagtgatagcaaaaccttccaatgaagaaagcaggatgcggcgcagtgcattacccacggtaataccgaaaccgggctccaacggacgaaattcgaactttccgaatttagagtccgcttccaacattaatactttatcaggtttttgaaatgctaatatcgccatgaaattaattattatttagaatacaattctacaatcaaatgctctttaatgttttcaggaatgtctgctctttcaggtacgtgcaacagcttacctactttagcattgtcatcccattccaaccaaggatatttgctgtgattaaagccggccaatgagttggcgataacttccaaagatttggatctttcacgaacgccaataacctgacccggttttactgcatatgaaggaatgtttaccacttcgccatctacagtaatgtgcttgtgactcaccaactgacgggcagcggcacgagtcggagcaatacccaaacggaatactacattgtcaagacgaccttccaacaattgaaggagtacctcaccggtaatacctttagcggtagctgccttctcaaacaagttgcggaattgtttttccaaaactccataggtgtatttggctttctgtttctcacgaagttgaacaccatattcagaagtttttctctttcttgaattaccgtgctgtccgggaggatagttcttctttgacaatactttatctgctccaaagataccttcaccgaatttacgggctattcttgattttggtccagtatatctagccatttcttttaaatatttaattgttattcatgaacttaatttgttgcagccgcgattgtagagaagaaattacaatccaataacaatatcaagtttcattttttattaaaggtaaatcttaaactctacgtcttttcggaggacgacaaccattatgtggaagcggagttacatcaatgatttcagtaacttcgatacctgcaccgtggatagttctaatagcagactcacgtccgttacctggacccttcacatatgcctttacctttctcaagccaagatcgtatgctactttagcacaatcttgagcagccatttgtgctgcataaggagtgttcttcttagaacctctgaatcccatctttccggcagaagaccaagaaataatctgaccttcactattagccagagaaacaataatgttgttgaaagatgaatgaacatgcaactgtccattagcatctacctttacatttctcttttttgctgcaactgttttttttgccatatcaacaattattatttagtagcttttttcttattagcaacggttttctttcttcccttacgagtacgggcgttgttcttcgtactctggcctcttacagggagaccgatacggtgacgtacaccacggtagcaaccgatatccattaaacgtttgatgttcaattgaacttcagagcgaagatcaccttctactttatactctgcaccaatgatctcacgaatcttggcagcctgatcatccgtccagtcttttactttcaggtctctgtcaacacctgctttgtccaaaatctttgctgaactactacgacctattccatatacataggtcaacgcaacttcacctctcttgttttgaggcaaatcgacaccaactattcttatagccatatactaaattattttttttgcaaaaataataatattatccttgacgttgtttatacttaggatttttcttgttaataacatacaaacggccattacgtctaacgatcttacactctggcgtacgtttctttaaggatgctcttactttcatatcttaattttatttatatctaaatacaattcttcctttcgataaatcgtaaggagacatttcgactcttaccttatcacccggcaggatcttgatgtagtgcatccgcatcttaccggaaatatgggcagtaatctcatgtccgttttctaattcaacacgaaacattgcattagacaatgcttcaactataactccatcttgttctattgcagattgctttgccatattaacttcttaaattgctttatctcctaatacttcttcaatgaatttgaacgatgacagaatatcggcttcaccgcttctcactgctatggtatgctcaaaatgagcggcgtacttgcaatctctggttctcaccgtccagccatcacgttccattactatctgccggttacctaaagttatcatcggctcgattgcgatgcacaacccctttttcaacattgtaccgtaaccgcgcttaccgtagttgggcacctggggatcttcgtgcatgtccttaccgataccatgaccgacaaactcgcgcaccacaccataagaattggactcgcaatgttgttgtatagcatatcctatatcacccaaccgcttgccttgaacagcattctgtattcctatatataatgcttccttagtaaccttcagtaatttgcgaacttcttcgtcaacctcacctacacaaaacgtataggccgagtcgccacaaaagccattcatataagtaccgcaatcaacagaaactacatcaccctctttcagtactacattatcactcggaataccatgtaccacctgctcgtttacagaagtacaaatcgaagccggaaacggatcgccatattggttcggaaatcccttgaaagtaggaacagccccattatctctaatgaactcttccgctactctatccaactcctttgtagtaactccgggctttataaccttagctatctcagccaacgtttttcctacaagcaaattactcgcacggagcagctctatctcatcttcagttttaagaaatatcattcttcaaataagattaatacgcagccactgtaccgctacggcctttaatacgtccagatttcagcaaaccgtcatagtgtctcatcaacaaatgactttcaacctgctggagagtatcaagaaccacacctacaagaattaacaaagacgtaccaccgaagaattgagcaaactcggctttcacaccgaagataccggcaaatgcaggcataatggcaaccaaagccaagaagaaagaacccggcaaagtgatacgtgacataatcacgtcaatgtactctgctgtttgctttcccggtttgatgcccggaatgaaaccgttgtttctcttcatatcctcagccatctgagtcgggttaatggtaatcgcagtatagaaatacgtaaacagtataatcaataccgcaaaaatcaaattataccaaaagcttgtatgatcagttaatgcatgtatgaaaccgctcgcattatttacatttgaaaatccaacgagagtaataggaatgaacatgattgcctgagcaaaaataataggcatcacgtttgctgcatttactttcaaaggaatgtattgtcttgcaccaccgtattgcttgttaccaacaatcttctttgcgtattgtacaggaatctttcttgtaccttgcaccagaagaatggcaaatgcaatgacaagcaacaggactacaagttcaatcaggaacataaccaaaccaccggtcttatcggtcatacgggaaatcaattcctgaaataaagactgcggtaaacgtgcaataatacccaccataataatcaaggagataccattacctattcctttgtctgtaattctctcaccaagccacaaaataaacatacttccagccgccaatataatggtagaagtaagcataaatagagtccaatctaatgaagcatttaaggaaggaccagcctgcattttaagattgagcaaataagaaggagcctgaaccagcaaaatgataatcgtcagataacgggtgtactgattcatttttcttctaccactctcaccttcacgttgcaatttctggaaatacggtaccgcaatacccagcaactgaatcacaatggaagcggagatataaggcatgatacctaatgcaaagatagacgcattagagaacgctcctccagaaaacatgtttaacaaggctaaaagaccctcgcttgtttgttgatgcaactgtgtcaacattgacggattaatacccggcaatacaacatacgaaccgaaacggtaaattgccacaaacaatatggtaatgaggatccgttgtctcagatcctcaattttccatatattctttaatgtttcaatagcttttctcatcgaattagagttttactacttgtccaccagcagcttcgatggcagcaaccgcagtcttagagaatgcgtgtgcttgtacatccaacttagcagtcaaagttccgttacctaatacttttaccaactggcttgaagaaatgaaaccggcagcgatgaagtcattgatacctacagtctgcagatttttagcttcggccaatttctgaattgtatccaagttgatagccttatactctacacggttgatatttttaaagccaaacttaggaacacgacgttgaagaggcatctgaccaccttcaaaaccgattttcttagagtatccagatcttgatttagctcctttatgacctctggtagaagtacctcccaaaccagaacccggaccgcgtccgattctttttcttgttttagtagatccctctgcaggttttaaattacttaagttcatattgtaattcgttttatattcaacaaataattacttaacaatggtaaccaagtgtttaaccttatccaccattccaagaattgaaggagtgcattcgtgttcaaccacacgattcaacttatgaagtcccagtgcatcgagagttctcttctgatcagcaggagcaccaattctacttttaacttgtttaatctttatagtcgacatattcttcctccttatcctctaaatactttttccatactaactcctctgttctgagcaaccatacgggcatcacgcatttcgcttaatgccaaaatagtagctttcaccaagttatgtgggttggaagaaccttttgacttagccaaaacatccgttacaccaacactttcaagcactgcacgcattgcaccacctgccactacaccagtaccgtgagaagccggtttaatgaatacctcagcaccgccaaacttagcagactgttcgtgaggaaccgtacctttcagtacaggtactttagtcaggttcttttttgctgattcaacacccttagcaatagcagcggttacttcacctgctttgccaagaccccaaccgatgataccttcttcatttcctactaccacaatagcagaaaaactaaaagttctaccacctttggttactttggttacacgattaatagcaaccaatctgtctttcagttctatatcgtttgtaatcttaactctattattaagtcctgccataatgattaaaatttaagtccaccgttacgagcagcatcagccacttcttttactctcccatgatacaagtaaccattacggtcgaaaacaacagtagttatacctgcttcctgagccttctttgcaatcagttcacctactttggcagcctgttctttcttaggcatcttttcagtcatacccaaagaagatgcagcagccagagtcttaccggacaaatcgtcgataatctgaacgtagatttgcttattgcttctaaacacactcatacgcggacattcagttgtacctgaaatcttattgcgtactctatatttaatcttaatacgtctttctatttttgttgtcataatactatcaatttaaatgattatttagcaccggctgatttaccagactttctacgaatttcttcgccaacaaacttaatacctttacctttatacggttcaggcttacggaaagaacgtattttagagcaaacttgaccaagcaattgtttgtcgcaagattccaaaaggataagaggattcttgtttctctcagacttagtttctactttgatctcagcaggcaactgtataaagatactgtgcgtataacctaagttcaattcaataatattgccttgattagaagcgcggtaacctacaccgacaagttccaactctttcttatatccttcagatacaccaacaaccatgttgtgaaccaatgaacggtacagaccgtggaatgcatgcttctgcttcggattatccagcattgcattttcattctctgtcaaaacgacatggccttcttcgatggcaacattgatagcaggatttacatattggctcatttcgcctttgggtccctttacggtaaccacatcatccttcagagtaactgttactccagcgggaatactaatgggtaattttcctattcttgacattgctgattcctcctattaatatacataacacaaaacttcaccgccaatcttcagttcagcggcttctttgttggtcattacacctttggaagtagatattatagcaatacccaaaccattaataactcgcggcatctctttgtaaccggtatattgacgcaaacccggagaagaaattctttccagcttcttgatagcgttaactttgttaaccggatcatacttcaaggcaacctttatagtaccttgaggaccatcttctacaaacttgtaattaagaatgtagcctttttcaaaaagaatcttagtgatttcttttttcaaatttgaagcgggaacttcaacaactctgtgctttgcttgaatagcgttccgcaacctcgtcaaataatctgctattggatcagtcatataaaaataaattaaattaatcaggactgccctgacaatatttaaaaaacaaaaattaccagcttgctttctttacacctggaataagaccgttggatgccatctcacggaactgaattctggagattccgaactgacggatatatcctttaggacgacctgtcaatttgcaacggttgtgcatacgaatcggattagaattcttgggcaggtcctgcaatttctgtgcagcttcaaaagcttccgcaggatcacctgttctaacgatttgcttcaatgcagctctcttctcggcatatttggctactaatttggcacgctttacttcacgtgctttcattgattcctttgccatattatcaatcttttttagcgttcttaaacggtaaaccgaattctttcaacaaggcataaccttcttcatctgtttgcgcagaggttacaaaggtaatattcattccgagaattctggtaatactatcgatattaatttcagggaaaataatttgttcctgaataccaagggtatagttaccctttccatcgaacttactttcaatacccttgaagtcacggatacgcggcagagctacacgaaccaatttttcaaggaattcgtacattctctcgcgacgtaaagttaccataacaccaatcggcattttcttacgcaacttaaagttagcgatatctttacgagaaatggttgcaacggccttctgacctgtaatagcagtcatttcattaattgccacttcgataatcttcttatcagcaacggccatacccaaaccctgattgataacaatcttcttaagtacgggtacctgcattgaagaagaatactggaactgtgatttcaatgcaggcgcaatacgctctgcatattctttcttaaggctagcagtattactcattacttaatctcctctcctgattttttagaataacgcactaaagtgccgtcagcacttaattttctaccaacacgcgttgctttgccagtctttggatcaaccgggttcaagtttgaaatgtggatagaagcttcttgcttcacgataccaccttgcgggttctttgcattcggttttgtgctcttagacaccatgttgataccctcaacgattgcacgttttttatcaacaagaaccttcaatacacgaccagtcttacctttgtcttcaccagaatttacgtaaactgtatcgccttttttaatatgtaatttactcattacttaaatcttttacaaaattaaagtacttcaggagcgagtgacacaactttcatgttagcagcacgaagttcacgagctaccggaccgaaaatacgactacctctaatttcacctgcattgttcagcaacacgcaagcattatcatcaaaacgtatgtaagaaccatcagcacgacggatttctttcttagtacgtacgatcaaagctttagacactgcaccttttttaatatcacttgaagggataacgctttttacagaaacaacaatcacgtcccctactgaagcatagcgacgacctgtaccgcccaaaacgcggatacagagagcctcttttgctccgctgttgtcacatactgtaagtctggattctacttgtatcataattacttagctctttcaattatttcaaccaatctccatctcttagtcttgctcaaaggacgagtttccatgatgcgtacagtatcgccgatattgcactcattcttttcatcatgagcatggtacttcttcgtcttactaacgaacttaccatatatggggtgtttttccttaaacttagctgcaacagtaatggtcttatccatcttatcgctcagcacaacccctgttctttcttttcttaaatttcttgcttccatcaagctcatcatttattgttaagttctctctggcgtaattcagttttcatacgcgcaatagtcctgcgtaattgtttgatctgagcaggattatccaaaggagaaatagaatgatttaaaaccatttggctatagttagccacttctgcttctactctttctaccaagtcattggtagtcatttctttaatttctgcaattttcatacttcttacgcattttgattttggatatcataatcacgtcttaccacaaacttggttgtgataggaagcttctgtgcagctaagcgcaaagcttcttttgcgatttcataagatactccttcagcttcgataataattctacccggtgtaacaggagcaacgaatccctcggggctacctttacctttacccatacgtacgtcagcaggctttcttgtaataggcttatccgggaaaatacgaatccaaatctgtccttgacgttgcatatatcttgttactgcaatacgcgcagcttcaatctgacggcctgtaatccacttcgtctccaaggccttaataccaaaagaaccgaaagccagttggtttcctctttgggcattacctttttgacggcctttttgttgtcttctgaattttgtctttttcggttgtaacataattcctaaaaatcaaattcgttagcgattatttttctttcttttgaagttctttccgccattgtttccgctattgcttccacgaccgctttctttgctttgcgtaaagttcggagccaactctcttttaccataaacttcacctctacaaatccaaactttaataccgagaagacctactttagtcaatgcttctgcatgacaatagtcgatgtctgctctgaaagtgtgcagcggagttcttccttctttatacatttcagaacgggccatttctgcaccattcaaacgtcctgaaatctgaattttgataccttccgcacccatacgcattgtgttggcaatagccattttgatagcgcgacggtaggcaattttaccttctacctgacgggcgatgttgttagccacgataacagcgtccaactcaggtcttttcacttcgaagatattgatctggatatctttatcagtgaccttcttcaactcttctttcaacttatcaacttcttggccacccttaccgataatgatacccggacgtgctgtacaaacggtaatagtcacgagtttcagtgtacgttcgattacaattcttgaaacacttgctttagcaagacgagcgttcaaatatttacgaatcttgctatcttccagcaaagagtcgccgtaattctttccaccataccaattggaatcccagcctctgataattcctaaacggttgcttattggattaactttttgtcccatttaccttaattttgatcttcgttattacttttagaaccaacgaacaacgttacgtggtttgaacgcttgcggattctgtaacctctaccctgcggagccggtctcattcttttgagtgtagcgccaccatcaacaaaaatcttggttacgaacagctcgccgctttcagctttacgttcgtttttctgctcccagttagcaattgcagagcgcagcaatttttccactctggcggcagcctcttttgaggagaacttcaaaacgccgagtgctctgttcacttccatcccacgaatcatgtcagccacgagacgcattttacggggggaagtaggaacattttgcaatttcgcaaaatacatggtcttaagggcttcttttcttttttcagccgatattttttttcttgctcccattatattattactttattatttcagataaatcctgtcttattttttcttgttaccagcgtgtcctctgaatgtacgagttggagcaaattcgcccaacttgtgtcctaccatgttttcggtaacataaacaggaataaatttatttccattgtgaactgcaacagtatggcctacaaaatcaggcgaaatcattgaagctctggcccaagtcttaactaccactttcttgcccgattcattcatggcaagcactttcttctcaagcttaacgttaatatacggacctttttttaatgaacgactcataatttactcaattaatcagattacttctttcttctctcaataatatacttagacgattgtttcttcggagctcttgtcttaagacccttagcatacaatcccttacgagatctcgggtgtcctcctgaagcacgtccttcaccaccacccatcgggtgatcaaccgggttcataacaacaccacggttacgcggacgacgtcctaaccaacgagaacgtccagctttacctgaactttccaatccatgatctgagttaccaacgctaccgatagtagccttacatgtgctgaggatctgacgaacctcgcctgaaggcaacttgataacgcagtatttaccttctcttgaagtcaattgagcgaagttaccggctgaacgaaccaaagcagcgccttgacccggacgtaattcgatgttgtgaattacagtaccgaccggaatattctgaagcggaagagcatttccgatttccggagcagcagtttcacctgacatcaaagtcgcaccaacttgcaatccattgggagcaataatatatcttttttcaccatctgcataaaacaacagagcgatacgagccgaacggttcggatcgtattcaattgttttaaccactgcaggtacaccgtctttatttctcttgaagtctacgatacggataatcttcttactaccgccaccgatgtagcgcatggtcattttacctgtattgttacgaccgccggaagatttcttaccaaatacaagagacttttctggtactcgtgcagtaatttcttcgaaagtaccaataattttatgtctttgccccggtgttgtgggcttaaatttacgtactgccatttcttttaaatattgctataaaaatcaatagtatctccttctttcaacgtaacaacagcttttttgtaagcgtttgtacgtccgttgatgatacctgcgcgtgtataacggctcttgttcttgccggcataacgaattgtattcacatcaaccacggtaacgttgtaaagggcttcaacttcgttcttaatttccagtttattagcttcaggacgcacaataaagccgaaacgattgttcgacttatcagtaattgcagtcatcttctctgtcactaacggtttaataataattcccattatttaagcctcctttttacattaagatattgtcgatagcagaaagtgcactttcagcaaacacaacaactccagcgtccaatactctgtaagtatttaaccctgagatagtctgcacattagcgccctttacgttacgagccgacaaatatacgtttttatttgcttccggtaaaacaacaagcagctttttgtcagaaactttaagattttttgtcataacaacaaaatcttttgtcttaggagcttcaaaattgaagtcttctacaacaatgatggcattgttctgagccttatatgccaaagctgacttacgtgccagagcttttactttcttattcagtttgaagtagtaatctctcggtttcggaccaaatacacgtccaccaccaacgagtaccggtgagttcatgtcaccacgacgtgcaccaccgccacctttctggcgaccgattttacgagtagaaccgctgatttcgcttctttcctttgacttgtgtgtaccctgacgctggttagccataaactgtttaacgtccaagtagatagcgtggtcgttgggctcaattccgaagatagactcgtttaacgtaatctttctcccagtgtcttcacctttaatgttatatacgttaacttccattatttctcaattattacgattgaacctttgcaaccaggaacagaacccttaatcaaaaggagattgtgctccgcgattacttttaatacttgcagattttgaacagttactctgtcaccaccaagttgtccgcccatgcgcattcccttgaatacttttgcagggtaagaacaagcaccgatagaacccggtttacgggcacggttgtgctgaccgtgagtagtctgacctacaccaccgaaaccatgacgtttcacaacaccctggaagcctttacctttggaagtacctacaacgtctacataatcagcgccttcgaacaattctacggtaacagtatcacccagattcaattctgtctcaaattctttgaactcagccaagtgtttcttgggagttactccagctttcttaaagtggcccataagaggctttgtagtgtgcttttccttcttgtcctggaaacccaactgaacagcttgatagccgtccttttctacagttttcacttgagtaacaacacaaggacctgcttcgataacagtgcatggtacattcttaccctcggcactgaaaacggatgtcattccgattttttttcctaataatcctggcatttcacttaatttttaatacttacactttgatttctacttccacaccactcggcaactccaacttcatcagagcatccactgtcttagctgttgagctatagatgtcgattaatctcttgtaagaagagagctcgaattgttcacgcgacttcttgttaacgaaagtcgaacggtttacggtaaagatacgcttatgcgtagggagaggaattggaccgctaacgatagcgcctgttgtcttcaccgttcttacaatcttctcagctgacttgtcaaccaagttgtggtcgtaagatttcagtttgattctaattttttgactcattactgtcttagttattaatagtgttattatataagataaagtcccgtaggttaagagtcattcgctaacctacggactttagttattattttagattaagtctgtacgaccttttacttcttccaatactgccttggcaatagagttggaaacctgagcgtggtgagaatataccattgaagaagttgcacgaccagaagtgatagtacgcaacgcagttacgtaaccgaacatttctgccagcggaaccattgccttcacgatacgagcaccggaacggcttgattccataccttctacctgaccgcgacgcttgttcaagtcaccgataacgtcacccatgttttcttccggagtaacaacttccagcttcatgataggctccatcaataccggacctgccttagcgcaagcgttcttgtatgcctgaatagcacagatttcaaatgacaactggtcagagtcaaccgggtggaaagaaccgtcgatcaaagtcaccttcagtgaatccaacggataaccggccaatacaccgttcttcattgcagttgtgaaacctttctgtacagacgggataaattccttaggaatattaccacccttcacttcgtcaacaaactgcaagccgccctgagtaaagtcctcatcaaccggaccgatgttcacgatgatatcggcaaacttaccacgaccaccagactgtttcttatacacttcacgcaagttaacagtcttcgtaatagcctccttatagttaacctgaggtttaccctggttacactcaaccttgaattcacgcttcagacggtcgatgataatatccaagtgaagctcacccataccggaaataactgtctgacctgtctgttcgtcagtcttaaccgtaaacgtcgggtcttcttcagccaatttagccaaaccgttagacagtttatccatatccttctgagtcttaggctcaactgcgataccgattaccggttcggggaagtccatagattccaatacgatcggtgcggtttcgtcgcacagcgtatcaccggtatggatatccttgaagcctacaccggcaccaatatcaccggcgccaatcacctcaacaggattctgtttatttgagtgcatctggaacagacgtgaaacacgttctttcttaccagagcgagagttataaatataagaaccggcttcaatcttacctgaataaacacggaagaaagtcagacggcctacatacgggtcagttgcaatcttgaacgccaaagcagaagtcttttcatcctcgctcggcttacggtcttcttcagcaccggtttcagggtttgtaccaaccacattctctgtatccagcggagaaggcaagaatgcacaaacatagtcaagcaaagtctgtacacccttattcttgaatgaagaaccacacaacataggaacaacagccatctgtactgtagcgttgcgaagagctctcaatatttcttcttctgtaatagtagaaggatcatcgaaatatttctccatcaaagcatcgtcgaactcagctactttttcgagcatcttatctctccattcgttagcttcgtctaccaaattagcagggatttcctctactgtatagtcggcacccatagtttcgtcatgccagtagatagctttcatcttgataaggtctaccaaacctttgaaagattcctcagcaccgataggcacaacgataggacaaggattagcacccaaaacgtccttcatctgacgaacaacctcaaagaagtcggcacctgaacggtccattttgttaacgtatgcgatacgcggtacgttatatttatcagcctgacgccaaacagtttcagattgcggttcaacgccaccaactgcacaataagcagcaacagcgccgtcaagaatacgcaaagaacgctctacctcagcggtaaagtcaacgtgtcccggagtatcaatcaagttgattttataagtattaccggcatatttccaacgagtggtagtagcagcggaagtaatagtgataccacgttcctgttcttgctccatccagtccattgtagcggcaccatcgtgcacctcaccgattttgtgagtcaaacccgtataaaacaaaatacgttcagaggttgttgtctttccggcatcgatgtgggccatgataccgatattacgtgtcaaatgtaaatcattctttgccattttctaattccttttactttaagtttttaatctttgattggttatctcttatagtattagaatctgaaatgagcaaacgcacggttagcctcggccattctgtgcatatcttctttacgtttgaaagcaccgccttgttcattgaaagcatccataatttcagcagccagcttgtcagccattgatttaccgccacgcttgcgggcaaagataatcaaattcttcatagaaattgactccttgcggtcaggacgaatttcagtaggaacttggaaagtagcaccacctacacggcgagacttcacttccacttgaggagttacgttgtccaaagcttttttccagatttcaagagctgatttctcttcattctgcattttgttcttcactgtttccaaagcggcgtagaagatttcataagaagtattcttctttccgtcgtacatcaggtggttaacgaacttggaaactttcacatcattaaaaacgggatccggaaggatgatacgttttttaggttttgcttttctcatctgtctgaaagaataatgtttttcgttcttggttgtttacttctgtcttcttcaactctccctccggagtgtttactcaacctttagcatttccaacaaactaaaacgtaagttattacttttaattttactgtttatcagtttggccgcctaattatttcttcttagcgggagcagcctgtcccggtttcggacgtttagcaccgtatttagaacgtctttgagtacggttagcaacacctgcggtatccaaagtaccacgaacgatgtgataacgtacacccggaaggtcttttacacgaccgccgcgaaccaatacgattgagtgttcctgcaagttgtgaccttctcccggaatgtaagagttcacctctttaccgttagtcaaacgtacacgagctactttacgcatagctgaattcggtttcttcggagtggttgtatacactctcacgcaaacgccacgtctttgaggacaagaatccaaggctggagacttacttttctctaccaaaacctcgcgtccttttcttactaattgctgaattgtaggcattttaattgtttttagttatatattatgtttatattaattcaaaactatacacttttgggctgcaaagatactaataagttttgaataatcaatgcactacaagtttttttttgattttatgcttcacccttaatgttaggcaatggcggaataggttgctcatccggcatgcggatagggccgaaagcacgttcatatttaccaacattttcttcaagcgcacgcagcagacgcttggcgtgttcgggtgccaatacaatacgcgattgaaccccggctttgggcattcccggcattacccgaataaagtccatgataaactccgaactggaatgagtgataatggcaagattggcatacgtgccttgggccacttcttctttcagctctatctgtaactgtccgttattattttcctgattttccatattatcgtatatcattataattgaatgacaaatatacttctttcattccgacacacaaaatactccaagataaaagtaacagtacgacctgaacaaaaaaggcacttgatatgtcctgaaattgcatggtctgttcgaatagaacacatcgtctgatttacctgaacagaccatgcgtttaccccaaaccgatggtctgttttatttgaggcaatagcatgcttccccctcctccccttcaccctcaaacatccatgaataaaaggttgtgaagggggcatgcaaatctttattttgctattacattacactcttcttacatcagaccgaaaagagagccggtttgcaacaaatataaaaaaagaagagaatcccgggagatcctcttctttcactataaaaattactgattgtattaacgtagtaattactcttctaccttatcatcaactgcataatcgagcaccgttttcttgttggcaagcatacgatcgtactcttctttcgaaccgacaataatcttctcgaattcgcgctgacctgtaccggcaggaatcaagtgaccgcagataacattctctttcataccttccagacggtctacctttccgttgatagcagcttcgttgagtaccttcgtcgtttcctggaaagaagcggcagacataaagcttgaagtctgcaaagccgcacgggtaataccttgaagaatctgtgtagaggtagcaggtacagcatcacgtactgaaacgggtttcaagtcacggcgcttcagcatggagttttcatcgcgcaacttgcgggcagtaacaatctgtcccggttgcaggttctgagaatctccggcatctactacaactttcttgccccagatacggtcgttctcttccatgaattcgagcttatccactacctgttgttccaagaagcgggtatcgcccggttcatcgatttcaaccttacgcatcatctgacgaacgataatttcaaagtgcttatcgttaatcttcacaccttgcagacgataaacgtcctgtacttcgtttacgatatattcctgtacagccgtaggacctttaatggcaaggatatcggcaggggtaatggcaccgtcagacaacggagtaccggcacgcacgtagtcgttctcctgtaccagtatctgtttggacagtggtacgagatatttcttaacttccccggtcttagaggtaacgataatttcgcggttaccacgtttcaccttacccattgtgacctcaccgtcaatttcggaaaccacagcaggattggacgggttacgtgcctcgaacaattcggtaacacggggaagaccacccgtgatatcacccgccttaccaacggcacgcggaatcttcacgattacttcaccggcttttaccttctgtccgttttccactactacgtgaccacccacaggaaggttataggtacggataagttcgccatcttcagtcatgatgtgcgctgtaggcactttcgtcttgtccttagactcaatgatgatgatttcgcgcaaaccggtagattcatcggactctaccttataggtaacgttttcaataacgccttcaaactcaatcttaccggtagcttcggtaatgataactgcgttgaacgggtcccaacgggctataagtttgcctttctctactacttcaccatccgctgcatagagtgtagaaccataaggcacgttatgcgtagaaagtatgatacctgtattgacatctacgaaacgtacttctgccagacggcctactaccaccttagccggttcgcctgcttcgtcaataatatctactgtacggagttcttcaaattccagacgggaaggattcttggcaacaatacttgcattggcagcgatattggctgccgtaccaccggcatggaacgtacgcaacgtcaactgtgtacccggctcaccgatagactgcgcagcgattacaccgacagcctcacctttctgaaccatacggcttgtagccagattacggccgtagcacttggcacaaacacccttcttggattcacaagtcaatacagaacggatttcaacgctctcaatcggagagtcttcaatcttctgtgcaatggcttcagtgatttcttcaccacctgcaacaagcaattcaccggttgtggggtgaacgatatcatgtacggatacacgtcccagaatacgttcgtacaatgtagcgattgtctcatcgttattcttcaaagctgtacaaaccagtccgcgaagcgtaccgcagtcttcttcgttgataatcacatcgtgagatacgtcaaccagacgacgggtcaagtatccggcgtcggccgtcttcaaagcggtatcggcaagacccttacgagcaccgtgagtagagataaagtactccaacacggaaagaccttccttaaagttagaaagaatcgggttctcgataatctgaccgccttcggcacctgccttctgaggtttcgccatcaaaccacgcataccggaaagctgacgaatctgctccttagaaccacgggctccggaatccaacatcatgtatacggaattgaatccctgatcgtcgctcgaaatagttttcatcaaaatgtttgacaactcggagtttacatgtgtccagatatcaattacctggttgtaacgctcgttgttggtaatgaaacccatgttatagttgttgattacctgctctacttcttcgtaacctttctgcaccagcgcttctttctcttcgggaataataatatctcccaagttgaacgaaagaccgcctttgaatgccatctgataaccgaggttcttgattccatccaggaattcggctgcttctgccacaccacaaaccttgattacgtgactgatgatgtcacgaagtgacttcttagagataatcgtattgatataacccgctttggcaggtacaatttcgtttacaataacacgacctaccgacgtgtcgtgcatcatcttgtctaccacattaccgttttcgtcaatgtccttaacgataacgctgataggtgcgtgaatgtcgcacttaccttcgttgtaggcaataagcgcttcttccggaccgtagaaagtgaggccttcacctttagctcctttacgcagtttggtgatatagtacaaaccgagtaccatatcctgtgcgggcactgtgataggcgcaccgttggctgggttcaagatattatgtgactggagcatcaacatctgtgcttccagaatagcttcgttgctcaaaggcaagtgaacggccatctggtcaccgtcgaagtcggcgttgaatgccgtacatgccaacgggtgcaactggattgccttgccttcaatcatcttcggctggaacgcctggatacccagacggtgcagtgtcggagcacggttcaacaataccggatgtcctttcattacatgttccagaatgtcccagataactggttccttacggtctacaatcttcttggcactcttcaccgtcttcacaataccacgctcgatgagcttacggataatgaacggcttgtagagctcggccgccatgagtttaggaataccgcactcacccattttcagttccggacctacaacgattacggaacgtgcagagtagtcgacacgcttacccaacaagttctgacggaaacgtccctgcttacctttcaaactgtcggaaagtgacttcaaaggacggttggcatcagtcttcactgcgcttgacttacgagagttatcgaacaatgaatcgacagcttcctgcaacatacgtttctcattacgtaaaatcacctcaggagccttgatttcaatcaatctcttcaagcggttgttacggatgataacgcgacggtaaaggtcgttcaagtcggaagtagcgaaacgcccgccatccaacggaaccaacggacgaagttcgggcgggataaccggtacgatacgtacaatcatccattcgggcttgttgcgtccgcgtgatgcacggaaagactcaactacctgcaaacgcttcaaagcttcgctcttacgctgttgtgaagcatcgctgcctgcacggttacgcagttcgtaagacaatgaatcaagatcaatgcgcgacagcaagtcataaatggcttctgcacccatcttggcaacaaacttattggggtctgaatcttcaaggtactgattatcgcttggtaacttttccaacagatccagatattctccttcttcaagcaaatcatactgtgccacttcgccttccaatatacccggctggattactacataacgttcgtagtaaataatagcatcgagtttcttggtcggtaaacccagcaagtaaccgattttattaggaagcgaacggaaataccaaatgtgagccaccggcacaaccagctggatgtgtcccatacgctcacgacgtactttcttttctgtcacttccacaccgcaacggtcgcacacaatgcctttgtaacggatacgtttgtacttaccgcaatggcactcataatccttaataggaccgaagatacgctcgcagaacaaaccgtcgcgttccggcttatacgtccgatagttaatggtttcaggctttaaaacttcaccactcgaattctcaaggatttcttcgggagaagccaaaccgatagagattttcgagaaattactctttatcttgttatcttttctaaaagccatacttttatatataattgataattgagaattaaaaattgaaaaacaatgttgataagtcgggaattgagaatcaagagacattagctctcaaccctcaatttccaaatttcaatttattctaagttgatgctcaagcccaaacctctcaactcgtgcaacaatacattcagtgattcaggaatacccggagctggcatcggctcacccttaacgattgcttcataagccttggagcgtccgacaacatcatcagacttgatagtcaggatttcctgcaggatatgcgcagcaccgaatgcttcgagcgcccaaacctccatttctccgaaacgctgaccaccgaactgtgccttaccgcccaacggctgttgcgtaataagcgaataaggaccgatagaacgtgcgtgcatcttatcttcaaccatgtgaccgagtttcagcatgtatgtcacacccactgtagcctgctgctcgaaagcctcacctgtaccaccatcatacaaagtggttttaccataacggggcagaccggccttgtcggtccattcgttcaggtcatccagcgtagcaccatcaaagataggcgtagcaaacttaactcccaagttctttccggcacgtcccaaaacagcctcgaatatctgaccgatgttcatacgtgaaggcacacccagcggattcaatacaatatctaccggagtaccgtctgccaagaacggcatgtcttcctgacgtaccacgcgtgaaacgatacctttgttaccatgacgaccggccatcttatcaccaacaccgatcttacgcttcttggcaatataaaccttagccatctggataatacctgcaggcaactcgtcaccgatagtaatagcaaatttcttacgtttcaactctgcatcgagttccttatatttcttgataaagttcgttaccagtgcacggatcaattcattggtatgctcgtcttttgtccaattgctcaactgaatagcagtaaagtctatatcactgaaatcagaagcatagaatttagcgcctttactgattacttcagctcccatatagtctttcacaccttctgaagtatgattttctgtgagcttcaaaagcttatttaccaatattttcttcaaatcagccaccttgctatcgaactcatcatcaatcttcggcaacaatgccttgtcggccaatttagaactacgagtcttgataacgcgggagaacagacgtttaccgataatcacacccttcaaagaaggagatgccttcaaagacgcatctttcacatcaccagccttatcaccgaatatggcacgaagcaacttttcttccggagaagggtcagactcgcctttcggagtaatcttaccaatcaaaatatcacccggctcgatacgggcacctacacgcacaataccattctcgtcaaggtctttggtagcctcttcacttacattaggaatatcggaagtcaactcttccataccgcgcttcgtttcacgaacttccaaagagtattcctctacgtgtacggaagtcaaaaggtcttcgcgaaccacacgttcgttcaatacgatagcgtcctcatagttgtatcccttccaaggcatgtaggcaaccaacaggttcttacccaaagcgagctcgccctgttcggttgagtaaccctcggtaaggatttgtcccttcgtcacacgctgacctttctcgcaaataggacgaaggtcaatcgtcatgttctggttggtacgacgccatttgggaatagtatattctttcagtgcagattcgaagcttacaaactcttcctcttccgtacgatcgtacagaatgcggatagtcgtagcatctacaaagtcaaccacaccttcgccctcagcagtaatctgcgtacgagagtcacgtgcaagctgacgttcgatacctgtacctacaatcggagcttcactcttcaacaaaggaactgcctggcgcatcatgttcgatcccatcaacgcacggttagcatcgtcatgttccaagaacggaatcaaagatgctgcaatagaggcaatctgctgtggcgatacgtccatcagctctacctcatcaggagctacaaccggataatcggcatcctgacgggattttactttgtcgcggacgaaagttccgtcttcattcaaaggtgcattaccctgagcgataatcttctcttcttcttcttcggctgtaaggtaaaccaaaccttcatccgaaaggtctacctttccgttagccaccttgcggtacggtgtctcaataaaaccaagctgattgattttagcaaacacacaaagtgaagatatcaaaccaatgttcggaccttcaggcgtttcaatcggacaaagacgaccgtagtgagtatagtgtacgtcacgcacctcaaaaccggcacgttcacgtgacaaaccaccgggacccaaagctgacatacggcgcttgtgagtgatttcggcaagcgggttggtctggtccatgaattgtgacaaagcatttgttccgaagaaagaattgataacggaagaaatagtcttggcgttaatcaaatcgatcggagtaaagacttcattgtcacgaacattcatacgctcgcggatagtacgggacatacgtgccaaaccgatagcaaactggtttgacaactgttcgcctaccgtacgtacgcgacggttgctcaagtggtcaatatcatccacatctgcttttgagtttatcaactcaatcagatacttgataatctcaatgatatcttccttggtgagtacacggacatccatgtcagtcgtcaaattcaactttctgttgatacggtaacgacctacatcacccaagtcgtatctcttttctgagaagaacaggttattaataacctcacgcgcgctggcatcatcggcaggatctgcattacgcaactgacgatagatataaagcactgcttctttttccgaattactggggtccttctgcagagtattatatataatagagtagtcagactggttcggttcttccttatgtacaaggatattctgaacgcctgactctaatataatgtcaatatgttccggctcaattatagtttcacggtcgataaccacttcgttacgctcaatagaaacaacttcaccggtatcttcgtctacaaaatcctcaatccatgttttcaatacacgtgctgccaacttacgacctacaatcttcttgaggttcgtcttattcactttcacgtcttccgccagattgaagatttcaagaatgtccttatcattctcaaaaccgatagctctcagcaaggtggttaccggcaacttcttcttacggtcgatataggcatacatgacattgttgatgtcagtagcaaactcaatccaagatcctttgaacgggatgatacgggctgagtacaacttagtaccgttggcatgcacgctttgaccgaagaatacgcccggtgaacgatgaagctgcgacacaacaacacgttccgcaccattgataacgaacgtagccttatccgtcatataaggaatcggacccaggaatacatcctgaataaccgtatcaaaatcttcgtggtcagggtcggtacaatataatttcaattttgcctttaagggtacgctataagtaagccctcgctctatacattcgtctatggtatagcgcggcggatcaatatagtagtccaaaaactcaagaacaaaattatttcttgtatcggcaatggggaagttttcagcaaatactttatacagtccctcgttcttacgtttctcgggtggggtatccagttgtaaaaagtctttgaatgacttcaattgtacttccaggaaatccggatattccagcggattcttagtcgaagcaaaattaactctttgatttacagtatttgaagacatctgttaatggatttgtagaacttaattttaaatatatacacaaaaaggtaaagaacccttttcacgaagggttccttaccgaattacctgatttacaggctaatgttatttaagttcaacttcagctccagcttcttccaatgttttcttcaatgattctgcttcgtctttagccaaaccttcttttactacgctaggagcaccgtctaccatgtctttagcttccttcaaaccaagaccgcaagcttccttaacggctttaactacttgaagtttagctgagccagcgctcttcaatactacatcgaaagaagttttttcttcagcggcagcagcaccaccagctgcagggccagcagcaacagcaacagctgcagcagcaggttcaataccgtattcttctttcaggatagttgcaagttcattaacttcttttactgtcaagttaactaattgttctgcaaaagctttcaaatctgccatttttgtatgattttaattgtttaattactaaaataaattgatgtttttttgtttccgaagttacgcttcgggacgttcaccgagagtcttgagaactccgtgaatggtgttaccacctgattgcagagcagaaataacattcttggccggtgattgcagcaaggcaacgatttcggcaataacttcattcttactcttgatacttacgagagcatccaactggtcagcaccaacatagaagctttcttctgcatatgcagctttcaatccgggaataccgttctttgctttatctttcagcagtttcgcaggtgcattcgctgtattgcaaaacattacagcagtcgtacctttcatgcaaccgtaaagcggagaataatcctcttccaggctttccaatgctttatgaagcaatgtattcttaactaccatcaatttgatgtcagccttgaaacacaaagctctcaacgcgcttgtatcagcagcgttcatagcagtggtatctatcaaatagaagtgaccgtattccttaactgtagcagcaatctgctcaataatcgtacttttatcttcctttctcattattactccgttttattagatttcttctacagatttcgggtcaatcttgatacccgcactcatcgtgctagaaagataaatactcttgatatatgtacccttggctgcggtcggtttcaatttattcaaagtagagatgaattctttcgcattgtcgcgaatttgatcagcactaaatgaaactttaccgatagaagtatgaacgataccgctcttgtcaactttaaagtcgattttaccttgttttacttcttttacagctttagcaacatccatagtcacagtgccactcttcggattcggcatcaatccacgaggaccgagtacacgaccgagcgcaccaatcttacccatgatagacggcatagtgatgattacatcaatatcagtccatccacctttgatcttttcaatatattcgtcaagaccaacatagtcagctccggcttcttttgcagcagcttcagcatccggtgtacaaagcaccaaaacgcgtgtaaccttaccagtaccgtgaggaagtgatacaacacctctcaccatctggttagccttacgcgggtcaacgcccaaacgtacgtcgatatccagagaagcgtcgaacttagtaaaagtaatttcctttaccaattgagcagcttctttgagagagtatgctttccctgcttcaattttttctgcagccaacttttgattttttgtcagtttactcattctaattgaagtttattagttattaaccgggaactccccttttacagcgatacccatactacgagctgtaccggcaaccatcttcatggcagcttctacagtgaaacagtttaagtcaaccatcttgtcctgagcaatcgtacgaacctgttcccaagtaatctcggcaactttcttacggttaggctcagcagaaccactctttaccttagctacttcaagtaattgaatagcaacgggaggagtcttgattacaaaatcgaaagacttgtctgcgtagtaagtgataatcacaggaagaatttttcctgctttgtcttgggttctggcgttgaattgcttgcaaaactccataatgttgattcccttagaacccagagcaggtccaacgggaggtgatggatttgccgcgcctcctttaatctgtaatttgattagtccagcaacttctttagccattttttaattgatttatatataaacattaatgaagaatattacagcgtaacacctgtcctattctttttctacttgcataaagcccaattcgagcggagtcttccgtccgaatatctttaccatgaccttcagtttcttcttctcggtattcacttcttcaatgattccgctaaagccactgaacggaccgtaattcacttttacagtctcgccgactacatacgggatattcagttcttcaccggcatcctgcaattcgtcaactgtaccaagtatacgattcacttccgactgtctcagaggaacgggtttttccgatccacccaagaatcctattacattaggagtatttctcagatggtgagcgacctcaccaaccagagcagcctccaccaaaacgtaaccagggagataacttctctctttcacaattttcttaccattgcgaacctgatataccttttcggtaggaatcaatacctgagacacataatcaccaaggtcgctgtttttgatatcagcttcaagatattcctttaccttagtttctttaccgctaatagcacgcaaaacgtaccatttcttttcaatctcagacatttctccttcttttttaatgtggataaacaaattccattaaatgctggaaacagaagtccatcgcaaataccaccagtgcaataagcagggaagcatataaaacaactactgcactgttagtaagttcagaatacgtaggccacgacactttatgaacaagctcgtcgtaagtttctttaaaataagctactatcttcttcatttcaaaaatattagcacgggaggagaggctcgaactcccgacacccggttttggagaccggtgctctaccaactgagctactcccgtgtgaacataatcagttcccagtaaataccgggaactgattaagatatttggttattagtcgagaatttcagtaatctgaccagaacctactgtacgaccaccctcacggatagcgaaacgcaaacctacgttcaatgctaccggatagatcagttctacagtaatttctacgttatcgccaggcattaccatttcagttccttccggaagagaaatttcacctgtacagtccatagtacgcagatagaactgaggacggtatttgttgtggaacggagtgtgacgaccaccttcttctttcttcaaaacatagatagaagctttgaacttagagtgaggtttaatctgacccggcttacaaagaaccataccacgtttgatttcgttcttatcgataccacggagcaacaaacctacgttatcaccggcttcaccctgatccagcaatttgcggaacatttcaacaccagttacaacagacttcttgtcttcacccaaaccgaggatttcaacttcgtcacctacatggataacaccagcttcgatacgacctgtagctacagtaccacgaccagtaattgagaatacgtcttcaaccggcatcaggaacggtttatcaatatcacgcggaggcaatggaatccaattgtcgcaagcatccatcaattccattactttttcttcccacttttcaacaccgttcaatgcaccaagagcagaaccctggatgaaaggagtgttgtcgccatcgaattcgtaagctgaaagcagttcacgcatttccatttcaacaagttccagcatttcagggtcatctaccatatcgcacttgttcataaacacaaccaatctgggaacgtttacctgacgagccaacagaatgtgttcacgagtttgaggcatcggaccatcggttgcagcaaccacgatgatagcaccatccatctgagcagcacctgttaccatgttcttaacgtagtcggcgtgacccggacagtctacgtgagcatagtgacgattagctgtttcatactcaacgtgtgaagtattgatagtaatacctctttccttttcttcaggagcgttgtcaatctggtcgaatgattttacttcagaaaaacctttcttgcctaatactgtagtgatagcagcagtcaacgtggttttaccgtggtctacgtgaccaattgtaccaatgtttacgtgcggtttggtacgttcgaatttctctttagccatagctttacttgttatttatttgattaataatcagcttttacattttatgagctgttaccgggacttgaacccgggacctcttccttaccaaggaagtgctctaccgctgagctataacagcaagaaaaccggagttgtgggcaaagatggattcgaaccaccgaaggcgtaagccagcagatttacagtctgccccatttggccactctggtatttgcccaatcatagaactctttttctttttctgaatcctctcgggcgttcccaccctttagtgataattcattttgagcctcttgtcggattcgaaccaacgaccccgagattacaaatcacgtgctctggccaactgagctaaagaggcaatctttttaaaaatgcaaccgcaacgttctaccgcgagcgaaacggctgcaaatttaggcatttattttttacccgcaaaattttaagcggatttttatttacttcgttgtttttccttgtatttaaccagctgtttttccaaagcttccagacaaagatccacagcttcttcaaacgtatcacaaaccttattcgcataaagctcaccgttgggtaccaatactttcaccccggcttctttattttcggctgtttccggtttaactacctttaatgacacctctactttctctatatcatcgtaaaatttctccaatttagcagcttttttctgaataaaagcctgcaactgctctgacgcatcaaagtgaatcgattgaattctaactatcatacttacctcctttttttaggctcgaggatgagcctgattatacacttttttaagttcttcaaaagtagtatgcgtataaacttccgtagtcgccaaactctcatgccctaacagctcttttatcgagctcaaatcagcaccattgttcagcatagccgttgcaaaggtatgcctcagcacatgcggacttcttttttttacagttactacctttgacaggtttcgtctcacaatatatgctacgataccgcggccaagcctttctccattctttcggacaaaaaaagcatccgaacaaaccggcaatgcttgattccgcacattgacatactcctgcatggaacgccccaattctttatcaaaaggtatcagacgttgcttattccgttttccggtcactttaataagagaagcagagaaatcaacatccttatcatccaaccctatcaattccgaaagcctcatacctgtcgtataaaacatttcgataatcaaacggtcgcgatacccttcaaacctttctccaaagtcgacatcatccaacaacctatccacttcaccttctctcagaaagacaggaagcggtttcttttttttcggccctgttactctccgtaacggatctgccgccaccaatcctttctttaaaagatacttgtaatatgtccggacagaactcaactttcgattcaccgtattaggcgcataacctttatccatcagggaaacaatccattcacgaacaagatccgcacctacatccgacggggccaaatctcccaacagcttctcaccaaacttctgcaactcaagaatatccgtccggtaataccttacagtaccttcagaataattccgttcatacagaagatagtcgagaaaagaatctgtcaacagcatatcgttacatctaaatcatgcaacgaatgtatgaaaaagaattcaataattcaaaggaaattacgaattattaatcttctacttgttgaagttgctgaacgtaaactgcacgctctttcttaagtcttttagtcacagacggtttatcaaactgttgtctgcttctcaactctttaacgataccagtcttttcaaattttcttttaaatttcttcagcgctttttcaatgttttcgccttcttttacaggtactacaatcatttttttgtttttaaaatttaaatggtttataaaatctcacgattaaattgagcggcaaaattacacatactttctttattcacaaaactttcgacaaaaaaatcgacaatcctaacataaaatacctgcctttcttactgacagttatcaaaactgtccgcagataagatttcacttacagaagcaacaatagataaaataacagaatttactccatgtaatacaagtaaagtgagtatctttgaaaacgcttatcaacaccttatacagtatgaatttaacaattaatgaacgtattgccgccttgcggacacacattgcccaagaaaacatacaggcattcatcattccaagcacagaccctcacctcagcgagtacgtagctccccactggcagtcgcgggaatggatttccggatttacaggttcagccggcacggtagttataacagcagaagaggccggtttatggaccgactcccgttatttcctgcaagccgcccggcagatagaaggaactgaaatcacattatacaaagagatgttgcctgaaacgccaagtattccgacattcttgaactcacgcctgcaagagggagacaccgtaggaatagacggaaaaatgttctcggccaaagaagtggagcatctgcaagaagcattgagaaagagcggtattcatgtaaaaagtgttgccgaccccctgcaactgttatggaaagaccgcccggcaatgccattgtctcccgcgtttattcacgacacacaatatgccggcaggagctttacggagaaacttgcagccgtccgaaaagagatggacgcaaacggtgctgagtctttgctactgtcggcactggatgaaatagcctggctgctcaacattcgaggaaatgacgtacactgcaacccggttgttgtcagctacctgctgatagagaaaaacgcagtgcattatttcatccaaccgcaaaaagtcacagcagagctaacttcctattttaacgttaatggtatctccgtacatacatatgaagaaatagaagattaccttaaccacttccctgcaagaagcatactggcagattccgccaaaacaaattacgccatctactcggcaatcaatccgcaatgccggataatcgacggcacatcccccgtaactctactgaaagccatccgcaacaaacaggaaatagccggcatccatacggctatgcaaagagacggcgttgcattggttaaatttctgaagtggctggaagatgccgttcctacaggtcgggaaacagaaatcagtatagataaaaagctgcatgcttttcgggctgcacaaccactttacatgggcgaaagctttgatacgattgccggctataaagaacatggagccatagttcactatgaagccactcccgaaacggatgtaacactgaaagcggaaggctttcttttactggactccggagcccaatatctggacggaacgacagatataacccgtaccatcgcacttggcaacttgacggaggaagagaaaaccgattacaccttaatattgaaaggccatatcgcactggcaacggcggtattccctgaaggcacccgcggagcgcaactggacgtattggcacgcctcccgatatggaagcagcacatgaattatctgcatggaaccggccacggagtgggacatttcctcaatgtacacgaaggaccgcagagcatccgaatgaacgagaatcccattcccttgcaaccgggtatggtcacttccaacgaaccaggcgtatacaaggccggaagccacggcatccgcaccgaaaacctgttactgacagttcctgccggcgaaggcatgttcggcaattatctgaagttcgagaccatcacgctctgtcctatctgccggaaaggaatcatcaaggaattgctgactgccgaagaaatcgaatggctgaacgaataccatcgagttgtatacgaaaagctatctccagacttagacaatgatgaaaaagagtggctgaaagaagcatgtaaaccattaattattaaccgataaccaacagaaaaaaatggcactaataaaatcagtaagaggtttcactccggaaatcggagagaattgttttttagcagataacgctactatcatcggagatgtaaaaatgggacgggattgcagcatctggttcagtaccgtgttgcgcggagacgtcaactccatccgcatcggaaacggtgtaaacatccaagacggaagcgtactgcacaccttatacgagaaatctaccattgaaataggcgaccatgtatccgtaggccacaatgtaaccatccacggagctgcaatcagggattatgcacttataggcatggggtctaccattctggaccatgccgtagtaggcgaaggcgccattgtagccgccggctcattggtacttagcaacaccgtaatagaaccgggaagcatctggggtggcgtacctgccaaattcatcaaaaaggtagaccccgaacaggcaaaagaactaaaccagaagattgcacacaactacctgatgtactcaagctggtacaaggagtaaaggtatcggctgcctctaaaaagaagactgcctacatataggaaaaatgaaagcgtcacaactcattctttgagaagacaaacttttaacttgaaattagaacatcctaaaagactaaaaaaaaggtcgtatcattactctcaaaacggagtttgatacgacccttttagaggttataattacagcctgtaacttttcagagtctcgttttagttttgacaacccctcatattttgtatggaaagaggtctttggcaacctcctcaacagtctaaaagttaatcatgcccaaaactttgtccgttgctccggcattaccggttacataagtccccgcattcgtaccggtctcgcgcaagaagctttcatcttccagcatacggtcgagcaacgctttcagttcttcataactcttgacagagaacccgccttttgcctccaggagctgaacggcttcctggaatttctggtacttcggtccaaagattaccggaatgccatatacggcagcttccagcgtattatggatacccactccgaacccgccgccgatataggcaatctctccatagcgatagatggaggaaagcaggccgaagcagtctattatcaggcaatccgccttacggacattcttttcgtcggcacgggtataacgcacatacggacgcttcagcttacggattatctctaccaaatgattttcgtcgattacatgcggagcgataatcagctttacttccggatgctgattaaagtattcgataaacaaatcctcgtcgggctgccaggaacttccggcaacaaaagtcatcgtattgttcttgaacaactcaaccaaaggcaagtctttagcctcttcccgaatttgaagcacgcggtcaaaacgggtatcccccaccacagtcacccggttgataccaatcttcgccagatagcgcttggagcgctcgttctgcacgaagatgtggtcgaagttgcgcagcacattcctatacgtaccgccgtaccatttaaagaaaatctgcccgcggcgaaagatggaagacacgctataaacggggatgcggcgcttatgcaactcatccaggtagttcttccaaaactcatacttgataaaaaacgccatgcagggattcaccaggtcaagaaacttcctcacattgcgcggtttgtcgaaaggcagataacacacgatatccgccccccggtagttcttgcgcacttcatagcccgacggcgaaaagaatgtcagcaaaatacgataatccggatatttggcacgtatcttctcaatcagcgggcgtccctgttcaaactctcccaaagaggcagcgtgaaaccagatataacgcgcatccttctccagctgctgccgaagaagttcgtacacgacccagtgccccttcatcatcttccgcggtttacggctgaaaggagccaccaggtgcaccgcaatatcatagagtattattgctaaattataaaacatacttttctccgcttcaacttatttcagaacgtcgatggcacgctgtatgcgggcaagcgtctcttctttgcccaacaatgcggtaatatcgaacatatgcggtcctttacactctcctaccactgccagccggaaagcattcatcacattacccatgtgatatcctttctccgtaatccagccgataactacatcttccgacggtttagaggagaaatctccaatgccccgaagcacttccatcaattccgtcatgatgcgcggagtatcttccgaccaacgtttcttcacatccttctcggcatactgctcaggagcaacaaagaagaaacgtgcctgctcccacagttccttcacgaagttgacgcggccctttaccagggagactaccgtagtaaggaacgcatcgctgtatgcaccaaggtctacaccgtgctctttcagtaccggcttgaaaagttccgcaagctcctcgtccgatttctgaagaatatattcatggttaaaccagatacctttcttatagtcgaacttagcacccgatttgctgcaatggctcagattgaacagttttacaagttcatccatcgacatcagttcctggtcgttacccgggttccagcccagcaaggcaaggaaattgataacagcttccggcagatagcccgattcgcgatagcccgaagacacttcgcccgacttggggtcgtgccattccagcggaaataccgggaagcccagacggtcgccgtcgcgcttgctgagcttaccgttaccttcgggcttcagcaacagcggcaggtgtgcgaacgccggcatcgtatcttcccaaccgaaagcacggtacagcagcacatgcaacggagcggaaggcagccactcttcaccgcggataacgtgggaaacttccatcaaatggtcatccacaatatttgccaggtgataggtaggcagttcgtccgccgatttgtaaagcaccttatcgtcaaggatagacgagtttatcacgacctcgccacgtatcaagtcgttcacatgcacatcttcgtccggctctatcttgaaacggaccacatactgcctgccttcggcaatcagcgcgtccacttcctctttgggcatcgtcagcgaattacgcatctgcatgcgcgtagaagcgtcatactggaaattggcaatctccgcacgcttggcttccagctcctgcggagtatcgaaagcgatatatgccttgccggcatccagcagcacctgtacatacttcttgtatatgtcgcggcgttcagactgacggtacggaccatgttctccaccaaagctgacaccctcgtcaaaaggaatgcccaaccacttgaaagactccaatatatattcttccgcccccggcacaaaccggttggaatcggtatcctcaatgcggaaaatcaaatctcctccatgctgacgggcaaagagataattatacaacgcagtgcgcacaccaccgatgtgcaacgcccccgtaggactcggggcaaaacggactctgacttttctttctgtcataatctatcttacttataactaaattagacggcaaaattaaacctttttttccatactattgtttttttttgtacttttcgcaaaaatttcaaccgatatgaactatttcaaaggtaaaaacaaagagttctcgttcagagatttgatatacaaggcacttatttttataggtacggtgggagttattgtctatttcctgccgagagacggtaagtttaattaccagtttgacattgacaaaccctggaagtacgggcaactgatggctaccttcgacttccccatctacaaagacgaccaagtcgtaaaaaaagaacaagacagcatcctggcctctttccaaccctatttccaattggacaagagcaccgggaaagaggcgctcaagaaactgaagaacgactatcagactcatctgcgcgacattctgccctcttccgattacatccgccatatcgaaaaaatactatccgaggtgtaccgggcgggcatcctttccactgaagaacttgcccggctgcacaaagacagcacatctgccgtcatggtgatagacgacaagcttgccaaccaacggagcatcgacaaactctactccgtaaagcaggcatatgcctacctgcttacggccgacaccatacactatcgtccgaacatactccggcagtgttccctcaacgaatatctctctcccaacctcacctacgatgcccggcggacagagaccgccaaggaagaaatcctcgacaactattcatgggcaaacggcattgtactgagcgggcagaaaatcatcgaccgcggcgagatagtgagccgggagacctacaatatcctcgaaagcctgcgcaaagagtccatccagcgcagcgagtccatcggccagaaacaactgatgctggcagggcagattctgtatgtcggcatcttcatattgtgcttcatgctttatctcgacctcttccgcaaagattattacaaccgcaaaggcaacctcgcgctgcttttcacccttatcatgttctattgtgtggtaacggccgttatggtaacaaacaatatattcaacgtatacatcattccctatgccatgctgcccgtcattatccgcgtgtttctcgactcacggacagcctttctcacacaggtcgtcacaatactgatttgttccatctgcctgcgctatccgcacgagttcatcctgctgcaactaacggcaggtttggttgcgattttcagtttgagagaattatcgcaacgctcgcagttgttccgcacggctatcctggtgattctgacttatgcagccgtttatttcgcttttgaactgataacggaaaacgacctttccaaactgaacggcagtatgtacacctacttcgtgataaacggcgtattgctgcttttcacgtatccgttgcttttcctggtggaaaagaccttcggcttcacttcgaatgttactctggtggaattgtccaacatcaacaacagtttgctgcggcgcatgtcggaaaccgtacccggcacattccagcattccatgcaggtagccaacctcgcagccgaagcagccaaccgcatcggcgcaaacagccagctggtgcgtacaggtgctttataccatgacatcggcaaaatggagaatccggcattctttaccgaaaaccagtcgggcggtgtcaatccgcacaagaatctcggttacgaacagagtgcgcaagtcgtcatcggacatgtaacggacggattgaaactggccgagaagaacaacctgcctaaagtcatcaaggatttcattactactcaccacggtaggggaaagacaaaatacttctacatatcctggaaaaacgagcatcccggcgaagaacccgacaacgagtcattcacctatcccggtcccaaccctttcagcaaggagcaagccatcctgatgatggcggattccgtagaggcagcctcgcgcagcctgcccgaatatacggaagagagcatcagcaacctggtagacaagattatcgattcgcaggtggaggaaggttatttcagggagtgccccgtcacgttcaaggacatagcaacggtaaaagccgttttcaaagaaaaattgaaaaccatctaccacacccgcatcagttacccggaacttaaaaagcaagacctatgaaaatcagtaccaaagaacagcaaagagcggaatttctgttgcaaagccaacggattcaactgcatcagattgaaagtttcagtttcatggaacgctacccccggcaggcgcataaggatatcccggcaggaaaagccaaatacggtcccggaatattcgttttccacctaaaggaaaagcaggataaggtaatatacatgcctcccttcaggcatccttcatcactcgtccgctttctggtgtcgcaaggagtgccttttgccaattatgttccgcgcggacggagcatggaaactctcccggaggaaacttaccggcgtccctcgctgtatatgttttggttcttcatattattccttatgttcctgatattgggctactattccgtcggcatcgatgcatggtggggattcattccggccatcctgtccttcggactgagccttttcttcatttgcatgctgatgacccggttctgctacctgacgctggacaacgagaacctcaccgtacacagtgcaggcaggacaatccgctatccgtatacagacctgcgcaaggtcaacttcgattttgcccgggaacagactttcacccacatcatggaattgctcgacaaggactaccgttaccgtcttttctacatcggccgggtttcaaggaaaaagctgaatgagattgccgaacggttgcaacaggccggagtggatgcaacgtgcagcctcaacgacaacaagcgtttttatcatgacaacaggcattgagcggtgattattcgccaaccgctccgaacaatcctgcacaggcgtcttccaatatatcgagtacgtattcaaacccctcggctccgccataataagggtcgggcacgtaatcggcatgggcaaacttagtacagtattccgtcatgcgatgtatctttccgcatgcttccacagaaggggcacgctctttcaaatcatcaatattacggtcatccattccgataatcaaatcgaactcatagaaatcatccgtacgtaccggacgggaacggtgcgtcaggttgtaaccccgacgggcggcatgggcacgcatcctgctgtcgggcagctctccctgatgataggaaagaatacctgccgagtcgataacgaactcatcttcacgcccagcctcttctatcaaatgcctcatcaccccttccgccgaagaagagcggcaaatgttgcccaggcaaacaaacaatatctttttcttctctttcatactcaaacacatattaaacattccgcaacccgcactacggctatctacatcgggtctacatcataatatacaatcagcgacttgaaacggtcttccattatcatctccttctgtacctgcagcaacaattcgcggacacgcgccataggagctttggtttcaatcttcactacaattttgcggataaacagcgtctgcacacgtgccaccggcggtttatccggccctaacacccgattgccgaagatggcacgcagcttgcccgccatagtctgcgccatcaaatcgagcagggactcattgcggttcttcagatacacatatatgaggcgataataagggggataatgaaacatctgccgctcggcaagctgtccgtcgaccatgccttcgtagtcattggcaattacctgagggatgataggatgctcaatgctcttggtctgcagcactaccctgccccttttattcttccgtccggcacgccctgccacctgcgccatcaactggaaagcacgctcataggcacgaaaatccggatagttcagcatcgtatccgcattcagaatgcctaccacgcttacgtggtcgaagtccagccctttggaaaccatttgcgtaccgataagaatatccgtctttccctgttcaaaatcggcgatgatacgctcgtaggccgcgcgtgtgcgggtggtatccaaatccatacgggcaacggtcgcttcgggaaacaagagtttgacgtcgtcctctatcttttccgtaccgaaaccgcggttgcgcaagtccgttccttcgcaagcgggacagatgcggggcagttgataggtatatccgcaatagtggcaggtcagttggttcagtcctttatgataggtcaggctgacatcacagttcttacatttgggaacccacccgcacgtatggcattctatcatcggggcaaaccccctgcggttctgaaacagaatgacctgttctttccgttccagtgcctcgcggacatattgcagcaacaaaggggaaaagggcccgttcatccgcttcttgcgctgcaactccttgatgtctaccggaataatctccggcaactgtatctccttgtacctctccttcagctccaccagcccgtactttccggacatggcgttgtgccaggtttctatggaaggagtcgccgtgcccagcagggtcttggcgccatacagcgcagccagcacagtggcggcattacgtgcatggtagcggggggcggggtcctgttgcttatatgtgttttcgtgctcctcgtccacgataaccaggcccagcttgcggaagggcaggaacacggaagaacgcactcccagaatgatgtcatatccgctgtccgaaagctgtttctgccagatttccacccgttcggcatccggaaacttggagtgatagatgcccagacgcgaaccgaacacccgttgcagcctttctgtaatctgtgtagtcagcgctatttccggcaacagatacagcacctgcttcccttgccggataactttttctatcagatggatgtaaatctccgtctttccgctggacgtgactccatgcagcaaacagacattctttgtccggaaactttccacaatgctgtcgtatgcccgctgctgatgcccgttcaaaggatttaaagggagggttgtccgggcagcggctgcattcagcctgcctatttcctgctggtatacctcaaagaccccgcgttccaccaacccgttgaacacggcaggcgtagcggaagtccgctgcaaaagttccttcttggtgacttctttcggcgttttacccaaacaggcggaaagttcgatgtacttcatcagcaagtccaactgtttgggagcgcggcgctgcagttcgtcaaagaagaagtgcagacggtgttcattgcctgccgcttccgtcaggcgtacgcgggtctcggtcttgggcttgtaggtgcgcttcagttcttctttcacaaagaccgcctctttatccagcaaggatttaattacggacaggatattcctgatgccgctctccttctccagtttcgtaatgcactgctccggctccgcggcaagcaggttcagtatcttctgttccttttcgggcagttgcacatccgattcgaaatcggggttatactccacgatggtctcgctctccagcttcaggcctgaaggaagcgccgctttatagacatcgccccgggtacagagataataatccgccagccagtcccaaaacctgaactgctcgggcagcaggatgggatgcgcatccagcagggcactcacttcctttacctcgtacccggccggtgcggaatagtgtatgttctgcacaatagccgtatagtatttcttccgtccgaaaggaacaaccacccggcagccaatctgtacaatccccgccatatcctccggcagcgagtatgtaaagcaggcatgcaggggaaggggcaatatgacatctacgaacttttccattgcaacggcaaagataacgtaaaaaaacggcgttgccaatcaaaatcggcaacgccatacagagataatcccgttatatctttagaacaggtaagcagcggaaatctgccaggtcttattctttgttccgatagcctcactggcactcttccaggtgaacgagtcgccgcaaggaatcgtatagttgaaacctatctgcaaatgccgaaccagtttcacaccggctcccacattgatacccacctgcgctttcttgctttccagctttcttccatcttcaaaattcttatcacccttgaagttgaagaagaagtccggaccggccgctacataaatacccagcatactgcccagaccgatggaatatttcagattgacaggtatgtccagccccgattgcttcatatcaaggccttccatcttatcgcctttctgagaatacagcaacgcaccgtccactcccagtcctataacgggaatcgttatttccgccataggtccgaaaaagaatccggtagagttgtctttcattccttcgaacttgagtttcgacaagttcacaccgcctttcacaccaaacttaatcaactgagcttgggcaggcatagccaatgccatgcagcatacagctatcataaaaacactaaagaactttttcataattcaatacgtttaaatttcgtggacaaatatatgcaaattatcccttaaaaaaacaacaggcattccgaattgttcaaaattaaaacaagagttccggtgcgtcaccggtggaaaaccgtcccaatctccagcccggaacattccgtatgccggtgtttttccacgacatcccttatgtataaaggagaaataccctatgcaaaaacctgctatgccacatcgttttcctcgtcctgcaactgcgggctgtatggcccgcatatggaaaccgtacggcccgcaaccggcaaccggagagcccgcaattggaaaacgaggttttacatccggctttcctacattatacatgctgtaaaacgacaaaaccaacgggcaacggtgccattaagccgcagagtttggaacgctccgcccttgaaaaacagaggcttttaaccgcagttaacaaatttcacttcacataggttttacatctgtgtataagcctgttacaataaaaaagaaggataaaagtgacgaccggaagtgacgacaaacaattggtcaacactctcgtcaccgttgtcaacaccctctccatcccccttctgcaaagggatagaacgctaccggtgacgagtgacgagaaaaaacgtgttttcttttttaggagattaaaaatgcaagataggcatcggaaagcatagattgactacctttgcaaaacattattcaaaaaaacacatttctttattacggagtatgatagaaattaggaaaacagagattgcagaactcggcatccttatggagctttttgaacagggaaagcgcatcatgcgcaaaagcggaaacatgaaacagtggaccggcggctatcccgatgaagaacttgtaaagaaggacatcgagaacggaaacagctacgtatgcctcgatgaagaacggaacatagtagggactttcactttcatacaagggaacgaccctacttacgcccgaatttacgaaggagcatggagtgacgacacgcgtccctacggcgtcatccaccgcctggcaagcacggagcaaagcaaaggagtggcatccgcctgcctgcaatggtgctaccgccagattcccaacctacgggcagacacgcaccgcgacaaccatatcctgcaacacatcctcaaaaaacacggcttccaatattgcggcatcatatacctgcagaatggagacgaacggctggcctttcagaagctgtagcgacggcacatgcaccaaactcatacgggccggctgccgccgtatttcttcttcagctcctccacggttgttccggtgaaatactcttccacgaaatcccaacgctggctgtcggtcagagtatccgtaccgaagaaaaaggagaacagctcaatctgctcctcgaagatacgttcgttcgtgtccagtataagattatgatatttgtcggaatccgccaactgttgcagaagttccgggttatcgaaccgtacatgcacgcagggcgtaccgcctccctcgacgctgaacgacaggcagtcgagcatggaaagaaggttgagcaacatattcaaatcggagaacggagtgcaatagaactgcaagcggtcgcccctgttgcctgcgatacgctgggcgaacagcttctgataacgggacagaagcaggtcgaaacctttggtgacggtaaacgaaagctcgttcgagtctttcttcttgacgctgctgatataacttacgctgcgcccctcctcggtgcggctttccagcaacgaaccgatgaaacgtttggccgacggcacatccatgccgtgctcggcaaacaccgcacgcaactcctcctcgtcgaaacggcctttcgacttcagcaaagctgttttcagcatcgataccaggctcttgaacaaagcgtccatgcgctggcggataaccgttgcatcctctttcagcaacacctcgtgcttgcccactgaaacagcacgtgaaccttcccacaacatgccgctgttcagtttctgcttgaactccctgtatcccaactccggaaaacgctcttcccaaagagtgtccaaacgggcacggtagactccctcttcaccgtccaccccggtaagataggcctgaaattcgcgtgcaaaggcatcgcccgtcttgtcctggatgtaaccctccgtcaacagattttgcggacttacctccagcagacgtgtgccgtagcgttgctccaaatcatcctccagccacagcagggccgttttgataagctgccccaactcggcctcgtactccagcttattcttggtacgcggcagcttcaccacgaactcaaagtcggacagggaaacaagtatctcttccttcttccctttcatccgatatacctccatgagtttcttcaggataagttccagttggtcctgcccgatgttgccggtctggtgcagacgcttcatgtaataaaagtcgcgttcgtgataatcggtggcggcaataccctgcacgtccgcatcacgggcggcacggcctatttcctgaatgtaatcgacaaacgtgctggaaggcgccacgtggtaaacacggtcgatgtcgctgatgtccactcccatgccgaaagcttttgtagcaacaatcatccgcttcgtgccttctttaaagtccctgacgatggcagccttctgcgccttgtccttcttgccgtagtaagaggccaccagacgccagtcggcaggagccacccaggtcttgatacgcatatctatgccaccggcaaaaggatagtaaagcagcgccttatgcccgtcgagaaactcctccacacgcccggatatgacgcgttgcttgcctttgtcataagtctccccctcttccaatgtgagccggcggatgtcaaaaccgatgttcttgcgtctgaccgtacctacataaagtatgcagggttccatttgcagggagcggatggtatcgaataccatatcgttgccgcctttagggttccacacggcagtggcggtaagggcaaacagagggaacgaataaccgaggttctgcttcaatgcgcccaaataacgccccagaaaccaatagtccacgcggaactctttgccccaggtggttaccgtatgcgcctcatcgacaacaaccataccgatgcggcggttgccgataaaatgtctgatgtcgtaggagagcaacagctccggtgaaagatagaacaagtcgatttccccctcacgcaccgcccggtacacttccatcttctgctccggcgaaaggtcggaagacgcatatgccacacgttcataccctacgtcctgcaagccttccacctggtccactatcagcgctttcaaaggagagacaacgatagtcagcaggttatattcttttcccagatagatggcaggaagctggaacaagagagactttcccgcaccggtcggagcagtcagcagaatattgtcgggctgttcgccgcctttgtacgccttttccgcttcccggattacattttcaaccagttgtccctgagagatacagagagtatccctgtttttaaacaaatcatcgtaaatctcgagattgcggaacccgtcgtaaccataggtctctttcagcagttccgttacactttgccggcactccccgggcaagtggcgttctttcaatacgggcaagcggtgtgcctctcctgtttgtgtcatcattaatataatgggggattaaaaagaaaaaaagatagtattccggccatagtaaaggccttcgtactacctctttctataatttgtatatccgtaagccgacggatgaaattcaatcaaagcgcatcaatactcctcttcgttgaagaagaaatcttctttgctgggataatcaggccaaatatcttcaatactttcataaatctcgccttcatcttccatttcctgcaggttctcaataacctcaagcggagcacccgaacgcatggcataatcaatcaattcgtccttagttgccggccaaggggcatcttccagtttagatgccaattccaatgtccaatacatagtttctaagtattaaaattgtgagtagtaattcctttctttatttttcggcaaaagtataacaaaatatttcacttgcaactattattccaaaatatttcttcttttttctcgtcttggttcattttacgcgaaagaacgaacaaatagtcagatagacggtttacataggccaacagctcggaagagatgtccgtctgttccgccaaagcaagaatgcgacgttcggtacggcggcaaacggtacggcagatatgacaaacggaggctccgcgactcccgcccggaagaataaaagcagagagagggggaagcttgtcgtccagccggtctatctcgcgctctatcgcctccacctgttccggggtgatgatactcgcctccttcagccgtgtcttttcacgatccgtagcaaggtaagaacctattgcaaacaatctgtcctggacttgctgcaggaactgcctgtcgggctcgtcggaaaggaaagttatcagaaaccccagattggaattcagttcgtccaccgtaccgtaggcttcgaggcggatgtgggttttaggaacacgcgtgcctcctacaagggaagtggttcctttatctccggtctttgtatatacaaggcttttcttcataatgctcttttttcctttgaaacgcctaaaggtaatcaaaagttgacaatatagtcttgttttatcctggttttatcaaagaaaataataccgagatcgtaaaggtcgaaagtgatgcctgccttttcgtgccggctgatacgcctccaaacggcacgcatccgggaagtataacggataccttcgattacaaagacggacgtttgcgcagtgcggtcggcacagatacggaacacctcttccacaaactccggacggcggtaatcgtgcaggtataaaaagtcgacagacgcgccactctccagaaacagttcggacaggtcggcggcagcagtgtagtccgccccttccttcgcagctttcagatataaggaagaggcagcctgcatgcctgcatccacaatcgtagccggctgtgcataatttaccagccggaacagaagccgtttcacctttaaggactcgtacccccatgcccggtctttctgcggcataagcctcttctgctcggaagccagctccttatacttataataaggagtagtttcatagataacgtgcgttatcaggttgaaggcaaaaggcgagtgcaccccgtaaccgcaacggtggcggaatcggtacagccagataaaagggcgctttagcgcaagtaacatacggttcatcacaagttaattctttattgtgttgcaaaaatacggaaaaacctgaaacggaagctaaccgcacagctttcctttgataactgttcccccgccggacgaataattttcccgaaatgtaccgtatccgggaaccattcccactgcagaatgttctctatggaaataacccaaaacccaacggataatgaaaaaatcgatactgttaatgggccttgcagctctcatagcaagctgttcggacgatgaccggaacaacgatacggataatcagcatcttgtcagtccctcaatggctgtgagcatcagcaacaccgacggccgccaaagcccgtttaccggcattcttacaattatgccatgcgatgcaaacagtttcatatactatggaaattatgtaaaagggaaactgtctcctttctacggctattaccgggtaaaggacggaagcttccatgacaattccatcaatagggagatttctctgccgataggcacttacaatatgatttattggggaacaccccaataccagactcccatttatgcccaccctgccataaaagaggcggctcacagcataggtgccgatatgtcccaacagtctctcggcttgttcagaatgtcagccgataccatttactatcccgtattcgacctggtgtacgccacacagccggtaaacatcggaagcgaaagcctcagtggctctttaaaacgagtggtagccggaataaaggttgttctgaaggacaaagacaatgccgtactaagttccagtatagacagtgtgtccgtacgcatcaccaacatttacagcgaactcaattattatacgggaaaaccgcaaggtacaccacgtacaatcgcgttccctctgattcgttcgaacgatggtactcagatgagcaacagcaccgttatgctgttcccgtccgccggaaaaccggaattccaactggcaatcattcttaaaaacggtaatatgaaaagcttcagacaagcattgagcagcccgctcgatgccaatgccaaactgacattaacgttaagtctgggtgatattttctctgaagaatcctccggtgactttaccgtcgatgactggaacgagaaaaacgagaatattgatataccgataatagagtagccgaatattataaagagtctttccgtacggaacagagctgccggtgttaccatgaaataaccctttgccgttccgattcttaataacaatgctattctatatattcattctatgacaagctctcgaacttttttctgtgctccattattgattgcatattattttgcgcccattcagttaacgatataatgatagggacaaggcttttgcctgttgctgtcaactcatactccactcttatcggaacttccgcaaaaacggttcgttttaccagtccgtcagcttccaatatctgtagcgtattagacaacactttggttgatatatcaggaatttgcctcgctaattggttgaaacgggttgaaccattctcattcagaatgaaaacaactaacaatgcccacttattaccaaaacgtgcaacgacattccgaatagggcaaatctcaatgatagattttttttcttcttttttcgtcatgacaatctattgtttttctgcataagtaacctccaggtaactttgatacatatttgtaacttcttgtattgcaaataattgattcatatatttgcagtatcaaaaagaaagcaatcatccaatgcaaagttagttaatttgcgatacgtaatcaatagaagtataaacatcaaaattaaaagctatgaaacagattgaaaaaacagcatcagcgacaaacttcaccgctatcaacttaggcaagttaaatgaattaggagattacttgttggaacttgctcctgaaataaaaattccgggaaaagtgtttggcggggctgcacttcaagccacaggaagcgaattttcattccagttattccaaccgggaacagaaaccggctttcttcacactcaccaaacacatgaagaactttatttcttccttagtggaaacggagaatttcaagtagacggccaagtattccctgtttcggaaggaagtgtggtacgtgtagcccctaaaggtaaaaggtctgtccggaacaacggcataattccccttattatgctttgcattcaatataaggctgcaacattcgcacaagaagatacaacagacggaaatatattaaacgaaccggtaagatggtaacattatgaaacaggacttgaagaggaatactgaatctgcttaaaaaacaaggatatacgatagaacctgttgaatagagaactaaactatacaaacgttaatatccaaataaattattctgagaaacaacaatatttctcagaataatttatctgtaaaaatttaccgaagcattaatataaaggcaagccctcatacctctaaaacataaaaccaacccctttcttctgcgaagctttaaaactttcaatctccaaagaaagtgatttcttcaactgtcctgccataaagtccaagaaaggctggttggtttcttcatcctgacactggcgcagggaaaggatatattcttctctatcttctttaaatattttggttgggaaaaggtgatagcaaaattgaatatagttcatcagcaagcgagccgttctgccgttgccatccacccacggatgtatggttactaaattaaggtgggcattaaaactcaattcatattgttcccgaaatattcccactttcttttgcttctctttaagaatcgcacaaagttcatccaccttagcaggaactttcaaatagttcatataagaatgtccgccaacgccagccgtaacaccacatagacggaactctcctttagaagaatcaaaagaaccgcccatcacactgtgaacgctgccagtagtacgcatcagcattgcattcaaccttttcagaaaagcaggagttatcggtgcaaggctctctgattctgctttggcaagttcatacgcttgcttcaaatcttcattcatcagatgatgcacaagcggtttccctttcgctgttactccctcgtcaaagagaagctgcgtatcaagctcggtcaacgttgagccttctatggctgtggaatgggtaatgagagaataaaggtaatacttatcatagtccaccgattcactgataccaagtttttgaaacttctgatacaactgttctatctcttgccaaacaccttgttccattacttttatttaataggctttatttcttttcaaaggtaacttatttactacgttcaaccaaagataataatgacttactgctatattttttgaaacccaaaacgaaaatgtttcagctatgtctcagtagaaaaaagataaacccttgcaaacttttgatttgcaagggtttatctttctcttttcgtacccagacccggggtcgaaccgggatggaagtgaatccactggtgtttgagaccagcgcgtctaccgattccgccatctgggcatgttgatttctcaaatgcggtgcaaagatacagctttttttgaaaactacaatactttccttaaaaaaaggcgaaaaaaacgagaaaatattctccaagcattccgcgtttataaaatatacagtactttagcagaaacttttaaaacatttaatatgataaccaataaggataatttctgtgtaatcatgggtggcggtatcggtagccgtttctggcctttcagccgcaaaactcttccgaaacaatttctggattttttcggcacagggcgttcattattgcaacaaacattcgatcggttcaagcaagtaatccctacagaaaacatactggttgtaaccaatgacctatatgccgacttggtgaaagaacagcttcctgaattaaactccgaacagattttattagaacctacacgcagaaacactgccccgtgcattgcatgggctgcttaccatatccgtgcattaaacccaaatgccaatatcgtagtagctccttcggatcatcttatcctaaaagaaagcgaatttctttcagccatagagaaagggctggcattcgttgcaaaatctgataagcttctaactcttggcattaagcctaatcgcccggaaacaggatatggttatatacaggtagccgaacatatagacagcagcttctataaagtaaaaacctttacagaaaagcccgaattggaattggccaaagtctttatagaaagcggagaattttattggaatgccggtctcttcatgtggaatgtaaacagtatcatcaaagccggtgaattacttttaccggaattggccactaaattggcagccggaaaagatgtgtacggaacaccggaagaaaagaaattcatagatgagaactttcctgcatgccctaacgtatccatcgacttcggcattatggaaaaagcagacaatgtatatgtatcattgggcgacttcggatggtctgatttaggtacatggggctccctgtacgatctttctcaaaaagacgaatcggagaatgtcactctgaaatgcaggtcgttattatacaatagtaaaaacaatattgtcgtacttccgcaaaacaaacttgctgtcatcgacgggctggaaggatacctcattgccgaatccgacaatgtcctgctgatttgtaaaaaagatgaagagcattccatacgtaagtatgtgaatgatgctcaaattaaattgggagaggactatatataaatagttttttcaacgacaaaaaagtaaaataaaatcggcagttgctatttccaactgccgattttttataatgggaggaaataaaatcttttagaacgccatggtgatagctttggctatcgccttaaattcttcatctgtcaatttcagctttggattggaaaaaagcatatccttttcattctgcataggaatcaaatgaatatgtgcatgaggaacttccaaacctaaaactgcttcacccactttcctacaaggaaaagccttgccaatagccaatgccactttctttgcaaaaacatgcattgcagccaaatcctcatcacttaaatcgaagatatagtccacttcctgtttaggaatgaccagcgtatgccctttcgccaatggattaatatcaagaaaagcaaagaacttatcattctccgccactttgtagcaaggtatttcacccgcgataattttgctgaatattgttgccataattttacttatataaaatgaggcaagcccgcatgcagacctgcccctcctctaaaatgatatgttcactacttccagattgatgataccctgcggtactttaatctcagcaacatcacccactttcttgccaagcaaaccttgtgcaatcggagtatttacagaaatctttccctctttcaggttagcttcactttcagaaacaatggtataagtcatcttcataccgtttttcacatttttcagttccactttattcaatatctgtacactgtcggttttcaatttagattcatcaataatctttgcatccgcaataacctgtttcagtttattgattttcatttcaagaagaccttgagcttcttttgcagcatcatattctgcattttccgacaagtcacctttatcgcgtgcctcagcgatagctgccacaatcttcgggcgttctatcgtttccaactgtttcaaatcggccaacaacttattgtagccttcttctgacatataagccatagtttttcctccttattatttataatgttttttaatggtactataaacaaaaaagaattccaacatggtcagcatgctggaaccctcttcctattttttcctttgcaaagatagacttttaaataatgcgtgtcaagcaaaaagcagtgctttgtaacatatttaaatgaaatcttctaatttataacatgttacagcaaggctttcaccgctgcatccaaatctttaattgt

SEQ ID NO: 4115 - DNA, 94884 bp, Unknown
  gut microbiota DNA sequence
ctgtgtgttatataataatcctggcagtctctgaatatatgattattctctttttagcaagaaaagttataattcgtatttttattcatgaaaaaatcgctaactttgcacattgccgtagcggaatacggtaaaataatttatttaattaattattgagattagaaatgggacatcatcaattggatactttagacgagcagatattgcagctgattgccgataatgcgcgtattcctttcctcgaagttgccagagcttgtaatgtatccggagcagctattcaccaacgtattcagaaactgacaaatctgggtatattgaaagggtcggaatatgtcatagatccggaaaagataggatatgagacttgtgcgtatatcggaatctatttaaaagatcccgcaacttttgatgccgtgacaaaagcgctggaagccattcctgaaatcgtggaatgtcactttactaccggtaaatacgatatgtttattaagctgtatgcacggaacaatcatcatttgctgagcattattcatgataaattgcaaccgttggggttgtctcgtacggaaacgttgatttcattccacgaggcaattaaacgtcagatgccgatagtgatagacgatgtggatgaataatcctaccggttatcggcggatataattgacaaaagcataagggcagggatgtttttcatctataggatgggattccctgcttttttcttgccatatttcaggggatacttccggaaagtaggcatctgcttgaggagcttcggcatctatctctgtcaggcagagtgcgtctgccaatggcaaagcctggcggtatacgctggctccacctataatatagatttgttcatcctgttcacagtgcttcaaagcttcttcaagagaaggaaagatttccgcacccggacatagggtgtcgggacgggtagacaatacaatattgcgtcggtttggcaaagctcctttagggagtgattcgaatgttttccgtcccatgatgatggtgttcccggtagtaagcgctttgaaacgtttcaagtcattgggaagccagaataacagtttgttttcataaccgatagccatgtgtcggtctactgcggcgataatgctaatcatattgtctgatgtaatcaagtggtcttttaatgatagaagatgctctctttcctatactgctacttttccggcaatatgcgggtgaggattgtaattgaccaattcaaagtcttcatacttgaaatcgaatatgttctttacatccggatttattttcatttgtggaagtgcccgcggctcacggctcagttggagtttcacttgttccaagtggttcagatagatatgtgcatctcccagggtatgtacaaaatctccggctttcaatcccgtaacttgggctaccatttgcaagagcaatgcatacgatgcgatattgaaaggtactcccagaaaaatatccgcgctgcgttggtaaagttgcagactgagtcgtccgttggctacataaaactgaaagaatgcatggcaaggcggcagattcatgttgtccaaatcgccgacgttccaggcactcactatgatacggcgtgaatcggggttgtgcttgattgtttccaccgcttcactgatttggtcgatggttccgcctttgtaatctggccacgaacgccattggtaaccgtagatatgccccaaatctccattctcatcggcccattcattccagatgcgtaccccgttctcttgcaggtattttacgtttgtatcgcctttcaggaaccagagcagttcgtggataatggatttcaaatgaagtttcttggtagtcagacaagggaagccctcgtccatattgaaacgcatctggtgtccgaatacgctgattgtaccggttccggtacggtcgcttttttctatgccttcagtcagtacacggttgagtaagtctaaatattgtttcatggagttacttattaaaagccttgccaaaggtaggcaaagttctcggtatattgaaaatttgcgctataagatttacaggaaaggagtcagcagatttcctacccagccgagaaactttttccagccggagcgctttttccacatctcgggcgtgagcaaggtactgttctttttgtccctctcgaacatgctgttcaactggttcgttgttgaagggtcgaagatgaaagcattggtctcataatcgtagcgcaagctgcggctgttgaggtttgcagtgcctaccgtacagaaagtgctgtctaccatcattactttggaatggtgaaatccgtccttgaacaagtaaattttggctccccgtttcatcaatttatgtgcgatataaaaagaggcttcgggcgtaaagggaatatccgatacagccggtatcataatctccacttccgtacctttctttaacgctttcttgatagccttacggatggatttcgtcggaacgaagtaggggtttactatctggatatttttttgagcagcttctatcgaaacggcataggcatggctgatagaccggggtgtttcccgcggggtgcggtctactattgcaatctcctcggctatactgtccggaaattggggcaggttggggaagtatgccggaccgccgatgtgttgtccggtttccctgttccacatagtcaggaagataccttgcaggtaacgtacggcatccccttctatgtgcatgtgtatgtcgtgccatttaccgattttaggcaagccgttgatgtaatagtcggcaatattcatcccgcccgtatagccgatttttccgtcgataaccactatcttccggtggtcgcggtgcatggcatggttgatatagggaaaggtgatggggtcgaacttgacgagttcgatgccgcgtgcctttatcgcctgcaaatgatgttttttcaacggctggttattggaccagttgccgaacgcatcgaacatggcacgtacctctacaccttcttttaccttttctgccagtaaatcgaaaagggcattggcgatggagtcgttacggaaattgaaatattccagatgaatgtggtgccgggcatggcggatagtttcgaataaatcaataaacttttcacgaccggtcatcaatagttcgactttattgttgtaagtcagcggtatttccatatcttgcatgtagttcattacaagagaatcgctggtactttgcgctcggacgcttccaataaaaaatgtaaataatatgatgaatgaaatctgtctcaaaactttataagtttatttagttttatgagttcgcaaatatacaatatatcattgagatatgttcatttgtttataaaaaaatcaacccttaccttttattaacaaggtaggggttgattgtattgttctgtaaggaagtttatttattctatgaggaaattaccgtttgcgatttccaaagcgtttaagccaatgaacatattttgcgatagagcaggaagagtaatactatgcctgcaaccaataaagatttgggatcaagttcagtgactccgctttgggcagcggcggtgagtgtttcacgaagtgtacccaatacctgttgcaatccgtcgaaaacaaagaacagcactaatgccagcgtgaaacagaacgtaacccatacttgtgaaatccgtcgggtgcggtcgggcaaatggcgcatcacacggcgggtgaagccattgtcgggtatttcctgccggttttcggcaaagaaatcaatcaggagtttatcattgttttccgtcataaccattttgttttaagtaggtagccattttttctttggcccgcgacaggtggctttttactgttcctgtcgggtagccggtaatgtctgcaatcttttctatactttggtcttccatataaaaaagagtgatacaggtccgttccgtttctttcagcatattcagcgcacggtaaatgtccatgtgccgccctatgtcgttttgctgcgtactgtattgagcgtctacccggagtgtttccagactgtcggtctccttacgggtgcgaagataatcataaaatacattataagcaatacggtagagccaggtggagaaactggacaggtttttgaatgaggcgagattggtgtatgctttaatgaatgtatcttgcgccaggtcatcgctcaattcgctgtcgccacaagtcaggtgcagaaaaaaacgccgtacggacgactggtactttcctactaaccggtcgaaggccctggtgttgcgaaacaccacgacctgtgcgactaacgatatatcattgagctgactcatttttctgcattcttttccggaaagacggttcttgcattatcggatttatcattgcttttaggggctctgtcttgctgcgtataatagatgacgagctgtccgaagcctgtgaacatgacaagcaggcctatgcagccaagtccgaattcttcggtaatggcccagaggaatatgaacagcccgataccgacgaacacattcttgattcctttactgcggatatctgtcgaatcggcttctttaaacagattttcaggcagcggttgtccgctggctaatgcttgttccaccaggcggtatttggccttccggtttttgtagcggaagaaaaagatgatgaatacgatgattaaaggaaagccgaaaacgaacacaatggctgtaatcgcaatgactgcgtctctcgtggcatgtccgatattccagccgaaatcgtaagcactgctatgatgcttgtaatcatcgtcactttctgagttactgtttgaactgttttcgtaagtcatgatgctaagggtgtccgtaacggcttttccgtcaatcacggtatccttcaattctatgactctttgtttgtttcccagactgtcattctccgtaacggtccggttctttccttgtgccaatgtgcaaagcattaaggcggttgtcagtgcgaagataatgcgtttcataatcatgctgttttttgtttttataggtttctttgtgtgttagacgtacccatttgcttgggaagttgcaaagagacgacattttttttagaaaagctattatcgaccgcaaaatatttatactacctttgcgtatttaaaaagtaaaacctatggaactacccgtttcttttgcagactatacccgcactcttttgggagatgaggattataaggaattagtgacttctctggagtcggagcaatccgtcagcatccggttgaatccgctgaaaccttttgctttccgctccggagaacatgccgttccctggtgcacttccggtttttacctggaagaacgcccgacatttacttttgatcctttgttccatgcgggctgttattatgtgcaggaagcttcatccatgtttgttgagcaggctctgaagcagtatatgggtgaggaaccggtagtgatgctcgacctttgcgccgctccgggcggtaagtcgacgcatatccgaagcctccttcccgacaatagtctgctaatagccaatgaggttatccgcaaccgctctcagatacttgccgagaatctgaccaagtgggggcatcccgatgtggtggttaccaatagcgacccgtcggactttacaccgctggaagatttcttcgacgtgatattgacggacgtgccctgttccggtgagggtatgttccgcaaagaccctgttgccataagcgagtggagcccggagaatgtggaaatctgtcggcagcggcagcggaggattattgcggatatctggccttgtctgaaaccgggcggcatactgatatatagcacttgtacttataacacaaaggaaaatgaagaaaacatccgttggataagggatgaattcggtgcagaggtgcttccgctcgatgttgcggaagagtggaatataacgggtaacttgttgcagggagaatcctttcccgtttatcgtttcctgcctcataagacgcagggagagggcttctttctggcagttctccggaagtcgggcatgagcgtccgaaactccggggataagcaactcatttccctggcaattgctcctgaaactccagggcttagagcagaaaagtccagggaaaagggacgtaaagtccagggaaaagggaagcaaactccgggactttccaaggagcagcttgcgatattgcagaagtggatttttactgcggataagtatgagtttatccagaaaggcggcaatgtcagcgctttcccaaaatgttatattccggaactgtctgcattgcagtcgtccttacgtattgtacaggctggattggagattgccggacagaaaggcaaggattggattccctgtcatgccttggctgtgagcgggatattggtatcggatgctttcccttgtgaagaaatatcgtatgaacaggccattgtctatttacgcaaagaggctgtcaccctttcggatgcagcccctcgcggagttgttttgctgacatataagcatgtgcctctcggctttgtcaagaatataggtaaccgtgccaataatctttatccgcaggagtggcgtatccgtagcggctatttgccggagacggtggtgaaagtgcattcttgacttgattccaccttcatcacagttcgttcttatatatccgcgccattgctttctggtattggttttccagttgcaggagatttgttttgctttggtaaacgaccgaaacttcgacgaaatactctatcatactgatttgtccgcctacaagagcctgtttcagtaaagtcaggtcctgctgttcctgaaaggtccgtttgtattcctgcatggaagcgtccaggttacgggcttcttcgtagagctgccataactcggagcttgcttttactcttgcattatctttctggaagtcgatgttcatggcttgggctttggctatcttcacttttcctttatttgagaacagcgggaaagagaagcctacgacaacaccgttcagcggatgtcccgattcggtattgcgacgatagcccaactccagtttcggcagccacccttgcttgcttgctgaaatgaacttgcgggctgcggcgctttcgctgtcgaatgattgcagagagggatcggcggcaagcagttcgctgcatacccgatggaaatcggttggcaacggaaccaggggatagtctgtcagtccgagggctttggtggtaggtacagcggggccgtcggggaagggacgcccgggagtaagcggctggttgccgttcagtaccagcagttccttgattttattgttcaaggcagtactgttcatgcgcgattcggtacgtacgttcaacagttccagattgattttatttgtttccagggcattggcatctcccgtagccagccgtttggcatacatggcagccagctcctctgcattcttcagccgtgcatcgagcaactcctgctggtgttgcagcatgatgatgtccaggcacacttctttggcttgcagcaatatctgctggcgcatggttgccgcctgtgcatccagtgctccggttttgagacggttcatctttcctcttgttatgtataaggtgggaaagtcgaagctttgggaaaccaccatttcccctacggttttgccgctgtttttagagtcccagagatgggcatatgagagggtgggatccggcaggttgttttcggtcctgctctccagcttctgtgatgagataagttgtgcattggcttgcaactccttgttgttggcttctatctggcgaagcacggagtcaatgccggtttcctgcgccctcatccccatgcaggcgaggatggtggcggtgaatataaatagttgcttcatatcttctgttattaaattatttattgatcgttataacgggatggctgtccggagccattacggatgcatctcttctttctttccgtgcatcatcaggtaaacaatcggaatgatgaaaccgttcaggaaagtggaagtcagcaatccgcccagaataacttttgccatgggactttgtatttcattgccgggcaggtcgccgctgagtgccaacggaatcaatgcaagcgcactggacagtgccgtcatcaggataggattcaaacggtccagcgaaccgcgtatcacgctgtcgtacacaccgtatccctcttcctgctgcaagtggttgtaatgactgatgagcagcataccgtttcgggtggcgataccgaagagcgagataaagccgatgatagccggaatactgacttcgcccgttgtgacgagcagggcgaatacaccgccaatcagtgccaaaggcaggttgataaggataatcgcactttcctttacgctacggaactcatggtacagcagcaggaatatcactacgatagacatgaatgaagtcaaagccagcgtgcggcttgcagcctgttcgctttcaaactggccgccgtattcgatgtgatagccttccggcagttttaccgaggcgtccacacgctcttgtatgtcgtttaccacgctgcgcaggtcgcggtcggcaacgttggcggagattacgattttccgtttcacgttctcgcggctgatagtgttaggtcccattgccgagcgtacttccgctacatagttcaacggtatcttttgtccgttgccggtatcgagcatcaggttacgtatcttttccatctcatcccgcaaatcatcctttacgcgtacggtgaggtcgaaactttttcctttttcatatacctgggatacggtttcgccggcaaggcatacgttgacaaactccgaaaactccggtaaggagatgccgtatttggcgagcacttcccgtttgggagcgatgataagctgcggacgttcaatctgttgctccacgttcaggtcggcaatgccgggaatgtcctgaatggtattctttatctcattgcccaaagcgaacatgcggttcaaatcgtcgccgaacagcttaatggctatattggctttcgtacccgacagcatggcatcgatacggtggctgataggctggccgatttccacattggcgcctacaatcgtacccagcttttcacgtacatcggccaccagctcgctgcgcgaacggtctttcagctcgaacggagcttcgatttccgatacgttcacgcctaaggcatgttcatccagttcggcacgtcccgtcttgcgggctacggtttgtatttcggggatggaaagcagtagttcttcggcacgatgtcccatcttgtcgctctcttccagtgaaatgcccggcagggatgatatgttgattgtgaacgaaccttcgttgaacggcggcaggaacgagcgtcccaatgtgaagaagcaggcaagcgccactgcaaacagaccgatggttccgcccaatacgctcttcttatgacccagcacaaaagcaagcgctgcaccgtaccactctttcatcttgcgtgctacgggcgaatcgccggtggaatgcttttcgtcttttatcttttctttgcccagcaggtaggagcacaatacaggtgtcaccgtcagtgccacaaccgtagaagctgccaatgccacgatgaaggcaatgcccaaaggtacaagcatacggccttccatgccgctcaggaaaaacagaggaacgaagcttaccacgatgatgagcgtggagttcaggataggcatacgcacttctttggaagcgttgaatacgacttccagtatcggcaggcgttccgcttccggtttcatccggttttcccgcaagcgtttgtacacgttctccacatcgacaatggcatcgtccaccagcgaaccgatggcgatagccataccgccgaggctcattgtgttgatggtgaatcccatatagtgcaacgccagcagcgaagctatcagcgataaggggagcgtcaccagcgagattacggtagtccgtacgttggcaaggaacagaaacagtacgataacaacgaatataccgccttcaaacagtgatttctgtacgttgccgatggaactttctataaagcggctttgcctgaaaatattggtgctgacttttacatcgggtggcaggttcttctgtaagtccttgagagatgtttccagtttgtcggtcagttcaagcgtgcttgtggcgggttgcttggtcacagtcagcagtacggcgggcttgccgcgttcggaagccgtacccagcttcggcagtttggctccgatacgtacatcggcaatgtcttccagcaaaatgggggaagcggaatacggagcattggaagttgctggctggacactgccgtcctgcaatttgacaacagcctttgccagttgctccacccggtcggtggagatgacaccgcgcacgatgtattcgtttccgtattcataaagcactccgccgttggcgttcagattcatttcacgcgtaacgttcatcacttcggtaagggttacgccataatgccgcatccgttccgggtcgagttgaatctgatactctttgatgtcgccgccaagtacggcaacttgcgccacgccgccggtagaaagaaggcgcggacggatagtccagtcggctatggtgcgcaggtcgagcatggaagtcgagtcggcggtaagtcctacaatcagcatctcgcctaagatagacgattgcgggccaagcgtaggcttgcctacattggagggaagggattcgctgacaaccgccagtttctcgcttacaatctggcgtgccaggtagacatccgtttcccagtcgaactcaacccatacaacggaaaacccgttggtggaagaagaacgtacccggcgtactcccgtagcaccgtttacagccgtttcaacaggaaaagtaaccaactgttccacttcctcggctgccataccgttggcttcggtcatgataaccacggttggcgcattcaggtcgggaaacacatccacttccgtgtgcattgcggtatacgtaccgcctatcagcagcagtaccgatgccaccagcaccagtatgcggttctgaagagagaaatgtattatcttgtttaacatgactgtactgtttagtgttcgtggctatgtgccggaattgcattggtagcgcctgcaagtttcacctgataagcgccttgagtcaccactttgttgcctgccttgattccggaaaggatttgtacccgttcgccgttatcggctccaagagtgaccagttgtttcttgtatccttcctcatccacttgcaggtatacgaagaagctgccttgttcctcggtcagagccgtatgagggagtgaaataacgttctccataggcgaggagagcaggaatatctcgacaaatgagccgggaatgatatctcctttgttgtcgaattcaaaagtgacgggcacataataaccgttatcgtccgatgcctttccgtaagagagcaggcggccgttcaggcctttcagtgtatataccttattattgtagggagtacagaagttggcggaaccgatggtgcggagatacggataatatttttccgaaacatcggcgcgcaggaacagtctgcggttttgagtgatgcttacgagcggctgtcccacggttacataatcgccttcctttaccaacaggtttttcacgtatccgctgatgggagaggttaccgcctgcccttgggccgaatggttcttggcaacggcttcatagctgatacgggcattctcatacgtctgtcgggcttgagcaaagtctttctccgaaacgattttattggggagaagttctttcatccgttcatactcttttcgggctgtttcgtaagcgatgcgcgctctttgtacggggtcgccgtccgccatattcttggacgaaagtaccacgaggggagtacctttgccgacactcatgccctctatgacttttccgtgaaaagaaacgacacctgccacggtagctacggcaacgctttcgtcgccttgtgcggccataacctgcccgctggttttaatcacctgattgaaaacgcccggttcgacggtgtttacagctactccggcagcctgcgctttggccgggggcaatatgatttcgtcgctatgtgcggcaacggcttcctcaccgtggtggtgtccgtcgtcatggtggtggccggggccttcgtttttatggtcgtgcccttcgtggtcatgtcccgcatgggcgtgttcttccgtttcgtgattgtgtccttcaccggacttgctgttgcaggagcctaacaggaataatcctatgactcccatgaatagaattttcttcatgataattgtttttgtccttacttgtttggaaatgcaaaattagggaatggtcggtgcaaccgggttgcatacattcctatgccggcaggataaccgtttccggcaactatcggtcaagcaaggacggaagggggcgcacgaagccctgtggcacatgtgatgaatgtgccgtgaagagattccaggtagacaaactcttgcctgatgcccgtttcctcgggcagagtcaggagtttgagaagcggttcggtaaataatgtgttcacccacacgaaacacggatgtaggttactgttgtccgagttgggtgtctgttggaagaaatgggtggtcatacatccggtgtcgcagcagcaatgttcgctgcaagggccctgatgctggcagcacccgtcggacggcaggtcgtttttcatgcagattatgccgtcttcgtggtgatgatggggaatgacaggtactatcagcataatcatgctgatgaagaacagaaagtatgcaatgtaccttttcgttttcatccctctctctttgattggtcgcaaagatagaagttaatcacttaactgccaaacccaagatgctaaaaagccttgaataaatcatttaatccttcgctcatactgggatgcgtaaagatgaaatcccgcagaatgctgtaatgcaaatcattcttcatggcaagcgatactaaattaatgacttcgggcgcatcgatacaaaacagggtgcagcctattatgcgtcccgtatgtgcgttgacaatggctttcatcataccgtctatctgctgcaaggtacgggcacgcggtatggcggcagccggcaaccgggacacttgaagcgaataaccgcgttttacggcttcctcttcggtcatgccgatatgcgccaacggcggatctgtaaaaatgacatatggaaccggaatcctgtcatcggtttttcgctttttattgccgaacaaccggttggtgataatgcggaaatcatccagggataaatagtcatacaaggctccgcctcttacgtctcccatagcccatatatgcggggcggtggtctgaagatgttcattgacgatgagagctccccgggtgtcggtccgtatgccggctgcgtgcaggttgaggccgtcggtcatcggtctgcgtccggtggcaagcagcaatgcgtctccttcccaaaaatagggggtattgtcggaattgtccgtataggtcaatgttatgccatcggcagtgtcgtatacggacagggcataggcgttcaaacgtatctcgatgcctttccttttcagagattctagcatggattccgcaatgtcccggtcggctttgggcataaagcggctgcccgtttccaataacgtgactttgcttccaaaccccgcatacatggtggcaaactccattccgatagcgccggcgccgagaatgagcaggtgcccgggaagtttgctctgttggagtagcgtttcgctggtgaatacatgcttgcttgcgtcgattcctttcacggcgggcaggataggggtagctcccgtattgataaaaacttcctttcctttaaggagaatttcctttttattgtgcgagacgacctttaccgtatcgtcagatacaaaagatgccgtaccgtcatacaacgtaatattggggtgctccttgatacgctcgtgattcttgtcccgcaagaatgatacgagcttgtttttccgccttatggcgagtgcataatatttggcctgattgccgtagtcgtcccggtagagccgttcggcctgttccgattcgtaaatcagcgctttggtgggtatacaccctacattcacacatgttcccccgtacatctgcggagaacgttcgatgattgccactttccagttgcggttggcgagttcggcagccagcagttttccgcctttgccgaaccctatgatgatagcgtcatattgtttcatttcattcgtaattaggaatttgtggcaatgaaacaataggaactgtttgtttgttgcgggaagtaagttaatgaaagtttaccgttccagttcgcgaagcgaatccattttcttcttttcgaggaattcatagatgccgctcaggtgctcagtcacccgcttgttgccgaactcgtacactttgctcaccagtccgtccaggaagtcacggtcgtggctcacaagtatcagtgtaccgtcgaagtccatgagtgcctgtttcagaatatctttggtcttcatgtccaggtggttggtaggctcgtccagaattagcaggtttacgggttccagcagcagcttaatcatggcaaggcgtgtgcgctcgccaccggacagcactttcactttcttcatggactcttccggtccgccgaacatgaaagctcccagcaggtcgcgaatcttgttgcggatttctcctttggctacgtcgtcgatggtttggaatacggtcaggttctcatccagcaaggatgcctggttttgggcgaaatagcctatttgtacattgtgtccaatggtaagcgttccttcgtgttctatttctcccataatacattttaccaatgtggacttaccttcgccgttcttgcctacgaaagccactttgtcgcctctctctatagtgaggttggcattcttgaacacgacatggtcgccgtatgtctttcctacgttctccataatcaccggataattgccggagcgcggcgagggcgggaatttcagccgcaatgccgaagtatcttcttcgtccacttccagaagcaccagcttttccagcatcttgacgcggctctgcacttgcagggttttggaataggttcccttgaagcgctcgatgaattctttggtttcggcgatgaacttctgttggtcgtcgtatgccttttgttgctgttcgcgccgctctttgcggagctccaggtatttggagtagtttactttatagtcgtagattcgtcccatggtcacttcaatggtacgggtcgtgatgttgtctacaaatttgcggtcgtggctgatgacgatgacggctttcccgttgttgataagaaactcttccagccattggatggactcgatgtcgaggtggttggtaggctcgtccagcagcagtacgtcaggtttttgcagcagcagtttggcaagctcgatgcgcatgcgccagccaccgctgaaatcgcttgtctggcggttgaagtcctctctggtgaatccgaggccgagcaatgccttttcaacgtcctcttcgtaattggtggcgtcgatggcataaaacttctcgcttagggcagacacctgttcgataagctccatgtaactgtcgctttcgtagtcggtacgggtctccagttccttgttcatgcggtctatctcggcttccatctcgtgcaggtgggcaaaggcctgtgccgtttcctgaaagacggtacgtccgtcttccgtcatcagatgctggggcagataggcgatgacacaatctttcggtgcggagattttgccgcgggtgggctgccgcactccggcgagtattttaagtaatgtactttttccggctccgttctttcccatgagggcgatacggtctttttcgttgattacgaaggatatgtcactgaataaggttgtgccgccgaattctacggcgagtccgtcaatagaaatcattatgtcgtttttaaaaataaggtgcaaagataatgcaaatatattattttttatacctttgtctcggacaaacaataatacaggttatggaaatcgataatcaatcggtagattaccgtccgctcatccttgttgcggaagacgatgatagtaactttaagttgataaaggctattatagggagaaagtgtgagataatgtgggcgaagaacggtgaggagattgtctctttgtttcgtgaataccgtgacagggcggatgcaatactgatggatattaagatgcctgtaatgaatggtttggaagctacacaaattatacgccgggaaggcggaacattgcctgttatcatgcaaacggcctatgctttctctaccgaccgtgaaaatgccataaagagcggtgcttcggaagtattggtaaagcccattacattgagcaccttgcgcaactgcttgagcagttaccttccccgactggaatggtaggctttccgcaatgaaaagataactgtatcttagggcttgtttatattttgattaaagaattatatagcttgctatactcctcataaagacagaaaacatcctcacaaagaattctcaaaagaatgctgaacaaaaattaagcaggttctgaacaaaatttctattcttctgttaatgaagtctaaccaaaatttaacggaatgaatagtaaactgcgctttttgttaatatcactgtttatattcttcgtggcagcattacaggcttctgcagacggtgatatccgtgtatcgggcgttgtgatgtcggaaggagaacctttgccgggagcatcggtattggtgaaaggtactcacaacggaacggtaactgacgttgacgggaaatatacccttaccgtaccggcggacggtacgctggtctttagctttatcggactgaaaactacagaacagaaagtcaatggacgcacagttgtcaatgcggaattgcttccggacagcgaacaactggatgaggtgatggtggtggcttatgccactgccaagaagtatagttttacgggagcggcttccacggtaaaggggagcgagattgccaagatgcaggtggccaatgtgtcgcgtgcgctcgaaggtacggtttccggacttcaggcaagtgcacccagcggccagccgggtacggatgctgaaatacgtattcgcggtatcggctctatcaatgcgtcgagcgccccgctttatgtggtggacggcgtccctttcgacggtagtatcaactccattaatccggaagatatagcttcgctgacggtactgaaagatgccgcttcggctgctctctacggttcgcggggagccaacggtgtcattatcataactaccaagcagggacataccgactcgaaaaccacggtcagcatcaatgccagcttcggtggttccaaccgggctatccgcgattacgaccgtgtcggaaccaatcagtacttcgaactctattgggaagctttgcgcaaccaatatgctctgaattcggataaatatactccgcagaccgcagctgcccaagcctcgaaagacctggtaggcaagctgatgggcggcggccttaatccctacggacccaactatccgcaacctgtaggtacggacggcaaactgcttgccggcgctactccgctttggaatgtggactggcagaaggaaatggaacaacaggcattgcgtacggaagtcggattgaatgtttccggtggcggaaagaccaaccagtactatttctcggccggctatctgaacgacaagggtattgcccttgagtccggctaccaacgcttcaacttgcgttccaacatttcgagcgagataacccgttggttgcgcggcggtgtgaatatgagctatgcccactccatacagaactatccggtttcgtccgatgccaagacgagcaatgtcattaacgccggacgtttaatgcccgatttttatcctgtgtatgagatgaatgccgacggtacatacaaactcgactcggaaggaaagcggatttacgacttcggttcctaccggccgtcgggcgctacagccaactggaacctgcctgcaaccttacccaatgataaatccgagcgtatgcgggacgagttctccggacgtactttccttgaggtcactttccttgaagggttgaaattcaagaccagcttcaacttcgacctgatagactacaatacgctggattataccaatcccaaaattggtcctgccgtcaatacgggcggtggagcaagccgcgaatatacccgtaccttctcctggacatggaataatatcgtgacctacgataagactttcggcgagcaccacttcaatatccttgccggacaagaggcttactcttaccgttacgatgtgttgcaggcggcacgaagcaacatggctgtgcccgatatgccggaactggctgtcggttcgcttgtaaccgcaggcacgggctatcgcatcgattattcactgttaggctatcttatcaatgcccaatatgactaccggagcaagtatttcttctccgcttcctaccgccgcgacggttcctcgcgtttcgcaccgggtacacgctggggcaatttctggtcgttgggagcttcgtggcgcatagaccgcgaagcgttcatgcagaataccgccgactggctttcagccctgaccttaaaggccagttatggcgcgcagggcaatgacaacctgggtacgtattatgccagcagcggactgtattctatcgtttcacaggcaggtgagaatgctttggtgtccgaccgtcttgcaacgcccgatttgaaatgggagactaacctcaacctcaatgtaggtattgacttttcattgttcgataaccgtttctccggttcgttcgatttcttccagcgccgttccaaagacctgctgtattcccgtccgttggcaacttccctgggttatacttctatggacgagaatataggtgctttaaagaatacgggttttgagatagacctcaagggaacgcttatacacacccgtgactttatgtggcgtatgggtgttaaccttacgcactacaagaacgtggtgaccgaccttccgctgaaagacatgcccgttaccggagttacccgcctgaaggaagggcgttcggtctatgacttctatctgcgcgaatgggtaggggtagacccggacaacggcgacccgctgtggtataagaacgtgaaggatgagcagggcaatatcaccggacgcaccaccaccaatgactatgctcaggctgattattactatgtggacaaatcttcgctccctaaggtgtatggcgggttcaacactgctttctcatacaagggttttgagttatccgccatctttgcctacagcataggcggttatatcgtagaccgtgacgttacgatgctgtggagcaacggaagcaatccgggacgtgcctggtctaccgagatactgaaacgctggacgccggaaaaccgctacacggacgtgccggccctgaaaacagtgtccaataactggaactccaactccacccgcaatctgttcaacaattcgtatctgcggatgaagaacatcacgttgtcctacaacttcccgcagccgttgataaagaaaatcagcctgaacagcctgcaactttttgtacaggcggacaacctgctgactttctccaagaatcagggactggacccggagcagggcatcacaggactgacctattaccgttatcctgccatgcgttccatttcgggcgggcttaatgtttcattctaaatcactgttaacaatgaatactttccttaaaaatacagcaatcctcgcagtgggattattatcagtcttgtcctcgtgcagcggagactttctcgacaacaaacctacggacgccgtagattcgggtatcgtccccgtaccttccaatgccggacgtatcttcaacggtgcatggtataacttgtttgagtacagcagtacgtatgccaatatcggctatcgtgccctgatgttgcaggacgacatgatggcggacgatgtggtgtcgcgtccgatgtatggtttcaattcatcctaccagtttaacgatgtggggatgccggccaacaaccgtaccgcatttgcctggtatctgatgtacaagactatcgacaattgcaataccgccatttccattaccgcgaccggtgatgataatacggccgatttccgccattcccaggggcaagcctacgctttgcgggctttctgttacctgcatctggctcagcactaccagtttacttacctgaaagacccttccgcaccggctgttcctctttatacggaacctaccgcctctacgacagagcccaaagggaaggctaccctggaagagatatatacgcagatattcaaagacctgaataaggctaaggagcttcttgaagggtatgtccgtccggacgacaaatccaagttcaagccggatgtaagcgttgtcaacggattgctggcacgtgcctatttgcttaccggacaatggaatgaagccgccggggctgcacttgaggcggctgaaggatatactttgatgacggatgccaaaacgtatatgggctttaacgacatatccaatactgagtggatgtgggggcatccccaatctgtgagtcagtccgacgccagttataatttctattatattgatgtggtgactcccgatgcgtataacagttttatggccgacccgcattttaaggacattttcgaaacgggggatatccgtttggagttgttccagtggatgcgcgaaggctatttgggttatcgcaagttccgcatccgtgccgaccagaccggtgatatcgtcgtgatgcgttccgccgagatgtatctgatagctgcggaagcactggctcgtgaaggacggttggaggaagccgtgaatccgttgaacacattgcgtaatgcccgcggacttgccgattatgacctggcaggcaagacgcaggaacggcttgtcgatgatattctgctggaacgtcgccgcgaattgtggggtgagggattcggcataaccgatattcttcgtacgcaacgttcggtagaacgcatgccgttgacgaaagaggaagcggagaaaacgtacgattgctggcagcagggagatacttatagggaatataaccccgaaggtcattggtttacttcctttcccgacggaacgaagtttgtgccgaacagtgtgtattatttgtatgccattccggaaaaggagacgaatgcgaatcctaatctataggagaggtgtgttgggaagtgattgatgttttttaggcacggattacgcggattacacggaaaaagaataaaataaatccgtgtaatccgcgtaatccgtgcctaaaaatagtactctgaatagtgcgtaaccggcatatcttcaaatttgttactccgtcttcttactttctctttcctgcattttgcgttttacgaactcaatcttcaggttggcctcttccatattcttcttgatttccgtgatggaagacagcagttgcgccagttcatagacagctgccaccgccttgcggtcgttcggtgtcatgacagtggcataggaacgttcgccaagatagtgtacgcggatattcttgtctttgttcagattgaggaaagcgattacattaccgtcttcgcccagcttatagtccgctttctctatcttctcgtccaaatcggtcgtttcatagctgtctttggaagccggggtttcggcaaaactgccgttgggtgcagtgactttcactgcgaggtgatggatgttatgcgggccgcaatagatggaagtcatgctcatcgctccggtttcatctacctgaaagcgcaggtaagagcggtgcaggttcttttctattacttgtgagggatgcaggtaattgccgattttttgatattcggcatctttctcgaaagtataattcttcttgatggcatccacctctttttgtttttcctgaagcatactgtcgaggtagaccagcgttttctcctgttctttcagttccacctgctgcatcagtccgataccctcgcggcgtgtttcaaaggccttcggatagagtatcttgatgctgtcaatctgaatcttcgcttcgctgtaatctccgcgttcaaacgcttcgcgggctgcctggagtttctctcctgcttttttctctacattgctgcaagagaagagcgtgcagcagaggcacgcaaggaatgctgctttcttcataattttcattcttgatgttagtgggggcaaaaataaaaaataatatccgtatctttgcaccctcaaaatgatttattgacaaatgattgaattgacgacagaagaactgaagcagcgtttcagtgacagcatatttaagcggatttccgaaacagcggatgaattgggactggagtgctacgtagtcggcggctacgtgcgcgacatattcctgcagcgtccttccaaagacatcgatgtggtagtagtgggcagcggcattgcaatggccgaggcgcttgccaggcgtttggggcgcggcgcgcatctttctgttttcaagaatttcgggacggcgcagttgaagtatcacggcacggaagtggagtttgtgggtgcacgtaaagaatcctacacgcacgattcgcgcaaaccgattgttgaggacggctcgctggaagacgaccagaaccgccgggattttactatcaatgccttggcggtctgcctgaacagtcagcgttacggcgagttggtagaccccttcggcggcatggcggatatgaaggagaagaccatccgcacgccgcttgacccggacataaccttcagcgacgaccctctgcgcatgatgcgttgtatccgctttgccacccaactgaatttctatatcgacgatgatactttcgagtccttatgccgcaacaaagagcgcatctccatcatatccaaagagcgcattgcagacgagctgaacaagattctgctctctcccgtcccgtccaaaggatttatagacttggaccgttcgggcctgttgcagctcatcttcccggaactggttgccttgcaaggcgttgaaacccgtaatggcagggcgcataaggacaacttctaccatacgctcgaagtgctcgataatatcagcaaaaagaccgataacctctggctgcgctgggcagcccttctgcacgatatagccaaaccggcgaccaaacgctgggaacctcgtgccggatggacattccacaaccataacttcatcggcgagaagatgatacccgatatcttccggagaatgaagcttcccatgaatgagaagatgaaatacgtgcagaagctggtagggctgcacatgcgtcccatagtgatagcggatgatgtggtgaccgactcggccgtacgccgcctgctgtttgaggctggcgatgatatagacgacctcatgaccttgtgtgaggccgatatcacttccaagaatatggagcgcaagcagcgctttctgaacaatttccaactggtgcgtcagaaactgaaggacttggaagagcgcgaccgtatccgtaacttccagcctcctgtcagcggtgaggagattatgaaaacattcaatcttcccccctgccagcaagtgggtgcattgaagagtgctatcaaggatgccatattggacggcgtcattcccaatgagtatgaagctgcccgcgcgtttatgctgcaacgggcggaaaaaatggggctgaaataggctccggcactctatggaagaaaacagggagtgtgtcaaaattcaattttgaggagataaacttttaacttgaaatttgcacattctgaaagaatcagaaaagggtcgtatcataactctcaaagtggagtttgatacgacccttttaaaggttataattacaatctgtaacttttcagaggctcattttagttgtgacaacctcttagcaaaatgtatatcgcttgattttcggttgataaaggaatgtccttactcttccgcctggaattttcggctcaccttcatcaggttgatggagtaggtcacaatattctgtgcttcctgtatcatcgtcagatacaccatgcttaccttaatgctgccggactggctttgaatgcgctgtaactcttcgcgtttcaggtgggcgagctggccgttcaggtcgttggctttgtgtatatcttcctcgaagttattgtagttgttgttctccagcttgtggcggcacacctgcagcaggtaaacgatgtcttccgttacatcggcaaactcacctttctggatggtgtcgagcggtttgaagttattgtcgatatgctccaggcacggttcgcaaagacgtcccacactatataccagttcgctggcaaagtcattgccctggtagtagtaaagtcctttttcgagcaccgtattgttgtccaggcggcacatggcaagcgtaccggtacgtttcatctgtttaatcagttgtttctcgaacttcacggaacccattgcccggcgcagtccgcgcaggttttcgtgaaggaaagcggtaacggtgcgttcgaagttatcttccgtaaattccagtattttgcccaattcctcacgggtgtgcttgcgcagcaattccagaatctccatgttgtccgtgctctgcatcagttgcttgatggtagcgtttcctttttccttctctttgcgcttcttgtacattacctggctgcgtatcagcatgaatactgccagaccgataagggcgatgatagcgattgtaccgccgaaataaattacgaaggtaacgaagaagcagatggtaaatgccgctccggcagtgatgaaccagccgccgataacgctcagtacgccggtgatacggaacacggcggagtcgcgtccccaggcgcggtcggcaagggaagtacccatagccaccatgaaagtaacgtaagtggtggagagcgggagtttcagtgaagtacccagggcaatgagcaggccggcaagtaccagattgatggaggcacgtaccaagtcgaacgccgcaccgtcggcaatgatggcttcgtccttttggaaacgggtctcaatccagcgtttgccgctttcgggcatcactttggaaagtccgttggctatcgtcatactgaaacgtaccagtgtacgtgctatgggagtgctgccgaagctctcttcaccttcgtcctggcgagagaggtcgacggaagtcttgattacattgtgtgctttcttggatgtgcacagcgcatataccatgatggcgcccgcaccgataaggaagtaccacggcgttttggcagggccgagcagtgaggtcatcaggaagccgtcgggacctgcggcagtgccgttggtcgtatagtcgatgaaagaggagtaaccggcaaggggcacacctatgaagttcaccaagtcgttgccggcaaaggcgagggcgagggcgaaggtacccagaagcaccactatcttgaatacgtttaccttgcaccagtgcagcacctgcatcaatatggtgaagaacacgaagaagcagccgatgagcatagcagtgttctcctgtatccagtgcttgttttcgggagtcatgaaagaactgtccttcaaaccttttatcagcatgaagtagatgatggaagtagctgcgataccgccgaagataccgatgctgtacttcatctttttggtgtagttgaaggtgaagacgatacgtgccagccattgcaccagcataccgaagaagaaggcgatggctacggatacgaatatcgccatgataacggacaatgccttgtctgtgttgataagatcgcccagtccgagcgtatcgctgccgtacactttgatgagggcgagggcaaaggttccgcccagcagctcaaagaccatggatacggtggtggacgtcggcattcccatggtgttgaatacatccagcagtaccacgtctgtcagcattactgccaacaggatgcacatgatttccgcaaaataaaaatgctccggctggtagataccgtgacgggcaatgtccatcatgccgttggagagggcagcgccgatgaatacaccgatacctgctataaacagtatcgtcttgaaagatgctgctttggctccgacggcagattgtagaaagttaaccgcatcattactgacacccacgacgaggtcgaagaccgcgaggacgaacaggaagatgacaatgcataagtagatagtttccataacatgtattttatttccggttgcaaaggaacgtgtttcgtgttgcagggaaatgtcatatatgttacagaaatgttacaaacttctctctcaactttccactctcagttctccgcttttcaggtattcgtagaaagtatattgcgcccgtactttctccttttgcggacgggctgatttccagcggttacgcaggtggtcgtccacaaagcaggctttgcgcttgtccgagagctggatggaaagcatgtccgacagttcccgtttcaaatccgggtccagaattggggttacagcctctatgcggcgatacaggttccggcgcatccagtccggcgagccaaggaaaagtttcggcttcccgccgttgccgaagtaccacacgcgggcatgttccagaaatgtatccacaatacgtgttacacggatgttacggctgtacttccgtccgggaatgaggcagcagataccccgtacaataaggtctatcctgactccggcctgcgaggcttcgtacaggcggtctatcatggcggggtcttgcagggcgttcattttgagtataatccttccttgttttccgcttttcgccagttctatttcatggtcgatgaggcggttcagttcgggaatcaggttgaagcgtgccaccagcaggcggtggaacacgggattttccttgccctgaaaagtgcggaacaggttgtgcaggtcgtttacgagtatggggttacaggtgaacagaccggagtcggcatagagcgtggcggtcttttcgttgaagtttccggtgctgatgtaggcatagctgggcagtttgtggccttgtctgtcgcggcgcagcacaagggctactttggcatgtaccttcagtccgggcaggctgaacaggatattgataccggcggctttcatcatctcggcggtggcaaggttgttctcctcgtcgaaacgggctttcagctctacgaaaacggttactttcttgccgttctgtgcggcggctatcagggtgttgataactgcggagttttccgcaacgcggtattgggttaccatgatttcgcgcacggtgggttcgtgtacggcttcgtacaggaaatggatgaagtgctcgaaagagtggtacgggtagtgcaacagcaggtcttttttctccacataccggaagatggactcccgctcgtccaggcaggtcagcttcatgggctgaggcttgcggatggggcgcacggcattgttcggattgggcagatgccgcaggtcttccatattgaggtgtttgtcgcccggaaccagttcctggcggttgatgcggaaggcatctacaaggaagtccagaaaatcgtcgggcatggcgcggtcgtacacaaaacggcagacggctcctatcttgcgttttttcactttgcttttcacctgctctataatttcggatgtgttggcggactcgtctatcagtatgtccgcatcccgcgaaatcttaatgcagtagctgctgtccacatcgtagccggggaatatcgtgtcgatattggctttgatgatatcctcgatgaacatcaggtagtagttcttcccgtgcttgggcagttcgatgaagcggggcaccttgctgtagggcagcttcatcacgaagtattggggagttcttcctttgtttgcttgtccctctgtgcccttgtctcctttcggatacagtcgtatggcaaggtacaggcggttgtcgcgcaggaacgatattaccttgtccttgctgacgggtacgggagagagatacggaaagatttcttcccggaagaagctccgcaggaattctttatgaaaaggctctacgttgcggctctggtagaagatgatgtgctgttgccgcagggcaggcagtattttctgttcgtagatgcggatacgctcttccagttggcggtttacctcttcgttgatttcggacaccagttgcatggcggactgcacactctcttcatcgctgtgtgcggcgccggtggcaatggccttatggtcagctacacgtattttgtagaactcttccaggttggacgagtatatggatataaagttgatgcgctcgtacagcggcagtgtatcgtcttcggcttccagcaatacccggtagttgaatgacagccaactgatgtcgcgcttgaaatatctgctctccataaataagattaggtttattttccaaatatagctacctttgcacatataaacaaatgaaaaatgacaaaagttggtttactgtcggatacgcacgggtattgggatgagaagtatttgcagtacttcgagccgtgcgatgaaatatggcatgcaggtgacatcggtacgttggaagtggcacagaagctggcggctttccgtccgttccgtgcggtgtacggcaacatagacgggcaggatctgcgccggctctatccgcaggtgctccgttttacggtagacggcgccgaggtgctgatgaaacatatcggcggctatcccggcaaatacgatccgtccatacagggaagcatcctggtgcatccgcccaagctgttcatcagcggtcattcgcatatattgaaggtgaagttcgacaagacactgggcatgcttcatataaaccccggcgcagcgggcatttacggctttcataaagtgcgtaccatggtgcgtttcgttgtggataacggcgtgttcaaagaccttgaagtcatagagcttgccggctgattttgactttattattttgtcatgtcagaactttttcagaactttgtgccctgaatagcaacgagagccgtggggcattgtcctccttcttattttattctacatttgaagtcaatccaataaagaactgaaatatgaaaggaattattcttgcaggtggcagcgccactcgtctctatccattgtcaaaggctatctccaagcagattatgccggtctacgacaaacccatgatttactaccccctttccacattgatgctggcgggaatacgtgaagtgctgattatctccactccgcgcgacctacccatgtttcgcgatttgttaggaacaggcgaggagcttggtatgtctttctcttataagatacaggaaaagcccaacggactggcacaggctttcgtgcttggagcggaatttctgaacggtgagccgggatgccttattttgggcgataatatgttctatggtcagggcttttccgccatgttgaagcgtgccgcttctatcgagaagggtgcatgtatcttcggttattatgtaaaagacccgcgtgcatacggcgtggtagagttcgatgccgacggcaaggccatttctctggaagagaaaccggcacagcccaagagtaattatgcggttcccggtttgtacttctacgattctactgtaacggaaaaggccgccgccttgaagccttctgcccgcggtgaatatgaaataaccgacctcaaccgtctttatctggaagaaggaacgctgaaagtggaactcttcggacgtggattcgcctggttggatacgggtaattgcgacagcctgctcgaagcaagcaatttcgttgctaccatacagaaccgtcagggattccgtgtgagctgtattgaggagatagcatggcgcaaaggctggatagacgtagatcaactccatcgtctcggtgaacagctcggaaaaaccgaatacggcaaatatctgatggaacttgcagactcgtaccgctgacaagaaacatgtgacttctctatttcttaatttttaattctcaatttttaatttatgaagacttatcttgtaaccggtgctgccggttttatcggagctaattatataaagtatattctggcaaagcacgacgatataaaagttgtaatattggatgccctgacctatgcgggcaatttaggtactattgccaaggacatcgatgatgaacgttgcttcttcgtgaaaggcgacatctgcgaccgtatccttgccgatgaactgttttccaaatataaattcgattatgtggtgaacttcgcagctgaaagtcatgtagaccgcagtatcgagaatccgcaactgttccttatgaccaacattctgggtactcagaatctgctggatgccgcccgtcgtgcatgggtgacgggtaaggacgagtcaggctatcctacctggcgtaacggagtgcgctatcatcaggtatctacggacgaggtttacggttcgctgggagcggaaggcttcttcacggagaagaccccgctgtgtccgcatagcccgtacagcgcttccaagaccagtgccgatatggtggtgatggcctatcacgatacctacaaaatgcctgttactatcacccgctgttccaataactacggcccgtatcacttcccggaaaaactgattccgctgattataaagaatatccttgaaggcaagaacctgccggtgtacggtgacggcagcaatgtacgcgactggctgtacgtggaagaccactgcaaagccatcgaccttgtggtgcgcaaaggcgtggaaggtgaggtttataacgtaggcggccataacgaaaagaccaatctggagattgtgaaactgactatcgctactatccgccgtctcatggaagaggagccgaaataccgtgcagtcctgaaaaagcaagtgaaagatgccgacggacagattgacatcagttggataaacgaagatctgataacgttcgtgaaggaccgcctcggtcatgaccagcgttatgccatcgaccccaccaagataacggatgccttaggctggtatcccgaaacaaaatttgaagtgggtatcgttaagaccatcgagtggtatctgaataatcaggactgggtggaagaagttaccagcggcgattatcagaagtactacgaaagaatgtacggaaagaaataaccgttacagaataaaggcaaggcttagcaacaagccgaataacagcatattacgtgaggtttcacctaatatgctgttcagttttttaccgcttcgtatggctaccattctgcgccaggtcagcacatgcaggcagaggtagacgcagggagcccagataaaggcaagcggctctattttgccggtataaacaaaccataggctgagtaaggcggctgccacacctaatcccagatagaggtaacggccgaaaggttcgccgaaacggacaatcagcgtacgtttgccgctgagggcgtcctgttcccggtcgcggtagttgtttacgaccagtaaagtgtctattaccagaccgcagatgaacgaggctacccatacgtcggccgtaatggcgtgggcttgtacgtaataagttccgcctacggggataaagccgaagaaaaccagtacgagcaagtcaccccagcctttgtaggagagtagggtggtgtataggaaagcgaatattacgcagatcaatcccagcagtatcagttcccaaccgccgtgaggcaattgtccccagcactgctgcaagagtgtgcaacctatgaggcaggagaatatgagcatgcctgctatcccccgtttcatggctgtgggagtaatccagccttgtgcgcaggcacgttcggggccgaggcggtctgcacggtcactgcctttcaggtaatcgtaaaggtcgttgataaaattggcggcaatctgcatgccgcaggcaaacagcgcacatagcagcgccggtatgatgttgaatgcttcatcggcaaatgccagggcagaacctgtcaatacgggaataacggctcccgtcagtgtcttgggacgggcggcaagtatccatgcgtggaacgagttggtagctattgctttcatgtcgtacttttagaaagttatactacaaagatagcgaaaggatttgttatctttgcactgctattcgggtaaaattattcattgcgtcaaacaataaagataaatctatggctcaggcactgttttatagagggttcgggagactgctgtttttttcttttccggtattgctgttcttttcatcgtgccggtctgcgagtaattttacctcgcctcttcccggtgagtattctgtccggatatccggatttccggcatccggatataagaatgtgaagcgcgtcaggcagtatgagtttgcacaccgtgatgttcctgccgcattcgacggttgcaggctggcttttgtctcggatttgcactaccgtagtttgctgaaagagaaagggctgaaggacatcacccgcctgttgaatgatttgcaggttgatgccctgctgataggcggcgacctgcatgagggctgcgagtatgttccggctgtgattgcggcattgggagctgtgaaaacgcctctgggcacttatgccgttcttggaaacaatgattatgaggcttgttacgatgatattctaaaggaaatggagcgtcagggcattcgcttgctggagcataaagcggatactttgaagcggaatggtgagcggattgtgatagccggggtgcgcaatcctttcaatcttgaacggaacgggcagtcgcccacgctttccctctctcccgatgacttcgtcatattgctgacgcatactcccgattatgccgaagatgttcccataaccaatgccgaccttgtgtttgcaggacatacgcatggcgggcaggtaacgctgttcgggctgtatgctcctgtagttccttctcgttacgggcaacgttttctgaaagggataaggactaattccgagaagcaacctgtcatcataacaaacggtatcggaacttccagtaagaatctgcggttgtttgcaccaagtgaggtggtagtcctgacactgagaaagttataagcgtatttatatttgtgccaagcttgtggcacaaccgtgcctattaaatggcacaactgtgccatcctaaaaacacaattatgctgtcagggtggaatggctggaggatgctcttgcgtcatcattctgatattacaaacagatgatggtgctgctgaaaacgtaaaatgggtatatcctgcgttttataagtaaggatttatttctacatcttgaggcttttcttctacggtgtcgtcaaccgaaattcccatgtcaattctgccgctggcgctggtttttatattcagtttataccattttgccgcttcaagctgaatggtttgcgttgctgtacgcacattgcctttatatgtaccggaaacggtgcatttcagattaggatttttactgtcgatgttaaaaaacgctgcatcgtatatactgttgcatttgccgttactgtcgaaagtgatgatccgtgaaggttccgcctctgtagaaacctcaacggtataaccattgaagacttgtgcaaagacttcgtcataggcaatacttactttggcattggccatagtgcaggttactttgacgttgcttatttcattggttctgacttcaaaaggagcgcttgttccgaagtaacgtatttgtcccactccgtcattagcagattgtccaacctcttccgtgcagctttcagccgtaactgtgtagccacttcctatggggaagatgaaggtggtgttcttaaaggtcagaaagttggttgactctaatttcacattgccgttttggaggacttgtatgttgtagtccttcgcatccgtttccgtaaggtctgttaccgtgcgggtgcttacttcgatttcaggagcagtggagttttccagagtgagattaatctgtccgcattcttgtaccggttcatcattattggtgcaggctgctgcaatcagcgcaatacctgctaaagctaaaagtttcttcattgttataattggggtttaattattcgtaatcatagtttaagacaacattatctattttgagaacactgcccacgacacggtcttctccaaagggagaactaccgtaaccaccgttttctctatgcatattggagatagtggtatcgtaaccggattgaaaaaagacagtaatatatttggccttgctttgcatatgctctttattatattcaaatttgagagtctgcgcggtatactcctcttgttcggatgagttgaattcaatggtacttgcaatttcttttttatccgcattatatactttggcataagccaggcacttgtcattgatgacagggaaatatttgtagtcgaacgatatgcttgtaggacggctttcatgctgtatgcctaatgtgtatgtatcggtgtttttatcgaatgtgcctgtgaaaaggtaacctgcatatgctgttccgttatcccgggtataagtatatacttcatctctgctccaagtgccactgacttttttgttgtagaatgccaatgttgaaatttctacagcatttgcgtctttgctgctgtctgctgttggaacagtaccggaacaccagcgccaccagactccataaccgactcctgttccccagcctgtggcactttccccacctttggtcgttctttcatttctcgtgttccaacctggaaggtaataacaatataatggacggctccaactgccgttacctccatttatctcttttttattccagactgattcaaaattgccattctccaattgttctgcactttccattgttacttgctgtgaattagtacagatgatgcttccaaagcgggaacggatggtatattggttgttggcaacgagcccctttataacagtctttccattatcatttatagcttgtatccagttaattccgtccgctgaagcttcgtacacgatattggccaatactttttccgtcatttccggtttggagctcatattcgctgccgtcataggagtaatatatataaatgtactccatacatctccttccatttgctccggtagtgtaaaagaaggcaaatcgggattgcaattcagtgtatagcgattagcgacaagcacgtcttttagttcccaagagttcgattttgcttcatttaaagtattcgtaccggataatgttaatgtataatccttgcctgccggtacaaaaaagtcagcgttattagggatttcttgtatgcttgtcccatcggaaatctcgattttgtaggtgtcgtagtgctcaagcaaattatcggctattgcaggatgtacgattgcgcaggatagctttacggaaaggctctttgctgtttccgtggctgttgtaatccggaactcttctgttgcggcatataaataaggagcggttcccatgttttccgttccataagatacttctaacctgtaaaagccttcatccaatactaaagacgtgaactctcctgtttggttgtacaccacttctccggtctgcgtatcggttattttgtatgtcagttcagatgctgtcggtgcggtaaaagtgcttgtggcacgggtgacagtctctgctgaggcttctgccgaaatatccacatctttcagcacgagccgtcctttgcctttgtacgagggttgcaaaacgtcttcctggcagcttgcaaacccaagaaacaggcagagtatgaatatgtatcgcattgcgtttctcatatcttcttattcttttcaatagtcataatccaaactaaactcatctacgtgaagtgtgcttcctctgccccctacgaagtagtcgccatatttacttgccgagcatacgatgacaatgtaggtaggtacacggttagtaacacggtagtccaggttcaattcgaactttttgtattccgttactgttgttccgctgtacatttcggcataggcgatgatatgctcgtcgtttttgtcaaacagctttctgttggtagggcgggtgcgtatctctatcggttccgtccaatcgcccaaagcgatgtatatggcacatgtatcgggctttcctttgtaattttggaaacgcgtatagtcctggctgccttcggctggcaagtctgtaataggtgcggtggtatatttgtagtatcctttcaattttgtcgggcgacctgtaaatggctggccgaagttcaaaataccgtttgtaccgtccaccttgatgaattttcccgtaaacaggttgccggcagcaaatttcacgattacattcttcgattccagcctggctgctttgccgcttccggcagcggtgtcatcggtgggggtggaattgctctgactggctgtggtaacgcctatattgccggtatcccaaaatggcgtactattttcttcccaggggtttgccactttgccatccatgctccaataatcgaaagaagcattgggcagttctattgccgctgtagtggtgaaggtcttttccgtacttatggaagttcccgaatatgcacggcagacataggcggtcgatgctttcaggtgaggaatacgggccgagaaactgccaccggtcgctatcatataggaagcatctactttctgccactcttcagaggttgcctcacgtatttcgaagccgttgtcttcgccttcaagcccctctccatacagccaggctacattgacccaaccgtctgccgatgttatcttgacagcatctgtttcgaacacattgagtgtccagtcttccagtatatcccggtaagtgacgattacgatttgcggttgtccgcctgtaaagttcattaccgtggcgttgccgtcgtatccgtgtatggtggagccggtaggtcctaactttagttctttgattttaattttggacaaatcctgctctttgcttacataggcaatggctcttctctctttttcgtttacatagaaaatggcctcaccgatttggccttctacaacaaaacggcggtcaatcggctgtttggctatgattttccacggataatcctggtagagggacaggataaccgtttgaggatttgtcaggtcgaaagtcgtgtccggacgtaagatgctttttgcaccttccgtcatttccactttcctgatatatactttcttcatatttacggtatcggcaagggtcactgtcactgtacggttctccgtactgataactgctcctgtagtttccccctctacttcgagcgcagtgatgtcgagctttataataggatagggtacattgttctctatgcaggagctcagcagccctgccaatatcaggaacagtccggttgcatatgtttttattttcttcatgtatcttacaggcaaagtgtaattcctatatttatgttgaacaagtttattttgaagtcggcgccgctggcagtgcgtttgcctgtttcaccttcattgttcttctgtttttctattctgtacttgaagccgacaacgccgaatgacatctcggcgcatacattctccatgatgaatacggcaacaccgggattcaaacccagatgtatctcgtgtatggtggtttccgtgcgtttcaatgcttcgtccttgccacgggtgaaagtgctgctgccattgttgtaggaaagcgaactttcattgaagaatccgaagcgcttgcctctgtccagtcccacatacgaacggtggaacagtgcgatgctatacgagtcttccgaatagcgtatgtctttgaggtcgaaactcaaatcgtcgtcaatgtttagcgatatgttgcccaggtcggctacggtgtggttatacccggctttgagtccgactatgacattgtccttgaatgcataacctacaaatggtctgacggatattgtacggaagttgcaatcaaagtcttttatcaatgagaacagcatccggctgtcttcgccgtcataattgatataggagaacgtaagtccgcctacccatttctttttgggtataaaacggtaattgataattccccggtcgaagcgtccgaccggtttggtatagataatttccgaactgtccggttgagctgcttcaacagccggccgttcaatgtatatcgtgtcgtgtacataaactgtccgtacccgtaacgagtcgtgcgcttgggataacgcttcctgcgtttcttgtgcccggactgtttccatacccactatgatgcacaccatatatataagtaacttcttcatccttaattataaataaaaggccagtcccagacctatggaaaacaggtttatcttgaaattggcgctacttgacgaatgttcgccttgatacacctggttggttgtctgtttggttttactgaagttcaatccaagcacaccgatactgacttctacggcagtatagttgttgatgaatgccacaatgcccggtgctgctccgatgctcatgccggtggttgtggcgaaagttccggtgaccgactcgtcctttccgtttattactctggattggctgcccgaccattccaactgggtttcgttaaagagtgcaaaccgcttgcttttgcccaaactgatgtagttgcgcagtatcagcatacctgaatatgtgtgtttcaactgatacaggtcgttgatgtcaaactgattgtcatcatcgatattcagcgtcaggccatctatctttatcaatgaacggctgtaggcaaaccgacctccggccgctatattgtctttaaacgcatagcataccaggggactgactttgaatgtatagccgtcggatttgaatccgtcgataatcaggaactggtagttatcctcggtatgttcggagtaagatatcgaactgcctgctatccactggcctttgggaacaaatgtgctttgttcgatttggcgtttgaattcttgcgcttggactttaccgcctgcgatagctgccagggctaatgttatgatgattgctttttgtctcacttcacagatgtttttattcataaactaattcgaagtcgtcgagccacatcgtacttcctgttccgccactgaaataatcgccgtacttactggatgaggctacgatgatgatagctgtcggcttccggttggtataacggtactctaccggaatgttgaattcaatcattccttctccttctgtcgaagatgtgaagtccttttcaccataacctatgatatactcgctgttgacatcgaacagttgtgcgctgcccggagtcttatagttggttctgactattacaggccatgtctctccgccgtatgtttcgccgggccagttgcccaatacgataaagatgcttcctatatccggatcgcctttgtcgataaattcgcaactgttgtcgtaattcacggtattggattggtagcggacatatccgcgcaatgccgtaggacgggattcgaacgggcgtccccaacccagtacaccattacctacgacaccatccatattggtagccaggtatttgccggaaaatacattgccggctgcaaactgcccgatgcctaacatgctggcgaatttggattccagtttggctgagtagctaccgccatgcttcacagaaccgtccgcggtggttatatccgttccggccttttgtgaaccgtggttgccggtatcccaaaacatcgttccgccggattcgtatacataggtcggcttggaaccatgccacttctcaaacccggcattgggaagttgggcggctttctccgtagtgaatctgcaaaccacagaagatgccttttctccggcaaccgctacatattcataggtggtagccactttcagaccggtgatggcagcagtcatttctttaccgttcaaaacagcttccacttccttccagtcggatgagccggttatccggtaacggaatatcaagggatcggatgtttctttcatcagaccgccccgcaagactgctctcgatgtccatatgtcaccttctgtaacctctttggtcagcaccactgcatcggaagcggatatggataatactccctcattggtgcggttgcggacatcggtagcatgtaatattatgttataagtcccttcttttgctgtgatatgtttcattaaaccgtctgaaaacgtcacacgcatcgtaccgacatcgctgccggtattgtattcggatttgtatgacaggccggaagcttccaaacgccccctttccatttccgtcagtctcatgaggttcatccggacgggaagtccgcattgtgcgaattgttcgcagtacatggacagttcattgagtacggatgtacttgttacggtatacgataattccgttcccatgcctacttcatagaatgcggaagaggttatatcgaagttttcgccgcggaagataggtcgttgataaatctgtacttcatcggttatttctcttatcggattggcgttgacactgacttttaccgtaccgccaccgtctgcgtagtctgtcggtatgaagttgaaggacaagtcgtagcgataggcggattgcgcatccggaatgtttccttcttttgtatagctttttccgttgggcatggttgcttccagatgccattgcagcttagtattgcccgccggcagcatgtagtagccgatggagtctttggtctcgggaagataatctaaagtgccgtctgcagtggataccgtaactttataggtttggaatacggagctcaatgcttcatcatattttacggcaactaccgtattggcgatgccgcaagtcagctccaggttggtaacttcgccgctgttaatgtggaagggacgttcttctttataatatacagtttcgaaagaagcgggtactgagtcgcctgccgtaacatgggctgtgtagctgccggcagagaggtaaagcgcttccggaagttcgtttactcctttgtaccggcggacggttcccttttcattaaggatgccgattgtgcagtggcgttgtaaagaatcctgtaattcatcggtcatagaacgggttgtaactttcacctggtcggttacacctactttcaaatgaagcattccctctccgttcaaggtgtccttttccgaacaggcgataaatgaaatcactgttatggctgtcagataatatttgaagtatctctttggcattgtgttttgcttaatttacgataagggctaatattgcggatgccgtgtttcctttgtcatccgtaacctttagattgaatctgtgggttccgggaaagcccaccaataatcctgtaaatccactgatatcaaagtcaatatcggttttaccggtaactttatccccatagggtagacctaagttctggagtattccgattaacgctcccgggtttgccaggtcaaagtcggtgagtcccaaatcggaaatggcatctgcaaaatcggtactgctggacgttattcctatttctaaattccggataccttccggtaccgctatttttacaattatgggatagggattgtccgttgagacaccgggtggtatggttatgctctgggtaatatcgaaatctttgccggtgattgccggtttggttccgggactcggttcgggattcggttcgggttcgggtagcggctcttcttctcccggggctatggttatgtctttctctacaacctcacatgttgcatctatctggatgtcgacctttccaatctctccattgtcaccgtcgccaccactgttttgcttcatcgaatatttaatgatacgttcttcaccgggaaggacgtcgatgaaggctttggacatcgtaactttctctccttgaatggttgcgctgaggtcggcaatcagaatgttggtttcaccgatggatttgaaatatcctgcacgtgtttcgtcttttgcatattccaaacgtccttcaccgacggataccttgaccttggagtcttcatccaacagcttttgaagttcgctgtcataggctattcttaccttgatattattcaaggtacaaaccagttctttaagatccgttaccgtattttcagtaatttcaaaatcctgtttggagaagtaatagggcttttcgaactctgccggttgtacttcgtgagacatggctgtgatactatagtggcttacctttagcgtgaatatttcgggcatctcgctgtatttccactcttgcaccatttttccttctttatccatatcgtaaatgcggatgatgaaattgtcggtattgattcctgcacgggtaactgtagtagctgtttgctcgtctacggagacttttaatgcagacagtcctatttgaccttcggcacgattgtctatgtcgtcaggacctttttgggcgtttccccattgctcgcgttcgcatgaagagaatgccagaatagcaaagaatgccagagtaaacagagtgtttgatttcttcatattttgttattcatatataagttctaaatcgtctattttgaggcggctgcctaaatgggtggtccagcctgttgcacaatctgtcaaatcaattgttccggctttctgtaaatcgtcactgccgaaagaggttttagttgttgataggatattgacatatatgtcagttgctttttccatatttccttggtagtcgaggttgatatatgcttcctgatattcgctgtctgcagaacttgcggcttctgatatgtacgagccgcctgctatgactttattcccgctgcgtatctcgatttcaactttaaagttgtctgtctgatagggagtgtatttataccagaatttcattccgtagggtctggaggtgaaaggatgtccagttgttacggtttctttcttgtcactccaattataggttcctatgaataagcgtcctgcttttgctccctcggggtacatcgtggcaggggtactcgaatatcctccgccggaaccggctgtgtgaatctccgctgctttagcaccgctttttgcgtcttttacatagataacggccggacaggttgttgtctgtaccggtgccacaacccatgcttgggaatatttgttgtttgtattccaccatatatcagtagcacctttagtataagggtaataaaaatagtgggtgaaatttccaaaagtccctgcagaccaccgtgtatcggaatctgtataccagtcttcaaaaccggaattgggtatctgtagtgcttcctcggtttttacggatacttcattcttgacggtaattgtattggttccatctattacggctttaaatatgtaatcggtgccaggctctaatccgctaacctcaaccgcattttttattttttcttgtgatggagaaaaccagtctcctgacgcttttctgcattttacggtaatatccttaaccgtcttcagatattcggttgttccctctgtgtctccaaccaaatagagagtggcttttttagcccatacatctccttcgggagcagtcagggaacaggatgattcaccgattcctactgtcacggtcttttctttatctcccgcaattacttttatctgttgaggttcctgcaacccgtctttgaacgtgatggttacttggtgcgtatctttatcgctctctatgcttgtaggaactaaaggttgccaatagccgtatgcctgatattgatagctgactttggatatgtcccctttcaaaatgacggtcagcagtatggtagtgcttccacgttcggcattcataggcttggctacgtcaaaaccattaggcagagatttgattttgagtaccaatggctctttgtttactttactcaatttgtctgttgcggtcaaggtaaatgtattttcttcgtctgtttccgaatgagatatattgaccagtacttttgtgaagtccaatattgccattttatcgacattggcacttaatccttttaactccagccccaaatcttgtaatgtggtaagcatgcctggttccggatttaccagatcaatctcggcaggccatcccttgcttaacagagaaggagagcgggttgtcaagacacatttggatattccgccacgcgccgtcagcaaggctgataaaggggattcgggttctgtccattccgttaactcccgggcaactcccgattcaaaccccgttggtgtaaagaacggtggctgtgtgttcaaggcatcgtccgaaatatctatggttatcggtactctttccgtttcgtccgtgaatgatacatccaattccgtaccccctgcttgtacatcaaatttcagacggtaatgctggcgtgcctttgcattctctatggtagcggcttcaaatgtgactttgtttccttgttgtttgcttcctgacaggtaaatgcttatcttgccaggctttacgtatgcggcccttgtttcattcttgtcgaacgagatgtccgtactgccggcagggcgtatgtttacggtgtagtctgtaaaatattttttgaaaagttccgtgtattctgtcgtaacttttacattggcaagataacatatgaccgatatgtttgtactttcgttcttttttatggagaactcttttgctccttcgtagtaaggggcttcaaaaccttgggtttctatgtttccataagtggcctttagtgtatagttgccggctgcaatttccgttccgtctgtaaagtcggcatacctgttccaggtaagttgtacattattattttgaagaacggcaattgagaagtcgttgatgtcgggtaatgtctcttcatcagcggtagcacgtgttaccatgttttctacatttgtatcaactgctaatttcagattaagtctgccctggtttgcagtttgttcattctcccgctcacatccggtcaatgtgatacatattactgtaaacagggttagaaaagtcgtatattttttacccattaacaacagtgtttggttatctttttacctgctaattcttgaagtcgggtacaaaaatatgttttttagatgagataattagcgattgtcgccttgttttgcagttataaatgaaaaatgggacatcatttgtcccatttttctcaaaaaaagaatagttgattaatcttgttttaatcttgttttagacataaaatcttatcatgagggtagcaatactactccctgtttcttctttccgtccattttggcggttataggatgttcaaagtgcacgtgacgcaggtatttggactcatatacagcaggttgcgcattcagaaagtcttgattatacacaccgtcattcatgaaagcattgattgtgaaatagcctactccgaatgaagtcaggttctggaaaaagtgtgttccctggctaggatcgacacgatagttcgtcagtcctgcttctacaatgatacgcgctgcactgatgtggggccatttaacgggaatgccgagccaggtatcactgctgccccaacgtcccggtcctatcagtacatagttcttgccctcgtccaaaaattgttggttcaatttttctatctcccaggctatttcctgattgtgggaagcgctgtagttgtcggtctttacataaattacatcctgtaattcattcattatgccatgccctaatgaattattggatcgtagcagcagtttttcatcgggaatggctgtgaggtcctcgtcaagcatttccttgctgtcgacaatcgggcgtatttgcaacaggtagaacgtcccggtcttgtccttttcacggttcatggtagctgcaaattcgatttctacaggacggcgcatttcctgctgtccgtatttcaatgccaattgcaaaatgcggggcagaggaaatacatcatgctgcaagatattggcgaaggtgataaccttgcgtccgcccggatataaaccgtcacggattatctggtcgtaagggtcgtaggtggaagctatatatttgagagaaccgtctttctcggcctcttttacgtgtaatttcaataggttgaaaccatcgtcaatggagaagtcatgtccggcgttacgcaggtcgagtgcataaaaacgtgtttgggtttctttgagcgcaatctccatttcgctggtttgcagaacttggttggggtgatagggagagaaccggagagtcataccgccgtctacgatgtatttgcccagcccgagtgccaggttgacaataccctcttcagctttttcgtctccgataggataatagttgagcgaacgcgccacgcccgacatggacgggtaataacggtcgccatactggttgccgaccacttcctgcaggattacagccattttctcctggtcgataacattgcttgtggcttgcatataagcctttgaatcgcggaaatatacagaagcatagactcctttgattgcatcactgagcatacggagcatttcatacttatcgtccagataaggaatcatataagtattgtatataccggcgaaaggttggtaatgcgagtcttccaatagtgaggaagagcggatggcaataggtgattttaccacatcgaagaaagtgaaaaagtcctcaaccagacggtcgggcagtttggctttcagaaagtagcggagaatcacatcgtcgtcggcatcggacaaggctatctgatacaggttgttagtctccatgaattcatcgaacacatccgtacacaatactaccgttttgggtatggcaacgcgggcattttcaaattcgtcgaattccggatgatgtttcaccatgttgtcaatgaatgccaggccacggcctttgccgcccagtgaaccgtcgccgatacgggcaaagttcgagtaacggtcgaaacggtcgcgtttgaaaacagctaccacaccctggtttttcatcttgcggtactttacaattgcttcaaagatgattttgcggtgggcatctacatcctgaagactgttccacgtaataggtttcaagaactcgccaatgggaaacatggcgcgtgaatagagccagcggctcacatggttgcggctgatatgatagaggaatgattctgccggtacggcaaagaggatattctgaagttctttcagattcttgacgcgggcaatctcttccagtgtgtcggggttgcggaagataaagtcgccgaaaccgaaattgtccgatacgatacggcgcaggtctacgtccattttctttgaattcttatcgataaaagccgcatcgtatttggctgcgtacgacacgttctccgattcggacgattgtataatcaatggaacaaacgggtcttctttccgtatggcggcacacagcttgataccagcgagtgcgtctttctcaccgcgttcaacgcgagggaagcggacgtcggtgataactcccagtatgttgttcttgtatttttcgtatatgccgattgcttcgttgtaggtacgtgcaaggacgattttagggcgccctctcatacgtagcgtacgttggtgggcattcaatgcttcagtggaaaactcctggctctgtttcaatacgaatttataaagattgggcaggatagaggagtagaaacggataccgtcttctaccagaagaataatctgtacgcccacttcactgacgtcgtgttccagattcatcttgtcctctatcagcttgatgatggaaaccagcaagtcggtgttccccagccagcagaagatataatcgaacgaactgagatcctcgttggcaatgcgtttggtgatgccgtggctgaacggggtcagaattaccatagggatgtgctcgtattgtgccttgatggttcgcgctacgtcaaatccttcattatctcccgttcccggcatacatataataagatcgtatggcatggacgatagttgggacaatgcttcctcgcaagtagatacctgtgtaaagcgcggcggatagcgcagggagagtgaagtatattcattaaagattttttcgtctatacgaccgtcgtcttccagcatgaaagcatcataaggattggcgattaaaagcacattgaagatacgtcgcgtcatgaggttggcaaactgcgtatctttgaaatagagctggtttaatttaaacttactgagcatgttttctcatggtttattagttcggaggacaaaagtagcaatttaaatgaagaatgaggaatgaaggataaagaattacctttgcaagcagtttatacagttgtcccctgcttttttgtttgttgttcttttatattctatgtgatttgacgttttatcattatttaatcaaaatattgctgcaatatttaggtgttttgaaaagttttcctatatttgcagtgttgtttattgacattttgttcaggcaacaaatagttaacaaggtaataacctttaaaacgtaatattatgaatatcgaacgtatcatgtcctctttggaggcaaagcatcccggcgagtctgaatatcttcaagccgtaaaggaagtacttctttctatcgaagatatctacaatcagcatcctgagttcgagaaagcgaaaatcatagaacggttggttgaacccgatcgtatttttactttccgtgttacgtgggtggatgataaaggcgaggtgcagactaatctcggttatcgcgtacagttcaataatgctatcggcccgtacaaaggcggtattcgtttccacgcttcagtaaacctctctatcttgaagttcttggggtttgaacagactttcaagaatgctttgaccactctgcctatgggtggcggtaaaggcggttccgatttctctccgcgcggtaagagcgatgcggaagtgatgcgtttctgtcaggctttcatgttggaattgtggcgtcacctcggtccggatatggacgtacccgccggtgatattggtgtaggtggtcgtgaagtgggctatatgttcggtatgtataagaaactgacacgcgaatttacaggaactttcacgggtaaaggtctggaattcggcggttcattgatacgtcccgaagcaaccggtttcggtggattgtattttgtaaaccagatgttggaaaccaaaggtatagatatcaagggtaagacggttgctatctccggtttcggaaatgtggcttggggtgcagctaccaaggctacccagttgggtgctaaggtcattacgatttccggtcccgacggttatatctatgacccgaacggcatcagtggcaagaagatagattatatgttggaactccgtgcatcgggcaatgatatcgtagctccgtatgccgatgaattccccggctctactttcgttcccggcaaacgtccgtgggaggtgaaagccgatattgctttgccttgtgcaacgcagaatgagttgaatggggaagatgcacagcatctgattgataataaggtgacttgtgtgggcgaaatctccaatatgggatgtacccccgaagctatcgacctctttattgaaaacaagattatgtatgcaccgggtaaggctgtgaatgcaggcggtgtggctaccagcggattggaaatgtcacagaatgcaatgcatctcagttggagtgcggctgaggtagacgagaaacttcatgccattatgcacggtatccatgctcagtgcgtgaaatacggaacagaacccgacggctacatcaattacgtgaagggtgctaatatcgccggcttcatgaaagtagcccacgccatgatgggtcagggaattatctaaggaaaaactttgtttagttgtatttgtatttgtggtttgtgctgcctgcgcctgtgaaggtgcaggcagcacttttttactatttgtgggtattattgtttttaatatagttatttatcggtattgtgccagctacctgtgcgatctaactttgcagcgtgaaaattaatttattaacgctaaaaaggaataagctaaaatgaaaattaaagatgtattggtcatggcggccatcggtttattaggagcagcatgcagtgatgacgataataagggtagtcaatggggagacggagttggaggtacgaaaacgaatctggatgtatctgcctatgataaatggacttatgtaaatctgaaaaccggagaaacggaaatacatccggatacaagcgaatggatttatacggatggttcggtaagcgagccaaaagcgaaggaaactatcggtatcgaatggcatatcgccatacaccgttatgagataaaaacaaacggtggcatggttttcgatacggagaaaacaaatatgaatgaaattacggagttgcctgaaggagactataaagcggatgaaaacataacaaacgaggatgaagaatatgccatcatcaccgatatgagcaaaatgatgcaaggcaacgtcggttacgccaagactgcaactgtgaacaaagtgttgtgcagttgggtgaaaaagacggagacaggtagtatgcctcctactatttatgaaccgacaatgcatgtgatagttttgaagtgtaaggacggcagttgggcgaagcttcaatttacagttgcaggaaactctgaaacgaataagagcggttttgttacattcaattacgaatttatcccgattaaataagaatgagacgggttctttgttccttactttttttgctggcagcggcagtgcccactgtctttgcggaggaagtggacgaaagggatagcaaccgttatcgctattccatattgggagatgtcgtagatgaaaacgggcagccaatgcctggagctacggttagggtgctgggaactactttcggagcaggtacggatagcgacggtgaatttgttatccgtttggaaaatgcgaaagaatatacgctgttggtttcattcataggatacgaatctcaggaaataaaagcggttccggctgtacgtccgccgcgactgcatatccgattggttccttcttctaatcaactgaatgatgtagtggtaaccggttcgtttgttgcaaaaccgttgaaagaggtacctgtactgacgcgtgtaatatctcaaaaggagattcaggcactcaatccgatgaatgtcgaaactttgctgcaatacgaactgccgggtttgcagattgggtataattccatgagtcagatgcctgagatatcttatcaaggcatggatggagagtatatgctgtttttgatagacggcgaacgcgtaagtggggaaggagccgaccataatgttgattttacccgtttcaatgtagacgatatcgaacgtatagaagtcattaagggagcccagtccacaatctatggttccaatgcattgggtggagtcatcaatatcattacaaagaccgccaatcgtccctttagcggaaatttgaatgcacgttatgccggttccaacggacagaaatatacagcttctaccggtgtgaagaaaaatcgtcttacttcttataccagccttacctatcgtacaaaagatacttatgagataggtgatgaggtaggtaagaccaccgtaacggaaggaagtgacggttcttcggcagagaagcaggcagatgccggttccaccacggtctacggatacaacatttgggattttttgcagaaaataggatatacctgcaatgaaaagctaaatgcggatttgaaaggttcgttttaccgcaataaacgggacaagcgtgtgggcaagatgtaccaggacatattccttgattataccttgaacggtaaggtaacatatcttcccggagaaaaacagcaacttgtaataggatatatttatgataattatcagaagaaccaggactatttcttatccggaaagaaaactacggattaccgtaatatcaagcagacaccgcgtatcgattataccggaacattcggcaagcatactgtcagtgtcgggttcgaaggtgactttgagtacctgaaacattatatgctggaagacagctcccatgttaacaaccagttgtacgctttctatgtgcaggaagactgggatatcctcgatgagctgaatatcgtggcgggagtacgtgccgactatcatgagaaatatcattggcatgtcactccgaaggtttctttactgtggcatttttgcgaccatgtctctttccgtgccggttatgcacaaggattccgttcgccttctctgaaagaactctaccaggcatacgatatgggcggtatgggttggttcatgctgtatggtaatccggatttgaaaccggaaaccagcaatcaagtctctctgtccggtgagtttaccaagggagggctgaacatgtcggtttcttttgtccacaaccgtttcaggaacaagatagcctatatgtcattgggcgacggttcgagcgacatgcagtatgtaaatgccgataacgccaaaactacggccttggagacaattttgcgctaccgttttggttttgggctgatattgacaggttcttatgcttatacgaacgattatgaagaggttgacggacggaatacttctttggtgcgcccgcatacggcaactttcaatgctatgtattcgcataagttcggaaagataggttttaactgttcgctgaacgggcagtggggggcaaagttcgatacttatacaagaaaccaaaatgatgacggtacttatgcgtatgaaataaccacttacgatgcacgtacgatgtgttcgttgaataccggagttacccttccgaaaggcatatccctcaatctgggtatcgataacctgttcaattataaagacaaggctgccgatagttccctgcaggttccgcaaaaaggaatcagtgtaataggaaccgtaaatcttaatattgcagatatgttcgggttataaatattaaaatatcgatatgaagaaaaaacaactattggggagcggctgtgcggccgtcctcgtgttgctgcttataggtatctggaatttatggttcagttctacaagagtagcatttgtcaattatcaagttatcagtctcggacaaatatccaaggctaatgataattcatttataaagatagcagaagtcagtaccgacgaactggataaactgacttcctacgacatggtatttatcaatgccatggggatgagagtaacggaagaacagcgtgcgcagatacagaaggctgccgatggcggcttgcccattctgaccacttccgccaccaatcctgccaatgagataatttcgctggactctatccaggctgacactttgagaagttacctggagaatggcgggcgccgtaactaccgtagcatgctgaattatgtacgtaagcatatcgacggtaagcttatttcggtagacgaacctgaagctgtaacagaacgctccaatgatatgatatatcatgccgacccgaagaagccggatgatgaagaactcggtttcaatacgatagccggatacaatgctttcctgcaggaaaacgggctgttgcaagagggagctccccgtatcataatcactggtatgatgggcgaaccggcagaccttatccggaaactggaggagacgggtaatgtcgtttatccggtacggagtatgaaaggcttcattggcaggcaccaaattgattcggtatccccctcggcagtcatcaatatggcgcacgggcgcatgggagactatatcgtggattacctgacacaacagaatatcccgttgtttactccgctgaatgtaaaccggctcgtagaagagtgggagaacgacaaaatgggaatgagtggcggatttctctcgcaaagtgtcgtaacccccgaaatagacggggctatccgtcctttcgctttgttcggacattatagggatgaagaaggattacagcatgcttttgccattcccgagcgtttggaaacttttgtagagacggtgaataactatatcaagttgcagaacaagcccaacaatgaaaagcgcgtggcgatttattattataaaggcccgggacagaacgcaatggctgctgccggtatggaagttgccccttcgctttacaacctattgctgcatttgaagaaagaagggtataaggtagacggcttgccggcatcctccaaagaactggaacgtatgatacaagcacagggagctgtgttcggaacgtatgcggaaggagctttcgacaacttcatgaagaacgggcatcccgaactgattgccaaagaacagtacgaaagttgggtaaggaaagtactcaggccggaaaaatatgcggaagtcgtatcttccttcggagaatttcccggtgagtatatggctaccggcgacggacgtctgggagttgcccgcttacagttcgggaatgtggtgttgctgccgcaaaatgccgccggaaagggagacaatgcgtttaagattgttcatggtacggatgccgcacctcctcacacttatattgcatcttatttgtggacgcagttcggttttaaggccgatgcgttgattcacttcggtactcatggcagtctggaatttacaccgaaaaagcaggttgctttgagtagtaacgactggcccgaccggctggtaggcgctttgcctcatttctatatttattcgataggaaatgtgggagaaggtatgatagccaaacgcagggcatatgcaggcttgcagtcttacctcacccctccgttcctcgagagcagtgtccgtggtatctatcgtgaacttgtggagaaaattaagatatacaataatgctgtcagtgcttgttctaacggtgcgcacgaacaggaatcccggaaagatatgcgtagcgaagtcgatttgcgccgtgcttctttggctgtgaaggcagtggcggtgaagctgggtattcaccgcgagctggaactggacagcgtactcaccgttccttatacggaagacgagattttgcgtatcgagaattttgccgaggaactggctacggagaaaataacgggacagctttatacaatgggcgttccttatgaagatgcgcgcattaagagcagcgtgtacgccatggctaccgaaccgattgcatacagcctgcttgccctggacaaactccgcaaacgcgccgacgaaaaaacggtgaaacaccgcgctttgttcacacagcattatctgaatcctgcccgtactttaataacccggttgctggctaatccggctttgggaacggatgagctcatctgccgtgtggcggatatcacgcccgacgaacttgccaaagcccggaagatggaaaaatcgcgtaatgcgccgcagggcatgatggcgatgatgatggctatgggagacggagagaaagccccaatgaagaaaatgccttcttccgtagaatataccaaagaagaaatcacttttgctttggcagtcatggaagtcgagcgcacaattaaaaatgtcggagaatataaaaaggcacttatagaaagtccggaaaaagaactgctcagcatgacgaatgcattgaacggtggatatacccagccttcaccggggggcgacccgatagtaaatcccaataccttgcctaccggacgcaacctctatggaatcaatgcagaggctaccccgagcgaggcggcatgggagaaaggcatacagttggcaaataatacaatcgaaatgtataaacgccggcacaatgatagcattccccgtaaagtaagctatacgctgtggagcggcgagttcatcgagacggaaggagccactatcgcccagatactctatatgctgggtgtggaacctctgcgggatgctttcggccgtgttacggatttgaaactcatcccctcgaaagaactgggacgcccgcgtatcgatgtggtagtacagacgagcgggcagttgagggacattgcagcttcccgcctgttccttattaaccgagcggttgaaatggctgcccatgcaaaagacgaccagtacgaaaatcaggttgctgccggagtggtcgaagcagaacgggtattgatagaaaaaggtctgactcctaaagacgccagggagatttctacgttccgcgtgttcggaggagctaacggcggttatggaaccggtatccagggtatggtgatgagcggtgaccgttgggaaagcgagaaagaaatagcagatacctatttgaacaatatgggtgcttactatggtagtgaaaagaattgggaagccttccgtcaattcgctttcgaagctgcgctgacacgtacggatgcggttatacagcctcgccagagcaatacgtggggagcattgagcctcgaccacgtgtacgagtttatgggcgggctcaacctggctgttcgtaatgtgacgggaaaagacccggatgcttacctgagcgattaccgcaatcgcaacaacttccgcatgcaggaggtcaaggaggctatcggagtggagagccgtacgactatcttcaaccctacctatatcaaggagaaaatgaaaggagaagcaggtgatgcgaatacatttgccgagattgtacaaaacacatatggctggaatgtgatgaagcccaaagctatcgataaggaaatgtgggatgagatatataatgtgtacgtaaaggataagttcggcctgggcttgcatgaatatttcgagcaacagaatccggcagctttggaggagatgactgctgttatgctggagacggtgcgcaagggaatgtggaaagccagcgagcagcaagtggccgatatagccaagttgcataccgatttggtaaacaagtacaaaccctcctgttccggctttgtttgcgacaatgccaagttaaggcagttcattgcttcgaaaaccgatgcgcaggcagcggcggaatataagaaaaacattgttcagatacgtgaagctgccgcatccgatgacaagaaagggatggtgatgaaaaaagaggagatggcttctaccgcagaagaacagaccaatgtactgagcaatacgatagtcggtttggtagtagtgcttgctatcgtcgtactgctgttgctcgtccgtcatcgtcgtaaaaaactacaggaataatggaaacggttgtttttgtacttatgatattggtttgcttcaacttcatgttgaagcaaacttatcgtaaattaaggtcggtgctggtaatatccgtcatctgtgccttgtttgtagggctgatgtggccttatgctatcgagcagtccaaaacccagattgccgactggctggctaatcctgcactgatgctcgatacctccgttgtactgagcgtggaagtggttctgcagatgaccttctgcatgctggctgcacatatccaaagtgccggacctgtgaagaagcgcgtgctatgggcttataaggcactgcgctggtttccgggtattttagtttttccggtactgttctgcggcttggttgcattgatattctcctttcccggggtatccttttccctgattgcctggagcatggcagcggcggtattcatattgatacctgccgggagcttccttttgcgctggttactgcccgaaaaagaacttcggctggaattgcttttcctcgccaatgccctgattgctattttgggaattatcgctactgtcaacggccgtacggcagtgaaaggaatagacgaggtagactggggagcgttggcaggcttgacaatcctgtttgttgccggtgcattggtcggaatgattttaagaaaagtgaaattgaaaagacaaactaactaattaaataaaaattatgaattacatttcagacattctctattggatatctacagggcttctggttcctgttatcgtattgttgattattcttttcggacgttcggtcttgctcctcggaaactttttcgggcaatatctggctatccgtaagaccgatgctctgttgcgcaaggagttggatgcattgactcctgaaactgtttcggagctgggcggacacctctccaagaagaacaactctttggtggttacttacattcaccgtattatcgagatgaaagatagtccggcgcacgtgcagcgcctgcttgccgattttgagatagcggcggataaagatttggcaatatccaagactctaaccaaaatgggaccgatgttgggattaatgggaacgctgattccaatgggtccggcacttgtagggctttccaccggcgacattgcctcgatggcctacaatatgcaggtggcatttgccactacggttgtcgggctgttctccagtgctatcgggtttataacacagcaagtcaagcagcgttggtatttgcaggatatgactaatctcgaatttctctctgaattgttaaaccaaaatcaaaaagaataatgaaaagacgtttgctgagaaaagaagaagatagcgacccgatgagtgtggtaagcaatcttttcgatgttgcaatggtatttgccgtagcacttatggttgcattggtgagccgttacaatatgaccgagatgttcagtcaggaagacttcactatggtaaagaatcctggaaaagagaacatggagattattacgaaagaaggtcagaaaatcaataaatatactccgtcggagaatcaggatgccaaaagcggtaaaaaaggcaaaaaggtagggattgcttatgagttggataacggcgagattatttatgtgcccgaagagtaattccattgcacctaaaattattacctttgctgctcgaaatttataaataactaagagatgttacaaccggaattgaaattaagacgtgataagatacgtgccctcatggcccaacaaggtatcgatgcggcacttattacctgcaatgtaaacttaatctatacgtatggttgcgtagtaagcggctatttatacctgccgttgaatgctcctgcgcgtttgttcataaagcgccctaacgatattgagggcgagcatattcatcctatccgtaagccggagcaaataaccggattattgaaagaatgcggtcttcctttgccggtcaagttgatgctggagggtgacgaactaccctttacggaatataatcgtttggctgcctgctttcccgaaacagaggtcgtgccttgcggcactgcgttgattcgtcaggcacgaagcgtaaaaactccgatggaaatcgaaatgttccgtcgttccggagctgcccatacaaaggcatacgaacagattccctcggtttatcagccgggaatgaccgaccgtcaattatctgttgaaatagaacggttgatgcgtctggaaggttgtctgggtattttccgcgtattcggacagagtatggaaatcttcatgggaagtcttttggccggtgacaatgcagcggttccttctccgtatgattttgcattgggcggcaaagggcttgatccttcattgcccggtggcgtgagcggcactctcctgcaagcggggcaatgtttcatggtggatatgggtggaaacttctatggttacatgggcgatatgagccgtgtgttctccattggcaagttgccggaacaggcctatgctgcacatcagacgtgtttagaaatacaagaggagattgtggcaatggcaaaaccgggaactgtttgtgaagatatgtataacaaggctattgaaatagtaacgaaagccggttttgcggattattttatgggagtagaccaaaaggcaaaattcatagggcatggcattggtttggaaataaatgaaatgcctgtattggctcctcgtatgaagcaggaattggaaccgggtatggtttttgctttggaacccaagattgttttacccggtataggtcctgtcggaattgaaaactcatgggcagtaaccaccgacggccttgagaaactgactttgtgcaaagaagaaatcatagaattatgatggataattagcgattagtggttagtgattaggttggtaattacgtcgcatgacagttgctaatcgttaaccgctaatcactaatcactaaccgcttacttcacccttctgtttaattggttattagccttggacggttttgattttccgattctttttcctgtcggtttggcttttttgttccggttagggtgcgattgtgcgtttttattccccttcataatattcacatagataataacgggcgataaagtcccaattttgctgtagtatttctttgccgttgtcaaatggaaattgcacatcaggtaatattcctttgagcataccgtactttattaagtcgaacgggcaggctcccggacggcaaaagagtttgtagccttcggcagcagcgcgtttggcattgtacatcgggttgtgctcttcacaaaaataggcagctacgtcgtgggctattagcatacctttggcattggcgtatattacgaattctttcttgtactgtaagtcaggaagtaaagcagaacgggtattttcccattttagaacttcaacaaagaatttgcagagttctttataggtagcaaaatataataaaggtttgccaccgctgtattccagacaatgctccacatccttgctcagttttgtttcaggagtgatttcgggaagaggaacaaagggcatatctaacaaatccggtcccattacccataaaaaagaagaagttttttcattgataggcgcttcttcaaatttttcgtccatcattttataagcttcctgagctaaagccaacaagtccttatcatacggattttgtaacgtatattcatccggtccatagagtgcaaagtgtgattttaatgtccacagtacaaatgctatatcttccggattgatttcatcggggatgtagctgtcggatagcggatagaagggaaggtaggtattatactgtttgtagtataattcggtgaatgtcttccaaccgccggtctgggcaattacatcctgaaaatacatagtgagtgatactgtggcatctttctgcgcatagtcatcttccttgaatagaggagattgctttactaacgataggatacttgttgaaaaattgagataccattggtcgccgggtagtacacgtgtacgttcgttggcagccaaccattgtttcatgggaataggaactggcttcattgcttgtttacttttaatgtatgaataatatgtatggactataatcttttcagagccagtttgataacctgttctaccggtgcattggcatcttccttcaaaatagccgttactactttttgtgaaggagcttgtgcaaatcccagcattgtaagggcggctacggcttcttcttgtacttgtgcattggcggcggtaaaggcaggaccggttatgtcaaccgctccggaagccattccacaggtttttattttgtcttttaaatcgactatcacacgctgggctgtttttaaaccgattcctttcaccgttttcagtaagttggcattctccgtgctgataacatttatcaattcggaaggcgataaagccgaaagaatcatgcgggccgtattgccgccgatgcctgatacggaaatcagcagaaggaacagctcacgctcttgcttgtctgcaaaaccataaaggatataggcgtcttcgcggatagcttcatagatatatagcttgcagcttttttttccttgtatggcagcatatgtgttcagggaaatatttacggcatatcccaaaccgttacagtctatagttgcgcttgccggactcagctcggcaatttcacctttaatgtattctatcatatgattattattcctaattctgcgaatgtaggaattattattgacttttagtctctaaaaaaagaaaaactctgtgaaacttgagggcttctatagttaagttataaattaaaatgcttacttttgcgctcataaaatagaaagttgataactaaaaccgataaaaagatgaaaaaagtaagagcagccatcgtgggttatggcaatatcggacattttgtacttgaggcattacaggcagctcccgattttgaaatcgcaggagtagtacgtcgtgcaggggcagagaaccgtcctgcagaattgagtgaatattccgtagtgaaagatatcaaagagttgaaggatgtggatgtggccatcctttgtactcctacgcgtagcgttgagaaatatgctaaagagatattggcacttggcatccatacagtggacagcttcgatattcataccggcattccggcattgcgccgtacactggatgctgaggcaaaagcacataacactgtttctattatttctgccggttgggatccgggaagcgattctgttgtgcgtaccttgctggaggctattgcgccgaagggaattacctataccaacttcggtccgggtatgagtatgggacatacggtggcagtaaaggctatcgagggtgtaaaagccgccctttcaatgacgattcctaccggtacgggcatacatcgccgtatggtatacatcgaactgaacgatggttacgaatttgacaaagtagctgccgccatcaaagccgatccgtatttcgtaaatgacgaaacgcatgtgaagcttgttccgagcgtagatgcactgcttgatatgggacacggtgtaaacctgacccgtaagggcgtttccggaaaaacacagaaccaactgttcgaattcaacatgcgcatcaataacccggcgcttactgcgcaagtgctggtatgtgtggcacgtgctgcaatgcgtcagcaaccgggttgctatacaatggttgagattccggttatcgaccttctgccgggcgaccgtgaagagtggattgcacacctggtataaaaatataaaaaaacagatggtgcgtttatatggaatgcaccatctgttactactgaacgcatcgtctgttatagtcaaacagacgatgtgttttttatatcctaaccatcagaagaagaatctgagcacatcattgaagttagcccaaatcagcaagccgaacaataggaacatacctaccatttgagcacgctccataaacttatcgctgggtttgcgacgtgctacaatctcgtagatgaggaacaggacatgtccgccgtccaatgccggaataggcagaatgttcatgaaagcaagaatgattgaaaggaatgccgtcatgtaccagaactgataccagtcccatgttgcagggaagatgctgccgattgttccgaaaccgccaagctgtttggcaccctctttagagaaaagatacttcatctggctgacataacctttcagcgtatttactcccagggtaaccccggccgggatagatgcgaagaaactatattctttcttgacaacgggcaacagcttgtttgtctgcagggatgcagcgacaccgatttgatataaagaatctgtagtcagctttacggtatccgctacccccgctctgacgtaagtcagggtgagaaggcggctggtactgtcgttagctgctttttggcgattcagcatttcttccttaaagtcgaagtaagcgatgttacgtccatccaattgagtgatgctgtcacccggttgtaatccggcaagtgcggcaggttgtcccggcataatgctgtcgatgacaaacggatagcggaatgaagcgaaacggacactgtcggcaagcaggcgttccatcatatcttcggggatgtacacggatacttcctgcccgttacgcaatacgctgacctgacgtgcatcgacgatgcttgtcagcatgtctccaccatagcgttcaaaaggtacgccgtcggcggataccaatatatcgccgtcacggaaaccgattgatttagccgtttcattaaagtccatacccagcggggctttctgcaaaggtacatattcatctccccacgcaaagagtatcatggagtagatgaacaatgccaacaggaaattgaacagtacgccgcctatcataatcagcagacgctgccatgccggtttggcacggaactcccacggttgcatgggctgtttcatctgctcggtatccatagactcgtctatcatacctgcaattttgacgtacccgcctaaaggcaaccagccgataccatattccgtttcactgtttttcggtttgaatttgaacaaggtgaaccacgggtcaaagaacaaacagaatttttccactcgtgtcttaaataaacgagcgaagaggaagtgcccgccttcatggattattacgagcaatgaaaggctcattataagttgcagggcacggatcaagaatgtttccatctaattatttactattttattatttgcaatttaatttttaactatcaattcttttgctattcgtctggcttctgcgtcagttgccacatagtcttcgtaagcaggtttttgtataaaggatacgcgcgccattgtcttctcgattacgtcgctcatgccgaggaatgatatttcgtctcgtaggaaagcggctaccaccacctcattggctgcattgacgatacatggcatgtttcctgcacggtgcagcgcttcgtatgccagcgccaggttgcggaaacgttttgtatccggctgctcgaatgtcaggtccgtgcacaatttgaagtccagccgggggaaagacgctttcaggcgttccggataggagaatgcgtactgaatgggcaggcgcatatccggcattcccaactgcgctttcactgctccgtcctcaaactgcaccattgagtgaatgacggattgcggatgtaccactacttctatctggtcggggcgtacaccgaacagccattttgcttcaatcacttcaaaccccttgttcatcatggaagcggagtctattgtaattttggctcccatgtcccaattggggtgcttcaaagcctgtgccttggttacggtggcaagctgctctattgtacaggtacggaacgggccgccggaagctgtcagtataactttctcgacagggttacccatttctccggctaaacactggaacacggcagaatgttcggagtctaccggtaagatgggagtaccgctgaaacgtgccaggtcgttgataagttcgcccgccacgactaatgtttctttgttggcgagggctatcgtcttgcgtgcacggattgcgttcatagtcggtttcagcccggcatagcctaccatagctgtcagtaccatgtcgataggtttttccgccacaatctggcataaggcctcttcgccggcatacactttgatggggaggtcggcaagtgcgtctttcagttgttgatatttcgtttcgtttgctattaccactgcctcaggcttgaacttgcgtgcctgggcaatcaaatcctctacccggttgttggctgtcagtacataggcttcgtatcggtcgggatgttcctctatgacctgtaatgcctgtgtaccgatagagccggtagagccaagtatggcaatttgtttcttcatcagtcttataatttatgctttcaggtttatatcttatacttaatgctttatacttttaaaatacgatatagagttccgggtttaccgcccttcctttgtgccacagttcgaagtgcaggtgcggtccggtagtcagttgtccgctgttgcctaccagggcaatggcttctccgccttttacggtgtcaccttcgcgtttcaacaaagagccgcaatgcttgtagacggatacgaaatcctggttatgctgtacctctatcaaatagccggtttcggctgtataggtactcagaatgaccgttccgtccagggttgccaatacgctttctcccggattggcggctatatccgttccgaagtgcctcttttcggcattgaaaggagatgaaatcatgccgcgggtggggcggtagaatatcagtccgtctacttcggggcgtgaggcgatgctcgtcaggttgtatttctccgtttcctcgtactgtttgcggaattcagcctcgcgttgcgttcgttccataagcgaatcttcccgtacggtagtcagggagtcgatggaatggatggtgtcggttttgattttacccagaaagatgtcctggatattcattatgtacagattctgcctgtctacgagttgctggagcgagtctacacgcagggcattctccacgacctgcgcacgaatttcactgttcatgtatccgggcagataattgcgcaacggggtaaaggcaacaatcagggaggcaatcagaaagagtaccgtcagtacggaaagcaatacggagattccgttcagtttggacacacgtaaggtgacaatatcctcaagggtattctcgttcgtaatggtcagtctgtatttgaacttgatattactccaaaaggcttttcttctttttttcttcttatttgctgccacttataaactttctatttataatttgaactttgcgtttcgcgccttattcacgcttcttccgtatcgtctaaagcaagtaatccttccggcaggtccaccgtgataaccttatgcttctggtcgatgtccataatgaaatcttcctgtgccggaatcagcaattcttctcctttataatctaccacgaacagagtgttgatggtagaggtatccacatccgtcacttcacccagctggccgtggtgtacttcttccatacggaaaccgatgaagaaatcccaactgagttctcccggtccggctccctcggcatgcttcacgggaaaataaacctcaatgttggtaaacatccgtgcgcgttctgccgtatccactccttcgagtttgacgagagccgtagtgtctgagcggaaacgatattcttcgataaagaacggtacgaatataccgtccaacaggcagatgagatattcggcctctacacggtcgaaaatatcatccgtaaaggtgaatgacaattctccgtgaatgccatgaggtttgttgaatatacctattttatatacttcttcttttcgtatcatatcgttttatcgccttgtctgttgcttgtcacttccttatattctcgttattcttgctccgatcgcattcagccgtccttctatattctgatacccccggtctatctgctcgatgttatgaatacggctgatgccgtcggcgctcatggcggctatcagcagagcaataccggcacggatatccggggacgtcatattgccgccacgcagtttgaaaccgtgattatgtccgattactacagcgcggtgcgggtcgcacagaatgatttgcgctcccatgtctatcagtttgtccacgaagaagaggcggctttcaaacatcttctgatgaatcagcacgctgcctttcgcctgtgtggcaactaccagcagtacgctcagcaagtccggcgtcagtccgggccagggtgcatcggctattgtcatgatagaaccgtcaatgaaggattctatctgataagtatcctgggcaggcacataaatatcatcgccccgttgttccattttgatgcccaaacgccggaaactgtcggggatgatacctaagttttcgtgcgaaacgttcttgatggtcagctcgcttttcgtcatggctgccatgccgatgaagcttcccacttcaatcatgtccggaagaacggtatgctctgttccgtgcagttcgtccactccctcaatggtgagcagattggaagcgataccttctatctttgcacccatgcggttcagcatccggcatagctgttgtatgtaaggctcgcaggcggcattgtaaatggttgttttacctttggccaatactgctgccattacgatattggcagtgcccgttacagatgcttcgtccagcaacatatagctgccttgcaattgccgggcggatatttcgtaaacttcccgtctttcattgtaaacgaattctgcacctaaattccgtatgccgatgaaatgggtgtccaaacggcggcggcctatcttgtctccgcccggtttggaaatcatagccttgccaaagcgtgccaccatcggtcctacgagcatgaccgaaccgcgcaggctggagcaccttttcaggaattcatcgctctccagataggcaaaatcaacattggctgcttgaaagctatatgtatcgatgccttttttcgatacgttcactcccatatcccgcatcaactgaatcaggttgttcacatccaggatgtccggtatgttgtgcaccgtcacctcttcggcagtgagcagggtggcgcagataatctgcagcacctcgttcttcgctccttgaggataaatgtctccggaaaggctgtgtccgccttctattacaaatgaagccatgaaatagtggttagtagttagtgattagcgattaacggttagtgattagggtagcgtggtgatgtcctatgatattaaccgttaatcgctaatcactaaccgctattttagtattttcttttattatttctgttgttgtttctgttgttctggttattcatcttcggccgataattctgttcgatccgttcggccataaggcggagaaggctgtcggtcatctgcagtttgccgccggacagttctgcgaggtcgtccgctattttgcggtcgtcgacagtatctttattccaggacatatagtctttcttcatgtggttgcatatcagtgcaacgaggttctgcttctcgtcaccttcgggaaagtcgatggctttcttaatcagcacttccagggtacggccgtagtggcggtaacgtattttggtgctgggataaggaacggtttccggtttggttatcaggttgtctttgcggataacttcgtatggatagtcgatgtccagcttgaagtccgccatgatggcaagatgatcccacagcttatgcttgaaatcgggtatgtcgcgaaggtggggaaacatgtttcccatgatgttgataatggtatttgcacaacgctggcgctcggagcggtcttcgattgtaagtgcatggtctaccatattctggatgctgcgcccgtattcgggcaaaggcatccgcttttgttgagtattatattgcatatcctttagaattagcggttggttattagtggttagtgattagtggttagtgattagcggttagtgattagcggttagtggttaatgattagtgattaatgctatatggtccaattgcgcagcccgctaattgctaatcgctaatcactaatcactaacggctaaccacaaatcgctataaaagttttttcggttggcttgctacgaattctttcaagtagaacggttcgaagtaggcaacgtctttaaaatctttttcggctatagctttttctgccagcgggaacatcatgcttgccagcggacggatgccgtcgatgaaatgagcgttgggatgcacaatcttttccttgcacttggctgcaccgtcgccgaagaaatacacgggctgcctgtccagaaactcctgataggagttttcgtccacaatgtctgccgcaatgtcgcgtaccggtttcagtgcgcggtcgtaaacggcggcgtacacttccatgcggcgggcatcaatcatggagcacaacagggcgtcttccggcagttcatcgtgatagagcagtaccggaacgcattgcactttcagggtgggaagcccgatgaggggcaggttgcgcccgtaacatacaccttttgccatagacacaccgatgcgtagccctgtgtacgaaccgggaccgcaacttacggcaacggcatccagcggcatggcgtggctgtcggcaaatgacagggcttcgtctacgaatacgcccagcgatacggcgtgtgaaggcccgttcaggtcttcttttttgaaaacgttctgtccgtcctcgctcacggctacggagcaggccgaagtggatgtttcaatatgcaagatacatgacataacttctattctgatttttattgtggcaaatttacgtgatttgtttcgattacacaagttgtttgccgaatggtttgtcgttgcattcctgattcattgattaaattgccggctgcttgcttgcatctgttcagaaaattagtgaatattgcatactaagttgtgcatgcgatatttgtctattgctcaaattattctcagtgaatgcaataaataatcagtgagaatagctatctttgtcgcataaaactatacattatgatacaatctatgacgggctacggcaaagcaacagccgaactgtccgataagaaaatcaatattgaaattaagtcgcttaacagcaaagcgatggatttatctgcccgtattgctccgctttacagggaaaaggaaatggaaatccgtaacgaaatatccaaaatgctggaacggggcaaggtcgatttcagcctttggattgagaagaaagatgcggaacaactggccactcctatcaatcaggaattggtggaggcttattacaaacggattaaggaaatttctgcggctgccggtattcccgaacctgccgactggtttgccacgctgctccgtatgccggatgtaatgacgaagaatgagactcaggagctgagcgatgaggaatgggcagtggtgcatgcggcagtggaagaggctatcaatcatctgatagacttccgcaagcaggagggcgcagcgctcgaaaagaaattccgtgagaagatagagaatatagcacggttgctcgaatcggtggctccctacgagcaggaacgggtaggcaaggtaaaggaccgtatcaccgatgcgcttgaaaagacattgagtgtggattatgacaagaaccgcctggaacaggaacttatctattacatcgagaaactcgatatcaacgaagaaaagcaacgtctttccaatcacctgaaatactttatcagcacgctcgaaagcggtagcggacaaggtaagaagctgggcttcatcgcacaggaaatgggccgcgaaatcaatacgctgggcagcaagtccaatcatgccgaaatgcagaagattgtagtgcagatgaaggacgagctggagcaaatcaaggaacaggtcctgaacgtgatgtaaggaaccggttccggacgttgcatgaatttatgataagtttgcttcaacatgaagttaaagcaaaccaattagaggattaaatagtaaaccgttaaatagtaaataccacagatgggtaaactgattatattttccgccccctccgggtcgggcaagtccacaattatcaactatctgttgacgcagaacctgaatctggctttctctatttcggcaaccagccgtccgccgcgcggcacggagcagaacggggtggagtatttctttctcactcccgatgagttccggagccgcatagccaacgatgagttcctggaatacgaggaagtgtatcaggaccgcttctacggaacactgaaagcacaggtggaaaagcaattggctgccggacagaatgttgtattcgatgtagatgtagtgggcggttgcaatatcaagaagttctacggcgagcgtgctttgtccgttttcatccagccgccttcggtggaggagcttcgcaaacgcttgataggccgcggcacggatgctcccgaagttatcgagagccgtgtggcgaaggccgaatacgagcttggctttgcaccgaaattcgatacggtcattgtaaacgatgatttggaaacggctaaagcagaggcattgaaagtgataacccaattcctgaaccgatgaagcggacgaaaggcagaaatctgtcgccgagagccaataaggtcctcttagtcctgaatatcgttctgtttttgggagctatcgtcttggctatattgaatgttgacctgaaggagtacactccggctgcggccatgcttattgtgatgttcataagcggcgtaaatatttacggctgttggaaacgtctgaaaggaaagctttgataccatagccttctgtatttttttattcttaattttcaatttatcaagtggatataggcattttcagcggttcgttcaatccggtacatatcggacatctggcgcttgccaactatctttgtgaatacgaagggttggacgaggtgtggttcatggtgactccgcataatccgctgaaagaagaagcctctctgatgagcgatgaattccgtctgaagctggtgcagcttgccattggaggctatcccaagttccgggcttccgatttcgagtttcatctgccgcgtccgtcttataccgtgcatacgcttgataaattgaaacagacttatccgcaagacactttccaccttattataggttccgacaactggaagcttttctcccggtggtatcagtcggagcgtattcttgcggaaaactttattcttatttatccccgtcccggttatgaggtggacgggaatactttacctcaaaatgtaaaactggcctcttcgcccacattcgaaataagttctacctttatccgccaggcgatggaagagggcagggacatgcgttatttcctgcatccggctgtctatgaagcgttgagacaaactaatctgtaaaataaatgaatgacttggaaaatttacaggcgccccacaacttcggtgtatgtgcctctgcctgttgtacgaaacgctttacctgcctgcgctatatagccttgcagaatgcttccctgcaatatccgttcctgcctacgcttactccccggaagctggagtcgatgaaaggaaagtgtgaatattaccgtccgaatacgccggtgcgttatgcccgcggcttcacccgggtggcagagttgctcacggttcgggtggcgggtacattccgtttgcggcttatttcctacttcgggcgtaagaactattaccttgcccgtaaaggagagtaccttattaatcctgctgcccagcaatacattatcagccaggcagaagctctcggcctgcggcttgatgactactttgacgagtatgtagaacggtatgactggtagggataaccggttgaaatgcaacgcaatgtagtttccccacggagggaactccggtttccttagggggaaacgtcagtttcctatggtagaaacttcagtttccctgcagggaaattcgggtttccttaaaggggaacgggcgtttccttaagggaaacatccgtctcctccggtggaaacggaaatgggcttactcaaggcattcgtcgaggtcgcgtataatctgctctttgtccatgtgctggccgatgaagactatcttttgcatgcggtctccgtatttttcgtcccagtcgcgcatcagtccgggttcttgacgcatcagttcaatcaggtcttcttcgggggctgtggcataccacagcccggcttcggtcagttgtttctgagtgcctgcctgttcaaaaaggtaggacatgtcgcggttgtggctgaaatagcatacgcctttggcacggatgatgttgcggctccatctggtagcgatgaaatggtcgaatttgtgaatgtcgaatgccggacggcggtagtaaacgaaagtaccgatgccgtattcttccacttcgcccccttcgtgatggtgatgatgatggtgtccgtgctcttcgtggtgatgctcgtgctcttcgtggtgatgttcatgttcttcatgatgatgatcatgcccttcttcgtggtgatgatgtccgtgcgcttctttttcttcctcttcggtggctggtttctctatcccgcgaatccatcctgccgaggtagccacgcgttcgaagtcgaacaggtctgtatggataatcttctttaaatccacatccgcgtaattgcattcgatgatttctgctgcgggttgtagggtacgtataatctgcttgatgcgttccagctcttcgggttttacttccgctgccttgttcagaagaatgatattacagaattcaatctgctggatgataagattttcaatgtcttcctcgtcaatcccttttcgggtgaggtcgttgccgcaggcgaactcgtcttgcaggcgcagggcgtccactacggtggtgatgcagtccaggcggcagatgccgtattgggtgtacatgccgcccaggcggggaatggagcagatggtctgtgcgataggttcgggttcgcagatgccgctggcttcgataacgatatagtcgaaacgttccatccgcatgatttcgcctatttgctctatcaggtccgttttcagcgtgcagcagatgcagccgttttgaagcgcaacgaggctttcgtctttcttgcccacgatgccgcccttttggatgaggtccgcgtcaatgtttacctcgcctatgtcattgacgataactgcgaatctgatgccttgtttattggcgagaatatggtttactaacgtcgttttaccgctgcccagataaccggtgaggagcagtacgggaatttcttttgttgtcatatctgttattgttttttatttgctgttattgacgaaccgtacggttgcattcatcaacgcggcattgacgggcagtgaaggattattgtacactgccatttgttgctgcggtgcggtgctttcgcaatctttcagcacatggttcattttgtctatcagaacgagttctgccttgggagatgctttcttcagcagcattgcatcctcttcctttacctgaatatcgtttttgccttgaagaatcagcacgggcattttcagggaagcgatgacggtctgcggattgtatttataccaggagatgaggtagggctgtacggaaggccggaacagcgcctgcagataggcaggaacttgcgccacctcttttccgtttcttaacgagcggttgatgtccgccacttctttccgtatggactccggcatcatttgggcagccacttgcttttctatgatttcgtatgccggactgcctgcgccggcaatggaaatgaaactctttactttggggcgactctggcaggcaagcatgccgatgagcgagccttcgctatgtccggccactgtgatgccggtgaagcgtttgtctttggcaagaaagtctatccagcccgtcacatcgtttatataatcctcgaagcggagtttggactcttctttgcctgctgcggcgctgccggctatgccgcgtttgtcgaaacggagcgaggcgatgcctttctgtgccagtccctcggcaaggaatttcagcgaattgtttttcatcatgggattgttgccgtccatgtcggtagggccggaaccggcgataagcagcactacggggcaggttgtggcattggcaggcaggagaagtctgcctttgatgtcaccggtagcggtgcttaatgttacaggactttcttcggatgtgagaggctgtgcctggaagtaaggttggagaaacaggacacaactgaatagaaggagaagtaatcgtttcatatcatttactttttggtttttggaaaacggaagtaaatgtaaacaatattatcagataaaaaaagaggaaagcatgtcaaaattcggataaatcttacatgctttcctcttattataccgtaacaatcatcctgcttacaggataccttgcgacatcattgccttggctactttcataaatccggcaacgttggcgccctttacgtaatttacgtaaccgtcggcttccgttccgtactgcacgcaagcctcgtggatgttcttcatgatgcttttcagcttttcgtccacttcttcggcgctccagcccagtttaatggagttctgggtcatttcgaggcccgataccgatacaccgccggcattggctgccttgcccggagcatacagaatcttggcttcctggaacactttgatagcttcgggagtagaaggcatgtttgcaccttcggataccgccattacaccgttggcgataagtttcttggcatcgtcaccgttgatttcattctgagtggcagaaggcagagcgatgtctgctttttcgccccagggacgtgcaccttccacatacttaacgcccggatattgctctgcatattcgcggatgcgtccacggtagaggttcttgagttccatgatgtaatccagcttttcacggtcgatacctgcggggtcgtatatgtaaccgtcggaatcggacattgtcaggactttgccacccatctccagtactttctcggcagtgtactgagccacgttgcccgaaccggaaatcaggcaggtcttgcccttgaggtctgtacctttggttttcagcatttccagcaagaagtagatgttgccgtaacccgtggcttccggacgaatcagcgagccgccgaattcgcggccttttcctgtaaaggttccggtaaactcgtgagccagtttcttgtacatgccgaacatgaaacctacttcgcggccacctacaccgatgtcaccggcaggaacgtcggtctcgggaccgatgtgacgccacagctccagcatgaaagcctgaacgaaacgcatcacctctgcatttgacttgccgcgcggagagaagtccgaaccgcccttaccgccacccataggcagggtagtcagcgagtttttgaaagtctgttcgaaagcaaggaatttcagaatggagaggttcacggaagcgtggaaacggataccgcctttgtacggaccgatggcgttgttgtgctgtacacggtaacccatgttggtttgtacgttacccttgtcatccacccaagtaacacggaactggtaaacgcgatcggggatgcaaagacgctcaatcagattggctttgtcgaactccggatgtttgttgtactcttcttcaatggtagaaagcacttcttctactgcctgatgatactccggttcattggggaaccgtcttttcaaatcttctaataccttagctgcattcataatctatttcttttattgggtttgcatatttatattgtaaggcggtgatgcggtagcgccttacctcttgttgcggttgcaaaagtaaacataaaaatgatacaagcaaacaatttataaataaaatacgggataaaacaacaaaaatattgttttatcccgtaaaaatgaataaaaagatattatttatttccttttgagcgcttttattacaggaatgaataccaatgctgctgaaatgacaagtgtcaggataattggtccgtcaatccgttcggcggttgtcagtactatgtagcaaagcgctgcccaaagaagcgtgatgcaaacgatttgaaatctggaaaattgccttttcatttgcctgctttctttttgtccacaatggcgtcgataacggctactgcggtaatgtttactatatcgcgcacagagctttcaaaatcggtaaagtggataggcttgttcagtcccatctgtatcgggccgatgagttcggagtccatatccatcgactgcaacagtttgtatgcggagttggcggagctcaggttcgggaagataagcgtattcacatcctttcctttcagacgggtaaacggatacttggcatcgcgcagttcgcggctcatggcaaagttcacctgcatttcgccgtcgatggcaaggtcgggatagttgcgctgcatgtagtccacggcttcgtgcacgcttaccggacttccttccttgtctgtaccgaagttggagtagctcagcatggccataacgggagtatggttgaagaagcgtacggtatactccgacagtttggcgatgtctatcagtgtttccgcattgggatggcggttgataagcgtatcggcaaggaagtacgtgcctttcttggagttgaggatgtgcattgtgccgaagtgcttgaattccggacggatgccgattacttctttggccaccttgatggtgttgctgtacttggtgtacaatccggtgatgaaagcgtcggcctcaccggtttccaccatcatcatgccgaagtagttgcgctcgaacatcttgtcgttggcctcttcgtaggtgacgccttcgcgggcgcgcttttcggaaaggatacgtgcgtaacgttcgcggcgttccgattcgttgggatggcgcaggtttacgatttcaatgccttcgaggctgaggtcgagttcttttgccagcttctcgatagcttcgtcattgcctaatatgatgggatggcagataccttcggccttggcctcaacggcggctttcagcatattggggtgaatgccttcggcaaataccacacgttgcgggttgcggcgggcggtgtcgtagagctggcgggtgagcttgctttcatagcccatcagctcgcgcagttgcaggcggtaggcatcccagtctgcaatgtgcttgcgggccacaccgctgtccatagcggcttttgccacggcgcaggacacttcggtgatgaggcgcgggtctaccggtttcggaatgaagtattccggaccgaaggtgaagttgttcacatggtaggcttcgttcaccacgtcgggtacgggttgtttggcaagattggcgatggcgtgtacggcagcaatcttcatctcttcgttgatggcctttgcctgtgtatcgagtgcgccgcggaagatataggggaagccgataacgttgttaatctggttcggatagtcggaacggccggtagacatcagtacgtccggacgcgctgccatagcgtcttcgtaggatatttccggagtagggttggcaagggcgaatacaatggggtggtcggccatgctgcgtaccatatcctgcgtcagtacattgcctttggaaaggccgaggaatacgtcggcgcctttgatggcttcggcaagggtatgcacgtcgcggcggtcggttgcaaagtaacgcttctgttcggtcaggttctcgcggtcgctggtgatgacgcctttgctgtccagcatcaggatgttctcgcggcgtgcgccgagcgactcgtacagtttggtgcatgaggtggcggaagcacctgcgccgttcactacgattcttacgttttcaatcttcttgcctgccacttccagtgcgttcagcagtccggcgctggagatgatggccgtaccatgctggtcgtcgtgcatcaccggaatatcaagttcttctttcagccggcgctctatttcaaaacattcgggagccttgatgtcttccaggttgataccgccgaacgtgggggcaatcgccttgactgcttcgataaacttgtcggggtctttctcgttcacttcgatatcgaatacatcgatgccggcatagattttgaacagcagcccttttccttccataacgggctttccgctgagtgcgcctatgtcgcccagaccgagaacggcggttccgttggagattacagctaccagattgcctttggctgtatatttatatgcgtcctgcgggttcttctcgatttcgaggcacggttctgcaacgcccggagaataagcgagtgaaaggtcggtttgtgtactgtagggcttggtgggcactacttcaatttttcccggtttgccttgcgagtgatagagcaaggcagcttctttggttatcttagccatggtagattagttaaatttgttatgatttggtcgcaaatttagagataaaagttctaatttgtagtctgtatcggataatttctattagaattatcagtaaataaactaaaaatgcttatttttggcaatagatttaagtattaccccaaattattaacttaacacagttgttttatgaagatttttaaacttcctcttgcaggattattgttttgcaccgcgccgttgctggcaggatgcggaacgagtgacaaacccgaagctccggtttccctgacttgggaaatgggtacgggtaatgcggaacccggatactatgagaactcctttgttcttaaaaacatctccggcgctcctcttccccgaaattggacaatctattattcgcaacttccccgcaatgtgaagcagatagggaatcctgccgttaaggtggaaccggtgaacggaaacttctttaagatgtatccgacagaaagctttactccgttggctcccggcgattccatgcgtatcacttttctgtgttcttacaagatagaccggaattcgcacgcgcctgagggcacgtattgggtggctacggcagacggtaaggaaagcagtccgcttcccgtaacgctgaatacgcttgtgttgccctcgccggagtcactgcccggctatccggatgcaactaaaatatacgaatcgaatcttcgtctggagaacgtatcggctttgcaaccatgggatatattgccgtcggtaaagaaagcgacgcctgccgaaggcgctgttgtgctggatggcaaggtggctttggcttatccggacgcgtatgccgttgaggcaaggttgttgaaagagaagttatccgctctgtacggcttggaagtagtggataaagctcccgttacgattgctttggaaaccttggccgataaggcaaaagctgtgaacgatgaatactatgatatggttatagacagcgaccggataaagattagcgccgccactccgcacggagttttcaatggtacgcaaaccttgctggcgatgctgaaaggtaaagaagcgccgtaccggctggacgctatgtctgtggaagattatcccgaccttctgtatcgcgggcagatgatagacattgcccgcaacttcactaccgtagacaatctgaaaaagctggtggacgttttcgcttcttacaaaatgaatgtgctccatttccatttttcggatgatgaggcatggcgtctggaaattccgggactggaagagctgaccgccgtgggcagccgccgtggacataccaccgacgagagccgttgtctctatccgtgctatgacggcggttacgacccggatgccgcaaccgtaggcaacggatattactcccgtgaggactttatcggtctgttgcgctatgctgccgaaagacatatccgcgtcataccggaaatagaatctcccggacatgctcgtgcggctatcgtttccatgaaagcgcgttataataagtataaggacacggatgtggaaaaggccgccgaatatctgctgagtgagccggaagatacttcccgctacgcatccgtgcagtattatacggacaatgtgataaatgtggccatgccctctacttatcgctttatggagaaagtgattcaggaacttgcggctatgtacagggaagccggcgtaccgctggctacggtgcatcttggcggcgatgaagtggcgcgcggcgtatggctgggttctccaaaatgtcaggcattgatgaaagagaaaggaatgacgaaaccgcatgacttggcagagcatttcatcacgcagatggcagacatcatgcaaaggaacggactgaaattcagcggttggcaggaagttgctttggggcataccgaagaggcgcaccggcaattgcggactcaggcggcgggcgtgtactgctggaatacggttccgggatacgatgaggtggtgtatcagattgccaataacggctacccggtgattctctgtaatgtgggcaatttctatatggatatggcgtacaacgggcatcccgacgagcgcgggctcgattggggcggttatgtggatgagtcagtctctttctccatgcttcctttcagcatctatcgttcgttgcgtacggacggtgcaggcaatcccgtcgatttggatgcagcggaaaagggaaaaactgttctgacggcagaggggcgaaaaaatatcctgggtgtgcaaggccagttgtttgccgaaacaatccgtagctttaacggtgtggaatatcttcttttcccgaaaatcatgggactggcagagcgtggttggaatgcttatccggcatgggaagaactgcggggtgcacaggaacagcaagccttcaacaaagcattggcgttgtattatgaaaaaatcagcgatatggaaatgccttattgggcaaggaacggtatcaatttccgcctgcctcatccgggattgttggtgaaggacggtaagctttatgccaacgttgccattcgaggtgctgaaatacgttacacaacggatggttcggaaccggatgcccaatccgctttgtgggaagcgcccgtgccgtgccatgctccggtagtgaaggcaaagaccttctgtcagggtaaggaaagcctgccgataacattgaaaactgaataataatgaaacgcatcatccgttgaggctgaatgtatgattgaacagccctcgacagatgatgcgtttcacttgaacagatgatgcttacgcgttcagcgcctgttctatatctgcgatgatatcatccgcattttcaatacccaccgagaaacggatgaggtcggggcggatacctgcttccaacagttgctcgtcagagagctggcggtgcgtatggctggcaggatggagcacgcaggtacgtgcatcggcaacgtgagtcacgatagctgccagcttcaacgagtccataaacttgatagacacctcgcgaccgcctttcagtccgaaagagataacgccgcaggagccgttgggcatgtacttctgtgccaatgcgtaatacttgttgtcgggcagtccgcaatagttcacccatgccactttgtcgtttttggaaaggtattcggctactttttgggcattgccgcagtgttgcggcatgcgcaggtgcagagtttccagaccgaggttcagcaagaacgcgttctgcggagactggatgctgccgaggtcgcgcatcagttgcgccgttgctttagtgatgtaagccagtttgccgaaagcttttgtataagtcagcccgtgatacgattcgtccggtgtgcagagaccggggaatttgtcggcatgtgcttcccagtcgaaattgccgctgtctacaactgctccgcctacgctggtggcgtgtccgtccatgtatttggtagtggagtggactactatatcggctccccattcaaacgggcggcagttgataggagtggggaaagtattgtctacaatcaaaggtacgccgtgcttgtgggcgatacgggcgaacttttcgatgtcgagaacttccagcgtagggttagagattgtttcgccgaacagggctttggtgttcggacggaaagcggcggagatttcctcttcgggcgcatcggggttgacaaacgttacatcgacacccagttttttcattgtcacgccaaacaggttgaacgttccgccatagatagtggatgagcatacgaagtggtcgcctgcctggcagatgttgaagatggcatagaaattcgctgcctgtccgctcgatgtcagcatggcggctacaccgccttcgagggcggctattttggcggcaacggcatcgttcgtaggattctgcagacgggtgtaaaagtaaccgctgtcttcgaggtcgaacagacgcgccatttgctcgctggtatcgtatttgaaagttgtactttgataaatggggagtacgcggggttctccctttttaggagtccaccctgcctgtacgcacagtgtctccggcttgaattgctttgccataatgctatctgtatttagagtttcttttctttaaaacacgtaagttgtcgcaaaagtagggaaaaaaatataattttgtgcgcgcgaatggtaaaatgctataatttagcagttgaaaatctgctgccgatacgaaataaatgacgaataacgggaatatgaaacgtatattttgcttgcttgctgttctcttctgtacttttcttcttttggatgtctctgctcagggagaatatgccacacccaaatcgggcgagggtatttcgtcttttctggaacggaacaaacgtccgggaaaagcctactataatgagtttatgaagctgaacgaaaaacgtctgcgtggaaaagaggaactgcgattgggtgtgaaatatgtgttgccgcccttgaagaaagggacttctgcctccgtttcgcccaaagctgttgccggtaaaaagagagtggttcgcgaacggctgttcgggaagaagctggccgatgtgccagtgacgtccaaccgcttgcagggtgcttgcttctatgtggtcagcgggcatggcggtcccgatcccggagctatcggaaaaataggaaaggtggaattgcacgaggatgaatatgcctatgatgttgccttgcgccttgcccgtaacctgatgcaggaaggggcggaagtgcatatcatcattcaggatgccaaagacggaatccgcgacagccgctacctttccaacagtaagcgggaaacgtgcatgggcgatgccattccgctgaatcaggtagcccgcctgcaacagcgttgcaccaaaatcaatgaactctaccggaaagaccgtaggaagtataagtattgccgggctatattcttgcatgtggacagccgcagcaggagtgcgcagacggacgtattcttttaccatgctccgaaaagcgtgtcgggaaagaaactggcggttaccatgaaagaaactttcgaatcgaaatatgacaaacatcagcccaatcgcggatttgaagggactgtcagttcgcgtaacctctacgtgttgctgcaagccgctccggtttcggtcttcgttgaactgggcaatatccagaatacgttcgaccagcgccgtttcgttatcagttccaaccgccaggctctggcaaagtggatgacggaaggattcattgcggactataagcaggtgaagtaggggtgtttgtctgtttcataaggtatggtttctcattccggacataatgaagaatgacgaacccataccttacatattttaatttattctatcggaatatagatttctgtcagtaactcatccggtgcagtatcagccggattattcaggtatcgttcggcactggcttcatctctgaatgtacattccatttcagggatgtattttccatagattgtgtcgtacacactttgcaggtgttcgtacgaacccttatacaggaatatggcatagcgtcctgccgggagttgcttgaagccgatattgcctttcggagttacggcggcaggcataaccatacatacatcggtacgcagtttctctatcggggtcactttagggtcgtcatgaaaaatacagtaaggcatcacttctcccattggcagcttttcctcttggacaaattgttgaaggcgcatccacgtgccgcaataatcatttagtttatagtctccgaacaatcggatataaatcacatttcggaccggaagttctttgatttcccgtttcagtttgagttccggacggataatagctggtttcataattacaaagtttttattgttacgatattctaaaggtgaaataccgtagaactgcttgaacactttagacaatgacgaggaagacgaataaccgatgcgataagcaatgtcggctatcggcaaatcggtgtagcgcaataaccgtgctgccgtttcagtacgtgtccggacgataaacgtacctatgggttcgcccaaaaaagctttcatgatgcggtggaagtagaacggagagaaatgggaaatcttggccagcgatttcaggtcgatttcttctccgaggtggagattgatataatccaccactgcattcacacacttctgatactcttcccgggttgtcttcttggtttccatatattctatcggtttgttcacgatgcaaaaataaggggaaaaagggataggggacttgtccgatgttgctataaatgtggtttgccgcatatttgttggacggaagttcgttaataatcattgtttgtttaatctgaaaagacaaaacatatgtaattttgcagcggattatattatataaatagcttttgaaagagtatatgaaagacgcttttcttactttagggcgtggtgtaggccaggtgatgtttcagaacaatgcgctgtcggggttattgatgctggcaggtatccttctgaattcctggcaaatggccttgctggcgattgcgggtaatgttgtaagtacactaacggcttgtctttccggttacagtcgcgaagatataaggaacggactttacgggtttaacggtactttggtgggaatagcaatcggagtatttatgccggtttccgtagcttctttatcattgttggttgcaggtgcgtgcttatccgcttggatagcccgtcttttcagcttgcagcggcgggtgccgggatttaccgctcctttcatcctttcggtgtggatattgttggctgcttgcagagggatgatgccgtctttgctattgccttccggaaatgcagtgacagcccagtcactctcttttttgcaggctttttgtctgaacatcggtcaggtgatgtttcaggggaatacagtattggcaggagtgctcttcctgttgggtatcatggttaattcccgtatcaatggcttttatgctgcattgggagcggggctttccattccgttcgctctgctgttgggagtggatgatgctgttttgaatgccggattgatgggatataacggagtgttgtgcgccattgctttgggagataaaacatggaagggcggcgcgtgggctacagtggctgtattgctgtccgtcttactccagataggcggtatgaagtggggaataacaaccctcaccgcaccgttcgttgttgctgtatggatagtggcagggtgcagggccggatggaaaaatagaaatagaaactgaaaattgctgaatattacaaagtatgaccgagaaaacccgattgcagctcttggcgtgggcaagagaatatcattgtgcagcctttatacaaggtgatcctgttcagtttccacatcggtatacgcagaaacaggatattgaggttagcggcttgctcacagctataatgagttttggcaaccgcaaacagatattgaagaaagcggacggactgcatggtttaatgggagcttcaccctaccggtatgtcttgtcctgcaggtggaaagaagatttcctgcctacagataggagcagcttttaccgtatgctttcccatgcggatttttatacttactttgcccggctacacgctgcctatacccgttttgatagtttggaagatgccttgtcggtttatccgggtacaccgatggagaagctgtgcgcatttctggaagtttcagccaagagccctcaaaagaaactgaatatgtttctgcggtggatgatacggaaagagtcggaagtggatttcggtatttggaagagttttgaccatcgcgatttgctgattcctttggatacgcacgtttgcagggtggcttatcttttggggcttaccgatacggaaacattctctctgaagaatgcgcggaacataaccgaggctttggcggaagtctttccggacgacccctgtttgggagatttcgcattgttcggcagcggggtaaacggagtgctgtaagattgggctttgtcttaccagtctatctcctcaatgcctttgctccgtaaataatcgttggccttgctgaagtgcctgcaaccgaagaaaccgtattcggcggaacggggtgaaggatggacggttgtcagaataagatgcttgctgctgtctatcaaggctgccttttctttggcataagctccccaaagcatgaatacgagatgttctcgttcatcacttaatttcttgattaccgcatctgtgaaagtttcccagcccatgttgcggtgcgaaccggtttcgtgggcgcgtaccgtaaggacagagttcatggagaatactccctgagccacccagcggtccagattgccggaagtaggaatcggtttgcccaagtctcgatgtatctccttgaatatattggcgagtgatcccggtatggctactccttccggtacggaaaagcatatcccgtaatattgtccggggttggggtagggatcttgtcctaagataaccacttttactttttcaaaagggcatgagttgaaaacatgaaagataaggtgtcccggcggcagcacgttggcacgtccgtattcgcttttcacaaatgataccaatctttcaaagtagggcttgtcgaattcttcttgtaaacgttgccgccagctctcttctatcttgactttcataggatactgcatctaaatacgatgcaacaaatgtacaaataatctctgtgggtacgtatgtgttttgcggataaaaaaattccgattcgtcacgaaccggaattctttctttaatgagatttacatttagaaaagactattctttgacaatttcgcctttttcgtttaaaagcgtttccgcttcctgaccgtcttgggtgacgatgatgattttgtagagtgtggtctcttccgtttcttttacgtaggcttcttttacagatgcaccttcataatctttggctaatgtctgcataacagcctgtggcaattctgtcgggtcgattttcacaaattcgtcttgcggaacttgtgcttctgccacgattgctgatgagttgtttacttcctgtgcgaatactacagaacttcctgttcctaaaaccattactaatgctgctaatacctttttcataactttctgatttttagtgaatatttggggttatcatctctaacacttatcataggacaaatagaatgccaaactgtattggatgttggtatatgattgatttacaggataattatgcgaagttgtcccgaaaagtccaatgtagaaatatgtagagtgttgtagaaacgggtaacacatttgaggaataattacacagaatcttaacggacttcttatttattctatataaatttgcgccatacttaaaatagatatgaatatgcttagactgaatgtttttattcaagtgagtgcggataaccgtgctgctgtgatggaagctgcaaaagaactggtagcttgttccctgaaggataacggttgcattgcttatgacatttttgaaagtgcaacccgtgaagatgtccttatgatttgcgaaacatggaaagatgaggagtctttggctgcacacgaaaaggcggcgcattttgtgactttggttcctaaaatacaaagccttgcttctatgaaactggagaaattcagcttctgataataaacaatattatttgaaaaagtcaaccattgcgttgacttttttgttttttacttcatatatggtaaatggtatgaagcaaataatctttatttttgtaatgctaataagttgtctgtcctgtgtcggtaaatcgaccggtcaggcggaaaggagaaacgatatgaagtcaatgaaagaaatttatctggcaggcggatgtttctggggaaccgaacatttcctgaagcaaatagaaggtgtagaagttacccaagtgggatatgcaaacggaaatatagccaatcctacctatcagcaagtctgtacaggtactacggactttgccgaaaccgtaaaagtacagtatgattctgataaggtgaccttgccttttcttatcgacctttatttcaagacaattgaccctaccagtctgaaccgtcagggaaatgaccgtggtactcagtatcgcacaggcatttattataccgatgcagccgatctgcctgttatccgtgaaaccgttagccgtctggctgccaactacacccgcccgctggaagtggaaattgagccgttgaagaatttttatccggcagaagagtatcatcaagattatctggataaaaatccgggcggctactgtcatatcaatcctgcgctattcgacctggcacgtaaagcaaagatgaagaaaccggtggcggcttacagtaagcccgatgatgcaactttgcgttcgcaactcactgcagaacagtatgccgttacccagaaaaacgccaccgaaccgcctttccgtaatgcctactgggatgaacaccgtccgggcatctatgtggatattactacgggtgagcctttgttcgtctctaccgataagttcgattccggttgcggatggcccagtttctccaagccgattgaccgcaagctgattcaggagaaagcagatactactcacggaatggtacgtacggaagtccgtagcaaaacaggtgatgcccatttgggacatgtctttacagatggtcctgccgataaaggcggattgcgttattgcatcaacagcgcctctttgcgctttatccctaaagagaagatgcaggcagaaggatatggtgaatatttagaactggtaaaataacacacaatggacatattattaataagtaatgaggatgcgtgccgcagccgtatcgcacaagaactcctgcacacatttggcagaggaatgaatatttctacggcaggagttatggaaggaaattgcgttcccgatgtcgtatgcaatgtgatggagcaaaacggttacggcatatcgcgtaaaaagccttccggtgtcggagcatatgcgcatcggtcatgggactatgttgttaccctgtgtaaagaagctgaggaagaactgagcttcctcaccctcaatgccaaacggcaggtgcattttaactttgaagatccttttaaaaatcgttttcaaagcgagagtgaacaggagcaacaaatagcaaccctctatgaaacaatgtatcggcaactgtacgagttctatcgcgatgagttgagcgagcaactattgccccgttgtacgtgcggtgcaaatacttattgccgttgcgaatagtagattgcttacgctattcaatctttgtccgaatatcatgttcttccgggattcttctttttttagtaaaggggagcggtatttataagtatgatttaattataaatatccggatataaaatagtcaatgccttataaaggtttgtctcttttacaatagtctcctctttattatcaagcttgattcccggttctttctggcatagatacgttctcatgctttggccttcttttgtatggaaattatctaaagccatatcaatgtatccccaataattatttaagggatgattggatgcactgcgtatactgtttatacgtgatttccaattaggatgattggtaaaagtaatgcggttgttcctgatgtcttcaatcaggcacactgcctggataatactactagttaatatttcttttaaatcgatgtttagtgtattgtcgaatagtttgtctaaacaataaagcctcattttcgtagtatttgtcaggctattgtctttttgccaatcttccgtttttttgtgcctgtatcctaactcccataatagaagtagaaactccggatgatatattcttcctacttccagccctgtttgtaacttatgaagtgtattgggggcgtgtatggcatctctaatttcataagcttcctcttttatcagtaggttgagtatggaagaagagtgtttgtgatcagcgaggtaaaacaatgcctcaaggaattcttcgtggggaaatgtatgccatagtgtattgattttctcttcagcagtagcaccggctatgtgatgatatccccaaaccggacgttctttctctatacttatgcttaatgtttccaacatatctgatagttcggttttatgaaagagggagatggccgtttggtaagggtcgggttgttcgtcttctaagaaacggacagccggtacttgcaattgaggatagagcagctttaatattttgtattctttaggtttcttccatgctatgatttcatttttatctaatttgttgtgttttcttaggaatgactctgctttgtaaacctcttcccatttaccgctttgtttgagtgctgcctcacaaaatatccaatgatttttgtaatgggttattgcgttattagcgatacatacccatacattggtttgaaaactgaaatattcgggtttgttggaaagtaatgcttcaatcgtataaattgttcctgaaaggtccactccggaagtaattagagttgttattagttcagcttgcccttcctgatacaatttgaatgctaatctggagaaagtagcataatatttataggtgtcggtggggaactgctctttcatgatttttctatcttcataagtaatttgataaccacattcgagcaattttattaagtcctggacaccgtaagggtagttgtttatgaattcttggattatgctgtgtccgtttttcttttcacaaggcagctccgactggaatatgtttttattgttagttgaattatccatcgtttatataatttgaatttgctgtttaatgagtgtaaaagtataaaaataaagcgtttatattctttattgcggcatttatttttcatgatgtacggaatgtttggagagcagatattaaataatgtgttatttgctctcaaaagagctgataatctgccgactgatatatatggggcttttaaacaaaaacagttgttcggagtttactcgaacaactgtttttgtactcttgtattttaatccctcatgttttgagggcaggcattgtcaatcgtcgatatcgattactctcatttgagagtcgaatgtaatttcccaacgattggacaattttatctcatattcattatgatcgaattctatttcgagaattcttgcatccggatagttggtctttacataattacggattgcttccggtacaacttgtgcgggaacttcactttgtctgcaccgcacttccttccactctcccgctttatcgaattctactttttctccatttgtaaagactacatcataacttttgtagaatactcctgattccattttggctaatgccactttatggtttttgaaataagtcttgataaatgtctgcgcttttgccggtaactggtttacttgtatcggtctatcgttatctgccattaccattgtgtgcactgcaaacatacaaactaacatcataataaactttttcatacttctttatttttaatgattaatactttatttgttttcgtattgcaaagatgggaaaggaatctggaaagaattgggaaaaacagaaaaaagtctgattttttatttgggtgtttgttttgtgcttttgtaatcaagaatgcttattctttatttgtaaatatttgtttgaactaaatattactttatttttgcaggtggtttattgcgagccacatctgtaccgaggtaatgaagctccctgaaacaccttcatagatgatgaataatgatatagaagcagtttgttatgacaatgaaaatattaaataggtttatagatgactgtgtgaatgtttttcaatatcggttcatggacacctttcaatactttaaagaaaggaacaagaataaatatttgggagacaggtttgaagagtgggttgtgaaaaattctaatatcagtaaagatggatgttccgacttggatacaggaaaaatattctggcggcttctggattggcgaggtgataaatatgttgagggataccggcctctgtcttcttcatctccggatttgttattggaatgtgctgtagataggagcaggatttataaggtcggagagataatagccgtagaatgtaaatggagaagtaaagttggattttatcttgacaggaaggatattgagaagtacgaggtatatatgaatattaaccaactgaaccgtccgataaaaagtctgttttacgtttttggctttggatgggttaatgatgctccggagcaagtttatgtggttcctgcacgggaattatacgattataacaaggacaccggccaggtaacgtttcctgccaaagaaggtgaaagcgagaagctggaacggttgaagcgttttaaaaggaaggataatagatgtttgatgtatatagaataacctttatttaatttatttcctgctattctcttccatgacactcaatgcaaatttaatgatgaagagaagcaccactcctattacggcatacatcgacaatatgaataaggaaaacattaccgggaaatagattacacataccgatagaagacgtttaccgctctgccgtagcgcggtaacgaactggatgaattgaataacaaccataataatggcatataccagtgaaagtgccgtcataaagtgccagaagccgaagtcgaaacataacgctccccatatattattcttgggaaacatatccagtggactgctgaatgggattttgataattatcactaccaatggaacaagaatagcgtataaggaatagcttaaatccataggcaatgctttacgtcctatccaggacagcacattcttgaacaatataaactcttgatatacgacaaacatgcttcccagaagtagcagcgccatatttcccagattattttctactaattgaagcgatgatagcatccctgcccgtgagtgaatcatccaggcgaaaatacacacggtcatggagagaagggtagcaagtgatattctgttgaatgctttccatgaaagatactcaccattcgaaaaatgtgctgtaaaattcagtaccgttgccagaattgtcagggcagaaagtgttgccggaaagatatactgtgagtcaatcatagttaaaaggatttggtaaggccattaacgaaaaatccttgaatttcattgaaattcaaggattacatcatttttaaaagtggtgccaccaggaatcgaaccttttgcttcggtttattctaactccttgagtgactgcacattttttgctttatcttttatgaaaa

SEQ ID NO: 4116 - DNA, 12743 bp, Unknown
  gut microbiota DNA sequence
cacatagcggtatctcatgtaccaagcattggtattttaactaccaagtgttggtactaacggaatacccccttataaaatgaaaaagtgacgaccaaaaatcggtcgtcactgtatataagcttgtcgtcaccagataacaccttcgtccttaatgcattaagacaaaaagtgacgagtgacgacaaaaaacgaaaaaatcttgtttagaatgcatacccaaatcctaagttcagatagataggatacatattaaacgttatcgtatcgaagtctttctggaagatattgtttaatccccacgttacatcggcatgcacggtgagatgcttgaacgctttccattcgcccccgaattggataccccactggaacttacgcagctcgttggagaaatcgtaagttgcgatgctttcatcggtaaactctactttggaaccggtctggtcgggtgtgcgcaagtgaccctcgtacacatgtccggagaagttgccttccagcagataggagaagtacggacctgccgatactatccagcgcttgctgatgcggtagtcggcaaggatgggaatggtgaggtaggagttcttcactttggttttgactccacccgtccaaagacctgccagctctccgccgttggtattgatgattttcataccgtagttctttacggtggcttcggtagtcatgttcttgttctccaaccgcagtcccagggtaagtccccactttttcttttcgtcgaaccacttggtggcattaccttcgatggcaatggcgatgcccggtgcgtagctgtctatcttgcgtatctccttgggcaggggaatgggagatgtaccgccgatattgaatccggctttaatgttgtattcccaaccgtgcagataggagttgataagacttttgtttctctcttcttgtgcctgtacgttggctaccattgccagcagtacggctatcgtgcaaataaaatgatgctttttcatattctataatcagatttcttcgcttataagttctaattcgtctacgtataatgtgctgccgactgcccctttaaagtacgcgcctttcacgctggaggagaggacgatgcttaatttgtacttgccgttctgcagtttcgacttgtttatctctttaccgttcataggttcgaaaggtaactcgaatgctgtccattcatcggtttctacagcagcctcttcactgatttgggctttggctacgatgttttcggaagtcagactgttgctgccgtccagcataaaggagttctcgtttgcttcgtacagtatggcgtaaatgtcgaaacggtctttcatgtctttctgtacttcgccttcatcggtataaacttctcctgccttgaatttgaagtaacccttcaacgctatggggcgtttgtaatactgtatgccgaacttggtggcacgcagaggatctttcagtgcgtttgccaggtcgaaggaaccgataaacaggtttccggcggcaatatacatttgcaccatggctccgaaacttccggtgtcgcaagtggtcagtttcagtccgttgccgcggtagccgtcggcaacctgctgcgtaggatagccggtgcggttgtctgtcatgccggtaagtttgtagccggggttgccgctggaccattgcgctacgcgtgaaacactggttgaagttccgggttcgaattcgtagaaaatgtcgtattcagtaccggcagaggggagcagagcttcgaaatggaatgtttccggcatttcggcaggtactacttttacggtataggtagcggtccattcgccgtcttcggaagtgacggtgaaggtgcgggagtgagactcgttgctgaaatcgtaattgttaaggatgtcattcggtgaatgttcgtctgccttgatggtggcaccgtcgggcaacgtaaacagcagttgctgtttggcaaggtttgcccctttatgtacatatatgtttatttctttagagtcactgttgatgtgagccaattgtacatccgcgcctgtacaggcgtcaatggctgcttcggagttgagcgcttcgtcttgtatgcaggacgaaacggctaaggcaagcatgagagcagtagtccacttcttaaaattcatatccttcttttttgaatgttgataaataaatacagtttagcagtttgcaaaaatacgctattattttgtaatagcagatacaagaagaaaaaagtgcggtaaactctggtatttatttgttattccgtatatctttgtataaagattgaataaaaatatatatggtatgactgaagccgaaagaaaacaaataattgctttggtacagcgcgaagtagttcctgccattggctgtacggaacccattgctgttgccttatgtgtggcgaaagcaaccgaaaccttgggtgcaaagccggagaaaatagatgtcttgttgagtgccaatatcctgaaaaacgcaatgggagtgggcattcccggcacaggtatgattggactgcccatagctatagccctgggagcgctgataggcaagtcggagtatcagttggaagtgctgaaagacagcaatcctgccgccgtagaagagggaaaacgctttatcggcgaaaagcgcatcgatatatcgctgaaaaagaatatcacggaaaagctttatatcgaggtgtgctgcaaatcaggcgggaataaagccactgccattatagccggcggccataccacctttatatatatagcccgtaacggcgatgtccttttaaacaagcaaagtgcgggttgcggagaagaggaggcgcaagtcgcaggcctgaccttgcggaaggtatatgactttgctatgaatgccccgctggacgaaatccgttttatccttgaaaccgcccgtttgaataaagccgccgccgaacgttctttcgacgggaactacggtcatggactgggcagaatgttacgtggcaattatgaacacaagattttgggcgacagcgtattctcccatatcctttcttacacgtccggtgcatgcgatgcccgtatggcaggtgctatgataccggtaatgagtaattcgggcagtggaaaccagggtatttccgctacattgcccgtgctggtctatgccgaggagaacggcaaatcggaagaagagttgatccgtgccctcatgctcagccatctgaccgtgatttatatcaagcaaagtctgggacgtctgtctgccctgtgcggttgcgtagtagccgccaccggttccagttgcggcattacctggctcatgggcggtacttacgaacaagtatcctttgccgttcagaacatgattgccaaccttaccggaatgatttgcgatggcgccaaacccagttgcgccttgaaagtaactaccggcgtctctaccgccgtcctctccgccattatggcaatggaaaaccgctgcgtcacttccgtcgaaggaattattgatgaagatgtagaccaaagtatccgaaacctcacgaagataggctccaaaggaatgaatgaaaccgacaaagttgtcctggaaataatgacaagtaagtgattaggggttagcgattagtgattagtgattaatggttagcgattaatcgcagcattatgaatatgtgccattgataaaccaaatcaccacctcttaatcactaaccactaatcgctaacccttaatcattaatcactaactacagcattcgctgctacagtctccgcagttgcatccgccaccgcatccgccgccgctcatcatgcgtgccatttccgacagttcgtcgttggtggcaggacggttttcggtgatttcacctacgaagttcaggtcgcagcctgccagggggtgattcatgtccattactactacatcgtcctttacttcgactacgcttccgttgatacgttggccttccgaggtcatcaagggaattacggcgccttctactacgcgttcgctgtcgaacttgccttctatctcgaagatgtttttggggaggtcgatgacatgttcctcgtcatactcgccgtaagcctcttcggctttgattgtaaagtcgaatttatcgcctttgttcaggtctttcacctggttttcgaaagattccaatgtgaggcccagtcccgatatgaattggaacgggtgctctgcgggagcttcttctgtgaactctttttctccgttttcgattgtgtacaacttatatgctaaggtgatgtacttgttttctactgtttccattaatttgttatttcttattagtaaatactgcattgtctgttttgacaatgcgcaaagatacgaatattttgcttcgggagaggaagcgtcccggtaattttcagattattaagtgctttgtaagtgtttggcattacttctgcaaagtatccgaatcgttttatggataaccgtcaagtgataaaataagattttaaagcatggtttccttacgattattcatgtttatatcttttttttcttcaatttgtttggagattataaaaaagcatttacctttgcagcataaataacggataagagaataataaagataatttagttatgaacctgcatacatccataaacctggcagtcctgcatattattcgcgtcgtggtggtggcatcaagagcgtgagaaaggttgtgtatgtatttgtacggtaaagatatttatagtaagcctttctcattacggtgagaaaggcttttttcataaaaggagacagataagatgaaacatcagttacgcagttcgttcagcacacaaggccgccgtatggcaggtgcccgcgcgttgtggacggccaacggcatgaagaaagaacagatgggaaagcccataatcgcgatagtcaactcttttacccagtttgtgccgggacatgtgcatctgcacgagataggtcagtttgtaaaggaagagatagaaaagcaaggctgctttgccgccgaattcaatacgattgccattgacgatggcattgcgatggggcatgacggtatgctgtactcgttgccctcgcgcgacatcatagccgacagcgtggagtatatggtgaatgcgcataaggcggatgccatggtgtgcatcagcaattgcgacaagattactccgggtatgcttatggctgcgatgaggctgaacatccctacggtgttcgtttccggcggtcctatggaagccggggagtggaacggacagcatctcgacttgattgatgcgatgattaagtcggccgacaacagcgtgagcgatgcggaggttgccaagattgaacagcatgcctgtcccacctgcggatgctgttcgggtatgtttaccgccaattccatgaactgcctgaacgaagctatcggactggctcttccgggtaacggtacgattgtggctacccacgcaaaccgcaagcaactgtttaaggacgctgccaggctgattgttgaaaacgcttataagtattatgaggaaggagacgaaagtgtgctccctcgcagcattgccacccgcgaggcgttcctgaatgcgatgacgctggatattgcaatgggcggttctaccaatacggtgcttcacctgctggcggtggcccatgaagccggagcggacttcacgatggacgacatagatatgctgtcgcgcaaaacgccctgtctgtgtaaagttgctcccaatacccaaaaatatcatgtacaggatgtaaaccgtgccggcggcatcgttgccattatgggcgaacttgccaaaggcggattggtggacacggccgtacgccgcgtagacggaatgacgctggccgaggagatagacaggtattgcatcaccggcccgaacgtctgtgaggaggcggtcaggaaatattccagtgccgctgccggaaagtttaatttggtactcggttcgcaggatacttattataaggaattggacaccgaccgtgccgaaggttgtatccgcgacctgcagcatgcttacagcaaggacggcggactggctgtactgaaaggaaatatagcgcaggacggctgcgtggtaaaaacggcgggagtggatgaaagcatctggaaatttaccggtcctgccaaagtattcgactcgcaggaagctgcgtgcgacggtattctgggtggaaaggttgtcagcggcgatgtcgttgtcattacccacgagggtccgaaaggcggcccgggcatgcaggaaatgctttatcccacttcgtacattaaatcccgccatttaggcaaggagtgtgcgctgattaccgacggacgcttcagtggcggcacttccggactgagcatcggacatatctctcccgaagctgctgccggaggcaatatcggtaagattcaggacggtgatatcatcgaaatagatataccgaaccgctccatcaatgtgaaactgacggatgaggagctggctgcccgtcccatgacgccggtaacccgcgaccgccaggtgtcgaaagcattgaaagcgtatgcaagtatggtaagctcggctgataaaggggctgtgagactgatagaataattgggaattccgtacccgaaaaacaataataaatagatatggaaaacttaataacaggcgcagaagcattgatgcgctctctggagcatcagggagtaaagaccattttcggttatccgggtggcagcatcatgccggtattcgatgccttgtacgatcaccggaagaatttgaatcacatcctggttcgccacgaacagggggctactcatgccgcacaaggctttgcacgtgtgtcgggcgaggtcggcgtatgtctggttaccagcggtccgggcgctacgaataccattacaggtattgcagatgccatgatagacagcacaccggttgttgtcattgccggacaggtggctacgggatttctcggaacggatgcctttcaggaagtggatttggtaggcattacgcagcctatcacgaagtggagttaccagattcgccgtgcggaagatgtggcatgggcggtggcccgcgctttctatatcgcacggagcggacgtcccggtccggtggtactggattttgccaagaatgctcaggtggataagacggaatacacgcctgtcgaagtggattatgtacgcagctatctgcctgtgcccgaaatggaaccggataccatacaacaagccgccgaactgataaatgcggcggagcgtccgttggtattggtggggcagggcgtggaactcggcaatgcacagaacgaattgcgtgctttcatcgaaaaggcggatatgcctgcgggatgtacgctgctggggctttcggcattgcctacggctcatcctctgaacaaaggcatgctggggatgcacggcaatctgggaccgaatatcaataccaataaatgcgatgtgctgattgcagtgggtatgcgttttgacgaccgtgttacgggcaagctggctacgtatgcgtcgcaggcaaaaataatccatttcgacatcgacccggcggagatagacaagaacgtaaagacggatgtggccgtattgggcaactgtaaggagactcttgccgcagtaaccgaattgctgaaacctgccggacataaagagtggctggatagcttcctgccctacgagcagatggaagaggagaaggttatccgtcccgaactgcatccggcaggagataagttgagcatgggtgaagtggtgcgtgccgtcagcgaggctacggacaatgaggctgttttggtaacggatgtaggtcagaaccagatgatgtccgcccgttactttaagtatagcaaggaacgcagcatcgtcacttccggtggcttgggcacaatgggattcggtcttcctgccgctatcggcgctactttcggtcgccccgaccgcacggtttgcgtctttatgggtgacggcggtttgcagatgaacctgcaggagctgggtacggtaatggaacagaaagcgcccgtcaagatgattttgctgaacaataacttcctcggtaatgttcgtcaatggcaggccatgttcttcaatcgccgctattcgttcactccgatgatgaatcccgactatatgaagattgcttccgcctacgaaattccggcacgtcgggtatttacccgcgaggaattggcgaaagccatcggtgagatgattgcaacagacggcccgttcctgctggaagcttgcgtagaggaggaaggaaatgtgatgccgatgacaccgccgggcggttcggtgaaccagatgttgctggaatgttagagaattatgaattataattaaaccaacgtggacaagacattatatacaatcatcgttcattcggaaaactttgcaggtttgctgaatcaggtaacggctgtatttacccgccggcaaatcaatatcgagagtttgaacgtttcggcatcctctatcaagggggtacataaatataccattacagcctggacggataaggatactatcgaaaaggtgacgaagcaaatcaccaaaaaaatagatgtgctgcaggcgcactatttcacggacgatgaaatctaccagcatgagattgcgctgtataagataacgacccccatactggaagagaaaccggaagtgtccaaaatcatccgtaaatacaacgcgcgtatcgtggaggtgaactccgtgttctccattgtagaaaagaacggcatgagcgaggagataaccaacctctatgaagagctgagtgctttggagtgcgtactccaatttgtacgttccggccgcgtggctatcacgacaagctgttttgaacgcgtaaacgaatatctggcggaccgtgaagcaaaataccgccggagtaaagaacaagaaggactatgagtgagaataataagataggaacttataagtttgtagccgaaccgttccatgtggactttaccggccgcctgacaatgggtgtgcttggcaaccatctgctgaactgtgcagggtttcatgccacggaacgcggtttcggtattgctaccttgaatgaggacaattatacgtgggtgctttcccgcctggctgtcgagttggatgaaatgccgtatcaatacgaggatttttctatctggacgtgggtggaaaacgtgtaccgtctcttcaccgaccgtaactttgccattatcgacaaagacggaaagaagatagggtatgcccgttccgtatgggcgatgattagcctcaatacccgtaaacccgccgacctgctggctttgcatggcggcagtatcgtggattatgtgtgcgacgagccttgccccatcgagaagccatcgcgtataaaagtgacttctacggaaccggcttcttccctgaatgccaaatatagtgatattgatattaacggacatgtgaacagcattcgctatatcgagcatattcttgatttgtttccgatagagttgtataaggagagccgcatccgccgtttcgaaatggcatatgtggcggagagttattacggtgacgagcttaccttttataaggactatgtaggaaacggcacgtatgatatagaagtaagaaagaatggcggcgaagcggtttgccgttctaaagtgatatttgtagagaaataatttattaatcaatcggttggcataagccacaaataaaaattgaaactaaaaaatggcacaattgaattttggcggtgttattgaaaatgtaatgacccgcgaagagtttcctttggaaaaggcacgtgagattttaaaggatgagacaatcgcagttatcggttacggtgtacagggtcccggtcaggcttgtaacctgcgcgacaatggcttcaacgttatcgtaggccagcgtcagggtaagacttatgagaaagcggttgcagacggatgggttccgggcgagacgttgttcagcatcgaggatgcttgccagaaaggtactatcgttatgtgtctgttgtcggatgcggctgtaatgtccgtatggcctactatcaagccgttcttgactcccggaaaggctctttacttctctcacggtttcgctattacctggagcgaccgtacgggtgtggttcctcccacggatattgatgttattatggttgcccccaaaggttcgggtacgtcactgcgtacaatgttcctcgaaggccgtggcttgaactcttcttacgctatctatcaggatgctacgggcaaggctttggacagaacgcttgcgttgggtatcggcatcggttccggttatctgtttgaaactactttcatccgtgaagcaacttccgacctgaccggtgagcgcggttctttgatgggtgctatccagggattgctgttggctcagtacgaggtgttgcgtgaaaacggccatactccgtcggaagcgttcaatgaaacggttgaagagctgacccagtcattgatgccgttgtttgcaaagaacggtatggactggatgtatgccaactgttccactactgcccaacgcggtgcactcgactggatgggcccgttccacgatgctatcaagccggttgtacagaaactgtatcagagcgtgaagtccggtaacgaagcccagatttccatcgacagcaattccaaacccgactatcgtgagaaactgaacgaagagctgaaagcattgcgtgaaagcgaaatgtggcagacagccgtaacggttcgcaaactccgtccggaaaacaactgattcccggtgtaaatcggagaatgacaaaagggggtgtgtcaaaatacgcttgatgattccttttaggcacggaattacacggatttcacggaagaagatctaaagaaaacctgtgtttttccgtgtaatccgtgcctgaaaagaaacaaatggcaagcgaattttagttttgacataccctcttttccattacttatcattaattgtccttacatattcaagcagtttcttgtagaaagcatggtggcttagcgtagccgcttctcccaggataaccaatttcatgcgtgcccttgttatcgccacattcattctgcgtaaatcgttcagaaagccgatctgtccttcttcattggcacgtaccagactgataaagattacatcacgttcctgtccctgaaatccgtcgacggtattgactgttatcagactgcggtagggacgtagcgaagcgctgccttttatttttccccgcaagtattgcacttgtgccttgtaaggtgagatgagtccgaagtcgatacgttcttcgagaatccggtttccgcctatccgttggatgtacgcttctagctttttcagcaataagcctgcttcttctttgttgatacgtccgaaggtttctccgacaaattcttccttgaaatccatgccggaagtgtcgagccatgtaacgggagtatcccaatccaagattccccggtgacgtatttcgggagcagcttccagctctccgccgtaaaaccaatccgatgagaagcgcatgatgtcttcgtgcatgcgatattgtactttcaataaagatacggcagacggcttgccggctacgactttttccattaaagtccgttccagcccgctacgtgcggcttcgtaacatttgatggtaggcggaagctggcaatggtctcctgccaatactacacggtctgctttacggatggctatccagcaggcggcttccagggcttgggcggcttcgtcgataaacagtgtgccgaaacggcgtccgtttaaaaggcggtgattgctgcttacaagtgtagaggctatgacgtgggcgctgtcgaacaactcactgttgatttgtatttccagtgtggtggcacggtcacgcaggcggctcatacggttgcgtatcccttcgcgttcatcgtaactgccgcggcgggatttaccgcccagtagcctcagttctttacggatactccataattcgggataaagcggatgattttcgaaacggcgttcataagtgaaagagagcattttgtcgttgacgcgtgtggggttgccgattcgtagcacattcacgcctctgtccaccagcttttcggaaatccagtcgacagccatattgctttgggcgcataccaatacttggggttcgcggtgcagggtttcgtagatggcttctacaagcgtggtggttttgcctgttcccggaggcccgtgtacaatggctacatcgcgggcgcatagcactttattgacggcactctcctgagtggagttcaaccaggggaaacgtaccggataaagctcacggaaaccggttttgaccgtacccaacaggatatcccgcaattcggcaagccggttgccttttgcacgcaggacatcttccagtgcctcgaacatcgtgcggtaagaagtttcgtcgaaataaagctggactccgagattatctgcggattgtatatccataatagctctggcaccgggcataatcactaccatgcgtgcttcgtcagcataactgacggtggctgtaaaattgaagtaagtgattttaccgtcggcagattgccggaagaaacagacggggcgtccgaactcaaagttatgttctatatcgaggttctcggtttgtgtaatttctattactaattgattcaacgagttatagtaacttcggcccggtgaggcaggataccagcaaactccccgcttgacttttcgggcgacgcccatgttctctgtttgtcgcttgaattcttctttttcgta

SEQ ID NO: 4117 - DNA, 5668 bp, Unknown
  gut microbiota DNA sequence
aaaagcaggcggataaagagagcgtttccccggtttttttctttttaggcacggaattacacggatttcacggaaaaaggataaaataaatccgtatctatccgtgtaattccgtgtttaaaaggaaattatcaagtatattttgacaaaacctcttgtcataacaatggtcgtcaccgctcaatgccccataaacaaagggatagaaagcgaaagtgacgagtgatgagaaaaaacgtgtttttcctaatgttccaacgctttgttttagtcagaatgcaaagaagggataaatcagatagctattggcatttttatcataccctttgatgccgattctgtcccaatcatcgagaaatccccagacgataatccaactgagttgtcggttgaattcggtactggtctggtatatacgtcttttaccaactgacagatttcttgccgacctgcctgctttgcctaattgtgcgttcagcttgtccaggtttgtcgtagccattgttgtatggttcgtggctgttgtcacatccgttacagatgagaaggctgcaaagcagtatattggcagataggtgtttcatgtcgtttcgtttttagtttatcacaaccgtttcgcttaccgtttcagtacttcctgtgtttcatgtcggaaggctgcctgctgttacggtgactttcttccgggagatgccgagggtataacttatggaagctccttccgtccacatttcagtcgatggcagtgtctggttgctcaggatgatagtctgggtgatgtccgtattatcggaattataggcttggtaggtgtaggtgaggttgaagacactctctgttccgtaaggcggcagatagaaggttgcgagcagttccttgggggttgcggtgttatccggaatatcgaaacgggtagcggtggcggtgaatgtttccgtttcggcgggggcgggataactccagccgaatcctttgtctttactgtcttccgggatatggcaggtgaggataccgtttttcattccgcggatggagaatgccgtgatttgctttccggttgtgttgtcgtcgctttttacgtagatggcaatccgggtcagggtatggtggaagcgtaacttcaccaggctgttgtccgaagcggaagtctggttcatcagcgggacggcgactaaaaaaatgcgctttttcgtggaaaggatgttttgggggacggtataacggggcttaccggcagcaaaacagggaaaatgcttctgataaaacattttccctgtcgagtataaggagtgtcgcttggaaggcgaataaataattttacattttgttggtagggtgcaagagtatccgttattttattctttgtcggtctccttatatattttctaattgtccgtaatctgcattttagtaatatatgtacgttttcatttcagcagcgttcccgttgcctttaaataagtgatgtagttcaggtacagtcggaagcatgcgtcgactttggtttcgtacgcctgctgccacagagcttgcgcttccaggtggtcggacagggtttccagtcccacgtcgtattggctgcggctcactctcatgttctcttccgcctgttgcagggagcgttcggcaatggtgctttccagccgggcttcgtcgaggttgttgacggactgtgccagttcaagcagcatctgttcgttcatgttctcctgttcgaggcgcgcctgctccagtttggctttggctgcacgtactttattgctgtttgcaccgaaatggaagagcggtacgcttacgttcagaagcacagagaagctgccgccgtcgaacaggtcctggtcgctgatttccaagccgtggatgtagtcgtacgaacctttcacaccgattttgggcaggagttcgctgcggttcagcttcacctgctgcttggcgatggccacttgctggttcagtatggcatattcggggcgggcggagatgtcggctgtttgcagccggatgtcctgtgccacttcgggaaaagtatcggcagtgcgtatatctgccgtcagcggtttgccgatgtagtggcagaggttcatggtggccaggcgcagcgcattgtcggccttgcggatgttgagttcgctttcgttcagctttacctgcactttcagcacgtcgttctggggtttgagtccgtgtttatgggcgctttccacgtttttcatcagttccgtgagcacggcactgtatttgtcggccactttcttcatctctttggctttgatgacttgtgcgtatgcctgctctgtctttacaatgacttccgaggctgtaagcgtttcgctcaactgtgccatttccttacccagcagggacattttgtatgccgcacggattttaccgcccatgtagagcggctgttccacttgtatgccgcccatatataccatgcctatcttgtagttcaggtctattccggggaagtaggcgaaccccttgttgggaaggaattgccctgtggcatcgggctggaaagtaggcaggttgccgccggctatgccgaggctgccgtctgatgtactgtagatacccgtaccgctgaggctgaagttggggaagaagttgcccttatagctctttgcggtgtagcgtgcactttccgtttgtctggcggcagctgccatttctttattgtatttcagtgccatttccctgcattgttccagtgtcagcgtctcttgggcggagatgcaggcagcggagagcagggcggcgaggatgaatgttgtctttttcattattgttcgttttttatatgaaagaataatgcgtatagtacagggatgaacaggagtgttatcagcgttccgaatgtgaggccgcccatgatggaagctgccagcgaaccgaacatcgcgtcgggcagcagcggtatcatacccagaatggtggtcagtgcagccatggtcacaggacggagacggctttgggcgctatccaccagtgccgtaataggttctaccccttggttgagctgaagggtgatttcatccatcagtacgatgccgttcttgataagcatgcctatcagtcccagcgtacccacaattgccacgaagttgaacgtcttgtctgtaagcagcatcacagccaccactcccacaagcagcatgggcagactgcagaagatgataatcggcttgcggtagtccttgaacagcatgataagaatggcaatcatcaggatgatggcaagcgggaagttcttgaacagatactccatggactcgtcgctggcgctcttctcgccctgccaatgcagggtatagccttgcggaagctctatctgttctatccgacgggcgataatctgccttgccttttcggtctctatgccgggagcgggagagcattgcacgcgctggctgcgctgtccgttatagcgcggaacaacggggtcttcccagcggatgtcgatgcgcttgctgatttgtttcagcggggtgcttcccatgaggctttccaccagttcttccttgctcagtgtacctgccttcagtttcaccatggtttcctcgttcagcagtccgttcagcgagggcagggcggagaatacctgcgtattgccgaggtcttctatcggctttccttcctcgtccagacatttcaggtagatgttgtcgcggtggatgccttcgtagaagaacccgatgggtatgccgccgttggcggaaagcagggacatgcttacgtcgttgcggctgagatccagcgcgcgggcggctgcctggtcgtactcgatggagagtacgggtatctgcggttcccagtcggtggtgatgaggcggacctccggcgtgtgttccataatgtaccgcgcactgtcggccaagcggtgcagtacggcagggtcgggccccatgaactgcgcttcgatagggtacttcttgaacatcaggttgtagcgtttcaggttgatgtaagcatccggataacgccgtgtcaggtattcctgtatctcatccatattctctaccaggtcgtcaggagaggtgaagtctataatcagttcgccgtacgacaaggacggattggcgatgctgcgcaccaggttgtagcgtcccggcgtgccgccgacagaggcggtgacatgggtaatctccttgcgtgttttcaggtaggattctatctcccttaaatcgcgtgccacgcgggtggagttattgccttcgggcagcttgtactccatgtagagctggtcgtacaccatatcggggaagaaaccctgccgcatgtagccgtagccgaaaatggaaagtcccagcagggcgagcatcgccagtacgacgctccagcgatgtgccagtccgaagtagagggcggtgcgcagcagggcataggtacgtcccttgtattcgcgctttccggtggcgctgacttcaacggcagggtgcagcttgcggtttgccatcagcggcacgtgcaccagcgccagcacccaactcagcagtaaggacaccgccagtacgatgaacaggtcgcgggtgtataccccggcagtgtccggcgacaggaagatgggaaggaaagcgatgatggctatcagtgtggcgcccagcaggggcattgccgtctggcggccgatggctgtcattgcctccatgcggtttttgccggctttcaggtctaccagtatgccgtctacgatgacaatggcattatctaccagcatacccattgccagcacgaaagcggcaagcgatacacgctgcatggttccgtccgccgtgtacaggaacaggaacgaaccgaatacggtgacaatgaggctgatgccgatgatgattccgctcttgaaacccatggccagcatcaggattaccacaacgatgatgacggactctatcaggttgatgacgaaagtacccaaagaggctcccacacgttcgggctgatagaataccttgtggcactccacgcctgcgggcaggcggctttctttcagttgcgccagttttttctctacggcagcgcccactttcacgatgtccgaaccgctggaagctgcgatgaggattccctgcgcccgttcgctgtcgaagaacagttcgttgcgggtaggctcttcgtatcctttctcaatgcgggcaatgtcgcgcatgcggagctggtcgtcgtcatgcccttgtatcagcatgctgcctatatcttccactgtcttgaacttgtcactgacggtgacgcggatgcggttgtcgccgttgtcgtagtagccgctgtaggtggtcttgttctgtccgttcaaggtggcgaggacttcggcgggctttacgccgaggtttgccatgcggtcttgcagcagggagatgttgatgcattcgggacgtttgccgtacagttccacccgttccacgcccgtcatgtcgcttatttcgcgcttgataagctctgcgtagtcggacagctcccggtcggacagtccgtcaccggtcagtgcgtagaacattccgtatacattgccgaagtcgtctttcacgatgggggtgctcgctccgtcgggcagcagggcgcaggcgtcgctcaccttgcggcgcagcatgtcccagcactgctccacttcatcgtccggggtaatggtggtgagttctacctgtatcagggagaggtcgttgtacgagta

SEQ ID NO: 4118 - DNA, 25505 bp, Unknown
  gut microbiota DNA sequence
ataacaggctggatttcagtagtgattaaaaactccgttagtcccgtacgcaccgcaacaacactctaaagcccttgaaagtgattgactttcaagggcttttttcttgaggtctcaatcgggagaccaatctgatgacacaccgtgacgcattctgatacattgcagtttgctgtataaaccgcaaaacgttccgtgatacttctacaaaacgttttgtgatggtttagcagccattaacacaaaacgaaatgcgattttttataaaccgcaaaacgtcttgtaatgcttttccaaatcgtttagtgagtattttacatctgctaatacaagaataacggcaattttgttattcattttagtgccgtttgaatggttattaaaaggcatttaatgagaattgagcatgaatgtattctataatttaaaaaaaatagtgtttgggtaagatgctaataattatatacgacaaagagcctgccgttttttaacagcagactcttttttatacaggaaaatatgtaagagagtagttttaaaatttgtatcctacggtaatgcctatattcgcattgtgtggggcatttccatccatgatcttgcaaaatccgagttgggtgtcaagccctaccagaatttgtccgaattctacacctagtccgatgttccatcctgcatcaaatcggttgtatccaagtccgtcatcaccgaatgtgtcaattttctcgtcagcatttataccgacattaccaatggagacctcgccgtcgaatttagcttttccacctacgccacaggcaagatatggtcctgtcgcaaccactaagttggtgttgtttgcaatgttgaagcggaattgtacattgatggggagttccagataaagctggttgatttttacatctgcatcagcatccacgataccttcgtatccttccgaatactttgcacctttctgcgagaaaaacagtgagggttgcaaggaaatgatgtcggtgaactgatattccattccgacaccaagacgtactccgggtttgaatttggagtgatccgagttgtcgccgatatagctgctgaggttaagaccggcttttacattgaaagacaattgcgcaaaactcatcgtgcaaaacagcgcaaataaaacggttaaaacactttttttcatcataattataagtttaaaatcagttaggttgttattttgaaatttccttttcttttttttgtataatgttgataaaagaagaactgatgataccggtaggaatggctaccatagccacgcctaccaggcagatgatacatcccagcaacttccctaaaggcgtaaccggataaatgtctccgtaacctacggtggcaaacgtgatgatagcccaccatattccgtctccgatatttttgaaaacttcgggctgagcacctctttcgatataatacatgaggatggctgaaaagcagatagtgatgaaacttgcagtatatgcagtttcaagttcctcttttacggctgagagcgcccggccgataatccggaaagaacgagagtgccgtatcagtttgaaaatgataaaaatataaggcaggatgatgacatgcaccacttccgtatcccaatatatataggtaaggatacaaggtagcacagctacgaaatctacaaatccatagaaagagaatgtgtatttcagacgtgctttcacagcctttctgccgggataaagtgccggtgcagataagatacgggctatgtactccactaaaaatacgaaagaggatacataggtcactccgaatagaggcaacctgtatgcggccatttcctcatacgaacttccgatgattgctgcaatggagataaggataaagaaaagtacgaaataatgtacatactttctccctaaaaatcgctgtatcaatatatagagtttcattacggataaatttgtatgcgggctttgcaccgtcgttttttagtttaataattttattgtacggtacatggttctgcctaatgttttcaaccaaaaaaacaaaaccttgtccgaatgcagaaacgaaggtagcaatatatttattgtttggaaaataaaaaatggtataaaaaacattcatcgactgctaatcggaaaaagtgaatacttttgctgaaaatatcaatattaatcttactgtatacagctaaaaaagaacaaaaagagcaatgttaactgtacgagaatttggactacggacggaaatccatacctttgttcccataattctattttgtaaatgataatgaaaaaagtaatttgtttattgtcgctattggcatgtttatttccggttaccggcatggcgcaaggcttgcatttcggcttgaaagcaggtgtgcttggcaacaaggcggatattcacggaatgagtagtcagatcaaggaagagaatcagaccggttttcaggtaggtcccatgttgcaatatcagaccggtttttatggtcttgctcttgacttttccttattgtatgtgcagcgcggtgtgaaacttaccaatactgccaacggtgcaagtaccgatgtaaaaacgcaaagtattgacatccctattgagctgaaatgggagatgggcatatcagacaattttgacctgttcctgggggtgggaccctctttttcttttttggtagatgaggataattgggggcgtaagcttgcccatatagctgtagatgtcatagacaaagatctctcatccatgggttggcgttccactgaggtcggtatcaatcttggcggcggtgttaagattgtaaatcacctgatgttgagctgttactataatatcggtctgacgcaatctgccaaacatcatatcggcggaaacaagcacgatgccatagaccagatatttgacggtgatgtatttgaatccaaaaacaggtattggcagttatccctttcttatgtgttttagttgaagatacgtggtatggatggggctgtctcctttttattgcttatctttgcggccgcatttattgatagacacagattgtctgaaattattagattatgaaacagaaacggataccgttggtaggggagcaataccttgttccttttatattgattacttctctctttttcctatggggatttgcacatgccattctggatgtgctgaataagcattttcaggaactgctggatattacaaaggcgcattcggcttttatccaggcgatgatgtatatgggctatttcgtaatggctgttcctgcaggattgttcataagccgtttcgggtatcgcaggggagtggttttcgggttgctgctgtacggtatcggttcgttgctgtttattcccgggcaatactatctgtcattcaatatgttcttgtttgccctttttgtcatcggttgtggattgacattccttgaaacggctgccaatccttatgcaacggaattgggggcgaaggaaacggcagccagccgtctgaattttgcacagtccttcaatggtttgggatgtatttgcgctcctgtgctggcaggtctgcttttgttttcggaagacgggagcggcagtgcgggtaatgtggctctgccttatgtaggcatggggatagtggtgctgctggtagcgttggttttctcgaagattaagttacccgaaatagagcatggggtagaggtggatgaagccgggcatgaaatagggctgtggtcgcataaactctttatctttggtttgctggctctgtttgcttacgaaataggggaaatctccattaatagttttttcattaattatgtagtggaacaggggtggatgaatgcccgtgaagcctcattggtactctcattcggcggattgggattatttatgctgggacgttttgctggcagttggattatgggacgtgtacgtgcggagaagatgctgctggtttgcgctacgggaacggtggtgactactcttgtggtgttgcttgatgtgggcatggtgtcgctggttgcactgctctgcggatatgcttttgaggctattatgtttcctactattttcgctctttctctgagagggttgggcaaccataccaagcgcgcttcctctttcctgatgatgtctccggtaggcggggtggtaggtccgctgttgatggggcttgtggcggattatacaacaatggtgatggcgtttatcgtacctttggctgcctattgcgtagtatggtgttatgcacgcaaaatgctgtctgttgcaagaaaggcacaataaagaggttgccgatataggatatattaaaaaaagagttgcaatatagggaactgtcccgttattgcaactcttttattttttatgcaaagatgtgtatgttactttatcttattcaagttttcctgtgccttttccggttctatggtcaaagctttggtgaaccattcctttgctatttcactgtcgcccgacagccatgccagcacgcccaggttgttccatgcacgaggatcgtcttttaccctttctatgtattgctgcgcgcggtcaaagtcaccgtaaacgatgttggcagaggcagcgttgatatttgccacaatatctgtgggataattggtagcggctatttcgtacacttccctgtattctttcgtacccggccggaagttcttggctacgccgtacatttcctgcagattcagcatcttgggattggtataaatcaacgttgcggcttcggagttgcgtacttcgcgtatttcgtaatctatggcgatagacagacgacgcaggcggggataatattcattcatcatggcacggtaggaagcgctgcccagtcctgatttcagtctggcttcacgtacatcagggttggtgtacttattgattatttccaatgctttgtccgcatagtcgggcttgtcttcctcaagcatcttgacaaggctgtcccagtcttcaccggctgatgttacgttcagtatgctgtccgggaagtgataacttcctctgagatagagggagaaagagtcggcgcgttttgtggctacgcggtcgttggtcttggcagagccgtcgggtgaagcatagccgcatatgttgatggctttgaaagtaaccaagtcgccttcggtcagcgggttcagggtttccttcagcttttgaagctcagcggagttgtttttgaaatcggctttgaattccgttccgcccgctgcatattctatatacagggtgttttgttcagagcgcactttcaacggcttttctgtcggggtgaggtaggataccatgctcatgcagggttcgcagatggaacctttctgcggcaatggttcttcttctaccacaactaccggttctatcacctgaatctcgggtaaatccagcagacagtctttcctgccttcctgcaatatccacatatccgcctggctcatccattcttcgtaggggaggcatacggtatagttcacgaggttccggcgatcggcagacttgcctttaataatggtataaggcgcattgtaatcgcctttcctggcaagcttacggtctttgtggcgcatcttgaacttgtttttaccggtgacgacaacgggcggcaaggtcttgcagttctttcccgcaaacaataccggagtaaaggcgtaagactgggtactgttgacttttacggcttccatattaaacttaaagtccagggtcagcgtatcgttttccagagtcagtaccggcttggtgacttttacctcacctgcccatgcagccaatggcagcatggcaaacagcagacaatatatctttttcatattcttcttgttttggttgataaattcagagtgattgggtttctaccgttttgtatttacgcttgtgcttcggtccgaaagtaaagttgatacccatatttacattgacggctgcacggctgataggagcgtagtaggccggttcgtatttacacatgggaacatctgcaccaatgaagaagttgaagccgcgcgggtggaaattcagcatgatgccggcatcggagccaaagttggataaggcgtagtttaccgatgcttcaaaccaggagaggggagcaacatttgccgaaacgcgtgcttccgtccatgagtgcttgccttgcatgcgggtggtggagaggaagccgaagctcaaacggtcgtaagcgggcagggtatattgagcgcccaggtgcagggtggctgcaagggcggtggtacgctttaatccttcccctgctttatcaaactttgccagatctgccaggtcatctactaattcgtccacttgggtgtccagtttcttgttattgtcggttccgtcgtctttcacggagatgtcgctaaaaccgtcgaacgtgaagtctttgttcattgttcctttggtggtgtttttccatgaaatgaaaccgaggtcgagcaaggaggcggagaatgtccattcgtcattcagtttgtaggtcgctcccaaatcaatagccataccgaaacctgtggggccgaggttgtccgtatcgaaatcgatgtcatcgtatgaaatctgtccgtcggttccgtctttcagtatcggggttctgtctccgttggcatccaggatatagtcgtcttcctgatagttgccggtttcgcctttggtgggcacgatgaggcctttggcagacatgtaaagctcggcatttttcggggtgatggtccattggtcctgagaggcgagaatgttcagttcgtcaatgtgcatggtggcctttgccagtcccacgagcgcttttactttggcgcctaccgtgaggcgttcgttgatttcgcgtgagtgaccgaaagcaatttccgcatagttggtagatacgatgttcacgttcttcacgttgtagctgcttcccgtttcgctggctaccccgtttttcatgaacttgaaaagttcatcgggcatgaaaacgttggtattggactttacggagatgccgagtgtgttaaaaccgccccaggcgtggaagcctaaggaaagaatcgattcgtctacgttgacacctactttcagtcttttgggcagtcctttcaggaattcggcgctgctcacttcctcgttcataaaggtggtgaggtcgccgttggctttcttgaagataaagtcgcctacaccgcctgtggattgcgcgccgattgtaagattgcccaagccgggaaaactgacgtagccacgttcgcccataaaggcggggtttagttcgtgacggtaggtacttccttccagaaaataggttgaacggctgttctgtgtctgtgccatcgcatcgccgattgcaagtgtcgctacggctccagacagtataatcgctaaaacatttgttttcattcgtttcgttatatatgattgttgaatcttttgtctgtatcgcatgaaataatttctcttagttcaaatctactttgatgccgttgggaattttgagtttcatgtctttaagctgcatccattgtgtgcttagcaactgaacatcggtggcttgtccgggcacggctgttatcttcagcttcaggccgtccagcttgctgatggcgccttccgccgtttcgttcaagttgacattgagcgcgcttgaaacttcggtcttgccgtctttgctttccgtgatggttccctctacggttacgtcgatgtcttttatcacgtttccgttggcatccagtgcgcttacgttgtcgttcttgatttccattgccaaaggaatggtgttgacggcatttatggaaagaacggcttttttgatatctacatcttcaaggtcgaggtcgaagttatcgagtgtttcttcatacacgattttcaggttgctgccgaagctcagggggatgtcgatgtcgtatgcgctgttcagcgtgtagtcctgtcctaaattgacggtgtaatactgttctgtctttacgaccggctttagctcaacgttgatgtggtcgggtatcgtttcgataatatcattcagattgggcacgacaactttggttgcatttgcctcaaccaccgtttgctcatcacgtactattgaaattgtctgttgcttgtctccgctgggttttaatgtgatggatgcaccaccgttaccgcttcctatttttacgattttggttactttaccgtctttatatccggtcaggacaccatccatttctacatccgtattcagtgggttgttggcattgaatgagaaaacaggattggtgatgtccagtcttatttcatcgtcttgcaggaagtcgggcagattgttcagttccacttcggtaggcttcacgtcgatgtcaggctggatggtgccgtaaacttcgcttacagccatttctgcaagggtaatggtaggagtgatatttaaagagccgttgccggagggatctgctacgtttatgccttgcatatctatctttatctcttggttttcgattttaaggattctgtcgccattctcttcgtcaactctgtttccttcaccgtattcctttccgaatacgtatttgttgattttcagttcttttgtaaatccggaatagggttctatctgtacatcagtcatggtaagggtctgtccattcagtccgttctctttctcgaattgtatgaagttcgggaaggtgattgtcatagttcccactttaaccaatgaggttgaaatttcaccgctaagttttaatttaagagtcaaggtcgttggcatatcggcagccaaggagccgatttctatgacggctttgtccacaccatgggcttctgcgttgatgaatccctctgattctgcatttgagattaaaatatcataaacatcactatcatggttcccactgattattctaatcggttctataggattcgatgattcattaactgtaaccagctttaccgatgtattcgtctcatcaatattatcctttttcagcagatgatattctccatccacaatctgcaaatcatccccctcgtccagttcgatgattttatccaatgttatcttctccgtatatcccacgggaattgccagatgttcgccacctgcactgattgtcatgtcgatgtccctgttcaggtcataactgttatcgatgcacgatgtggttattccgaacgatgtcagtaatagggccgcagctataagcggtcttttctttgtgtttagcatcataattttactgtttataattgttttgttgtttacttatgtattcaatattatggaaaaatggaatagattaaaagaatttcgggctacttttaaaagctgtgcaaatgtataaattttatttaattaataataccttaatcgttaaaaatgcaagaatatgggtgaaataagattgtttaatcctttctgatacacagctattttattgaaaatagtttatagtttaaaatgctgaaacattcggctgtatactgaaggcatttcagtcgtatactcatcctatttcggtcgtatacttaaataggttcagtcatatactgaataataccacttttatgcctattgattatcagtgaattacaaattctgtataaaaacaataaattacgacaatttgaatctttattcttaaaactgcttaaaaattacttaaggcataaagtttaatatttatctttgaacaatttacaatcaaaacataaaaccgataatactgaatgatacaaattatacaattaaagggaacagacaggcggctatatgagcttgtagcgccattggtgatgaatcccgatgtcttaaagcagaattataactacccgtttcgtacatcggaagattttgtttggtttgtggcagtagaaaagaggaaagttataggttttatacccgtagaagagaagaagaaagagtgtatcattaacaactactatgtagaggacaataatgaaagcacgctgaagctattattggagaaggttatatcgaatgcaactgcgggtaaggaattgacatcggttactttcatggagcattgttctctttttaaggaattaggcttttcggaggagaaagtctggactcgctacgtgaaaatgaaaaaagacagataactatggctgtttctaaaaatgtatacgaacttgcgcaggaacgtttagaactgatttttaaagagttcgatacaatatgcgtgtcgttttccggagggaaggacagtggcgtattgctgaacttgtgcatagattacatccggcgtaataatttaaagcgaaaattgtgtgtgtttcatatggattatgagatacagtacaccgtaaccatagattatgtagaccgtatattggaagccaataaggatattctggaagtctatcgggtatgtgtccctttcaaggtcaccacctgcacatccatgtatcagagctattggcgtccttgggacgagagtatgaaggagctttgggtgcgtcagatgccgcagggttcttatacgaaagaagcgttccctttctatacggagaaaatgtgggattacgaattccagatgcactttgccaaatggctgcatcagcggaaagatgcggtgcgcacctgtttccttattggtatccgcacgcaggaaagcttcaaccgctggcgcagtattcatctgaaccgtaaataccagatgtaccataactacaggtggacttccaaaataggcaatgacatattcaacgcttatcccatctacgactggaaaacgacggacatatggactgccaacggtaagttcggcttcgattataaccatctgtacgatttgtattataaggcgggtgtcaatatagagcgccagcgtgtggcaagtccgtttctgtgcgaggcgcaggagagccttgcattgtataaagtgatagaccccaatacctgggggaagatgataggacgtgtcaacggggtgaactttaccggtatctatggcggtactcacgccatgggctggcagagcgtacgcattcccgaagggtatacctggaagagctttatgcaattcctgctttccaccttgcccgaagaaacccggcgcaactatctgaagaagctgaccgtcagcatcgaattctggcggacaaaagggggatgcttgggcgagaataccataaagaagctgcaagacgcaggcattcccatcgaagtgatgaatcataccaattacaagacaaacaagaaacctgtccgcatggattatctggatgatatcgatataacggaattcagggaaatccctacctacaagcgcatgtgcatctgtatcttaaagaacgaccacgcgtgcaagtacatggggtttgccctgaccaaagaggaaatatacaagcgagacaagataatggaacaattcaaaaatatgatgttatgagtgtagataaaagtccggtatataatgtaaaagcaattcccgtagaaaagatacaggccaatgattataaccccaatgtagtggcaccgcccgaaatgaaattgctggaactgtccatctgggaagacggatttacaatgccctgcgtgtgctattacgaccgggagaaagacaactatatattggtggacggctaccaccgctatcaggtattgaaaacttccaagcggatttatcagcgcgaaaacggtttgttgccggttgttgtaattgataaggagctgtccaaccgcatggcgtccactatccgtcataaccgtgcgcgcggggcgcataacatcgagttgatgtgcaacatcgttgccgaactggaccgtgccggtatgtccgaccagtggattatgaaaaacataggaatggaccgggacgagctgcttcgtctgaagcaaatttcgggtttggcagacctgtttgccaataaagatttcagtattcctgacaacaagccggaatatatgccttgatagttgaaataattctcctgtaaacttgcatattttagccaaatcgcctacatttgtcagcacataaacagaacaaacaagttgcatggtcttcggacacagaaataagtgctgcatgaaaaaaatattggttagcggtggtgccggctttataggttctcatctgtgtacccggctgattaaagacggacacgaagtaatatgcctggacaatctcttcaccggttcggaagagaacatagcccacctgaaaggaaatccccgttttcagtttgtgcttcacgatgtggaattgccctacgaggcggaagtcgatgagatttataacctggcttgtcccgcatctccggtacattatcagcacgatgctataaagactattaaaacctcggtattgggagccatcaatatgctggggctggccaaaaagacgggtgcaaaaatcatgcaggcgtctaccagcgaaatctacggcgatcctgtcatacatccccaagtggaaagttattggggaaatgtaaatccaatcggtatccgttcttgttatgatgaaggcaagcgttgcgcagagacgctttttatggattattaccgtcagaacggaatacgcataaagattatacgtattttcaatacatacggtccgcgaatgctgcccgacgacgggcgggtggtttccaactttgtggtccaggcactgcaggacaaggacatcacgatttacggttcgggtgttcagacccgcagtttccagtatgtggacgacttgatagaggggatggtgcgtatgatgaatacggaagaagggtttatcggcccggtaaatttgggcaatcccaacgagttctccatccttgaactggcagagaaggttattaggctgacaggttccaaatcaaaactgatattcaaaccactgccgcacgatgatccgagacaacggaaaccggacattacgttagccaaacataaactggactggcagcctgtaatagagttggaggaaggcttgctccacatgattgaatatttcggcaagtatcgttcctgaataaatatggtaccaataacgggaaaaaatataatacaaagatgaacatggaaataaatccttctgagtacaaaatcctcatcgtagatgatgtgatgtccaacgtattgttgttgaaagtactcctgacaaatgagaagtttgcgattgctacggcaaacaacggacggcaggccttggaacaagtggataaagaacatccggatttggtgctgctggatgtaatgatgcccgatttaagcggctttgaagtggcgcaacgtctcaaatccaatcccgatacagcggatattccaatcatctttttgacagcattgaacagtacaacggatatagtgaaagggtttcaggcgggtgccagtgactttatttccaaacctttcaataaggaagagctgataatccgtgtcacccatcaggtttcattggtggcggccaagcgtattattctgaataagacggaagagttgcagcgcatcattgccgggcgcgacaagttgtattctgtaattgcccatgatctgcgttctccgatgggctctatcaagatggtgctgaacatgctgatgctcaatctgcccgttgagaagattggcggtgagatgtacgaactgctgacaatggcaaaccggacaacggaagatgtgttttcattgctggataacctgttgaagtggacaaaaagccagattggcaacctgaatgttgtctatcaggatgtggatgccgtggaagtggtagacagcgtgattgatgtgttcaatatggtggccggcttgaagaaaattaccatccgtgaagaaaagccggagaagttgcctgtctgtaccgatattgatatgctgaaaaccattattcgcaatctgctgagcaatgccattaaattcagcaacgaaaattcggaagtgttggtgaagatggaagagcaaggagatacagtggtagtcagtgtaaaagacagcggttgcggcatcgatgaagaaggacagaagaaactgctgcatacagatacgcatttcagtacgttcggcacaaataatgaagaaggttccggattgggattgctgctgtgtcaggattttgcagtgaagagtggcggcaagttgtggtttacatccaagaaaggagagggttcgacattctatttctccatcccgttgaagaaataaaaaagaggacaataaaacaatagggtgctaaagtgatattggctgcaatatgattcctcggattttattactttaattgccctattgttttattgtactcctctatttcttgcacagtcttttaaagtcacagtattcgcatttcttcgcatcttccgtttgggtaaaaggctcttcgggattgtatatctcctgcaggagcgctgatagccgttcgcgaaactcatcttcataaaacgcaaaattgttgaccggtactttgggctggcgcggtgcgcccatctcgataacgggcgagtaactctcggatgccgcacggtggatgtacagcagggatggagctaccttcagtccttgcttgcggcacataatggcagcatacaggaaagtctggaagatgtagttcggacggttgtcggcaggggtaaacaactgctctatgctttcgggagtcttgggagtgccacccgtcttgtagtccacgatgcgcagggtatcgcctttgctgtccatacggtctatcgttccgccgatattcagcggaagtattccggaaggagtatctatctccagggtttccgttactttttgttccatgccttccatacggaaaggggcgtactgcaggtcgttgcggagcagttgccgcagataggatgcgattactttggagtggataagctgtgtgccgttgtattcgggttgctcgccggcaggcacatggaaaaactcttccttgaaggcggtgtctacgtatgcctgcaaccttacgtcgttgcggagcaactgctccaggtcttcccggcgtatctcctttccgttggctgtgaggtcctggtataccagctcggcggaacggtggaagatagtaccgaacagggcggagtctatctctgcgcttacctcgtcgggagctttcagtccggcaacgtagcggtagtagaatctgagccggcagtcgaggtaggtgttgagtgccgaaggcgaaaagagtgcgttgggatgccggcggatgtcgtatgcgttgtacatccgttgcagtacctcgtccgtcttgtgtatttcaatctcgaggctttgttggggagattgcccggcttccagatattggcgtgagatgtcgtggggagactcgacgagaaactggagcatgaagcgcgacatctcaccccggttcagtccgtcggatgccgtattgtacagcaaggtaatgttctccgcacgctgtatgaggcggtagaagtagtaggcatacacggagttcttatgctcgatggtagtcatgccgaacgccttgcgcaggttataggggatgaaagacgaatcgccgcccgccttgggaagctgcccttcgttgagggacagcatgatgaggttgcggaagtcgaggttacgcgtttccagtacgcccattacctgcatgccgatggcgggctcgccgtgaaacgggatgttggtggcggtgagcaggcggttcatcaggcgtttcagcgtgtctgtatgcaggctcagcccgtcattctctatcaggctgagcaggcggttgatgagggtgtagcccttgaatagggactcccggtagagctggttgaagatgtcctcttcgtctttctcctgacggtatatgacggccacttcgcgcagcagctcggtgagatagcggcagatggcagcagttccgttctgcggggtgaatacctgttcgagaaaagcgtcttttttaagctccgacgggagagggtagaagcggttgtccttggtgagctgcttctccaggtcttcggccgtggcggacagttgccgggtgtagggatgcttcagtacggcaagtgcggcttcgtaggtatagcgtcccgtgtccctgcggtagccggcggtttgcagttccataagggcattgatatagctgtatacgggtgtctgcgccaatggaaatcccatggttatgtttacgttctccacttccggcgggatggagtgcagcacgggtagcaacaatgcctcgttgcatagcacaatggcgttttccttctccttgcttgcctcggtatcgcttttcacgaccgtgcgcacccattggggcaggtagcgggcctgtgcattctccgtaggagcggatatgaaacgtattttcttgggatgccgcaggacatcgaaggccgtttcgggcagttggttgggaaacagcttcaggttgcgcaggataaattcgcccgcttcgtgcacgtagggcggttgctgttcgtggggcaggcgggtgtagaacacgtcataatcccagtagaacatggctttgcccgcatcctgcaggcgttggaagaagcgggtctctaccttgttcagcacgttgaagcccacgaagacgtagcggtcgtagcgcagccggtccgtatcaagctcctctattacatggcggtacatcatgccttcgtatgcgatgcccagttcggagaggttcttccggtagtgccggtagatgtctcccagcttgtcccaaagggagatgaacttctctttgagttgcgtgcgtttgtcgatggagaagttctggaaaaactgttgtatggcttcttcctgctcctggtcgaggaagtcgtagtcgtccatgatgttcttcaaatcctgcaggttgctgaacagcttgtcggcatctaccaggttcttgtcggcatcgtcgaagtcgctgataagcagctcgccccagaaatagaaatcatccagaggctcttcgctgtgcgtttcttcgcggaacactttgtacagttcgcacaccagccggatagggtcgccgggtttcagaggcgaaaggctgcggaacagttcgctgatgttgacatatgcgggagaccacaacgggcggtcgctctgagccgccaggtattcgttgaagaacaggctggcacgtttgttggggaatacgattgccgtgcgcgacaggttgttccctatcttggagtataggtcttgggctactgattgaaggaatgttttcatactttctctattatttcttcttctacataccacagatacccgctgatggcattggcgtcatatcccatgcggacaagtaattccatatacccttgtacctgtttgttatatttcttgttgggcttgccgaacttgaagtctacgaccacaattgcaccgtcgcgcatcattacgcggtcggggcggcggttgcggagttctccgttctcctgccagatgatgtcgcattcgttgaacaactgccaggttcccgaataccagtccttgatttgcggttgcgcaaatgccttgcgggtgagttcccgtatctcttcctctgtctcggcacggccgatgataccttcgaataccagacggttgacggcatcgtcgatgtccgcttccgtttcaatggcggagaacagcgtatgcagcagacgcccccggttgatgaagcgccggccggactcggcttcgtccactccggctatgaagtcggcggaacggttggactgccggaattcaatgtcgtggcgcatgctttccgtatgtaccggaagtttgacgggcttctgtgcaagcttgttcacagtgcggcttttcccgtccgaagtgtccgcatccttgttctttcccttccgaacgcagtgaaggagcgcctcttccgacggatataccgctccgctttcatagacgctcccttcttcgtcccaacctccttcttccgctttggccacttggggcagggcggcggagagaagttcggacatagtgcctttctggtctttccggctccatacgataagattctttccggcacgggtgaatgccacgtacagcaggttcaggttatccacccacaactgcaaccgctcgttgaggtaatcctgccggtaaacggactccgccattgtggacgagtagttgacgggtacaaggtctatggcattgtacggcgcttcgggggcggtgcaccacaccagttggttgtatgtttcgttctccagtttccagtcgcagaaggggatgagcacggtatgaaactccagtcccttggacttgtggatggagaagatgcgtatgccgtccatttctccgctgggaatggttttgttgcaaagcgtctcgtcccagtagcggatgaaaccgtcgaggtcggaagagttgttttgcaggtactctgtcaccgcatcgaagaaagagaacagataggcgtcctgctttccgatgcgccccatgtcgaatagtgtgaagagttcttccaacagttcgtacagaggcatcaggcgcaattcgtccatacgggcgacgaactctgcgggaagcgcggtccttgcatcggcggtcagcagtttgtgccagtcggcaggcgctgcaaggggagcttccacttctcccttaccggtaatctgcaaactgtaattcgtgattagcgaggctctcgctatcttctcttccggattggacaggtagcgcagggcatctatcagcatgcaaatggcaagcgaggcatccaagcggaacgcttcgtccgatacaacgggcaggtgcagctttttgtcgaagtaatccgcaatgggtggtatattcttgtttttgcgcacaagaatggttatatcgttcagcttcacgccttccgaaagcagcctttgcacttcttcgcccatagccgacagggtcttttccgtgtagttctgttcttcatcgggctccaggaaggagactttgacatagcctttgttttccgtcttgggagattcctgggctacatcggcataggcgcgtttcaaggggatgcactcttccttcagctcttccagatgcaatgcgttcagatagtctactgcggcggtaaataggcggttgttaaagtggatgacattcgtttcgctccgacggtttgtcttcaaggtttccacgcgcaccgggaaagggaaggggagctggacaccgctttcgcagtgtaggggtttagcgtcgtaaagtggcacttcagcatcgtaaagtggcacttcagcatcgtaaagtggcactttagcatcgcagagtggcactttagactggtcgcttcccaagctgttcaatatcccccagtcgccattccgccagcggtatatggactgtttcacatcgcccacaatgaggctgtccgctccctgcgaaagcccttcgagcagcagcaggcggaagttatcccattgcatgcggcttgtgtcctggaactcgtctatcattacgttgcggatgttggcgcctatcttctcgaatacgaaagaagagtcgccttcgtgcactaatttgtgcagcagcgcattggtgtcggacagcagaaaccggttgtgctcgcggttcagggtgcgtacttcttcgtcgatgtgattgagcagttgcagtttgttgaggtgttgcagcgagaggcggcaactgtttatcgtgcgattcttctgcgggcggaatctttccgcatcctgaagcaggggtatcaggctggtttcggcaaggcggataatctcgtccttgcgcgaagatgtcttggtagcccagttcctggcgtccgccaggcagttttgcagggtggcattcaaaacatccttatccgccagccgtccgtcgcgcagcttgcggaaatagctgcctatgccgcgtgcaccgcctttcaggtcttcgggcacaagggcatggccttccagctcgccttcgaactggtcgtagaagcctttcatctgctccagtgcatcggtctccatttcacgcagtacgtcgcgatagagctttattgtttcgggagagcgcagcttgaaccgcaatccttcgccgcgttctatgtagctttcgtcgaaaatgttccgtccgaagctttttacttcgttggacacattccagcgtttgtcatcggcaatgcgctcgttgatgtagtccagcagccaggccagtacaggcgaagagggggtgagcttttcaatcatgctgtctacggcatcgctcagcacctcggcgttgttcagttcgatgttcaggttggggctgagttccagttcgcgggcaaggttgcgcatgaccgactggaaaaacgagtcgattgtctccacgcggaagcggctgtagtcgtgcagcatatactgcaatgccattccggcgcgttggcgcaactccctgtcggaaagagaggcggtttccggcttctttgccaaatcttctttgatacgtttcaggtaggcatccgatgcggggtcttccttccagatgccgtagagctgcgtcaggatgcgctctttcatttccgccgtagccttgttggtaaaggtcacggcaagtatctgccggtaggcgcggggattgagcatcagaagcttgatgtattccactgccagtgtgaaggtcttgcccgaaccggctgaggctttgtatactaatagttccatgtaggtatgtttatatttgtccgccaatatccttgaacttctcaataaaagctacaatcttttggaatacgctttgtttcttcatcagatattgaggattaagtggactcatcttcggtaaaatagcattgaggtcggtgccgttctcgctggcatattttcgtttcaaggaagcttggatatatcgtctggcagcttctatattcagtttttcttctgctatcagggtgttggcttcctctttttgcttctcttgggcataggcgaagaaagcggctatgacaccggttttgtcttgaatcggttccaagtctgtttcattgataaaatcaattatcaggctttctttggctctattcccgatgcttgctctaatcacacggcgtacgtcgtctaccaatgcaaccttgtcttttatctttttgttgtgctcaaaaattaattcaagaatatagtcaagatttatttcctgggatttgagtaaatcaatttcaaagactacatcatcccaatctatttttgagctttcgggagctttgcctgccctttcatgcctgaaccaatcccggatatcattgtatgttgaccgataatcctgtactgtccgttctttcagtacatcgatgtcctgcatggctgctatgtcttcatcagtcagaaagtatgtgttcttgaatgtttcaagggctgtactgtcctcccggtttattttttgcagggctttcagatgcgtaaattcatcatagttttgcaggatgttttctatctgcaaatactctccgaatagcttcacgaaagcttttttatctgcttctgtcactatttcattgggggcgggaaatctttcagtcaaatctttgactacttccgtatatcctcttttcgtttcacctgtggcaatgtctatgaatccgttgagatattcattataacttttttcaagcacaacgttctttgtgtttttatcgccaaatgtggtaatggcatctattgtagcctgttccaaatctctgaacgtaacgatattgccgaaagtcttggttgcatcatatatacggttggtacgtgagaatgcctgcatcagaccatgataacgcaagtttttatcaacaaacagcgtattcaaagtgggggcgtcaaaaccggtgaggaacatacctacaacgatgagcaaatcaacttcttggctttttaccctttttgccaagtcgcggtagtagttttggaattccttactgtctactccgaagctggttttgaacatagtgttataatcactgatcgcctttgccaaaaactctttggcgctgctgctcatggctgagggttcaaagttctcttcagcaatgtcgcccactgcattttgttcttcgttaggtgcaaaagaaaatatggtggctatcttcagcggcttttcattacctttctgcagattgtttaattcttcataatacagtttggctgcctctacgctgttcactgcgaacattgcattaaatcccttattgtttccttggttcctgtgagtctttatcttgaaattctgtaggatgtattgagatatttctttgatacggtcgggatgaagcaagagatgtctgttttccgctgcacttaacttaacttcatcgcgctccgcttccaaagctttaaactgtggacgcacatcgttgtagtctactttaaacttcaacactttctcatctctgatagcatccgtgatgacatacgaatgcaactcacgaccgaatacgctggcggtagtttccgtgcccaaagcattttccggaaagattggagtaccggtaaatccaaattggtagtatttcttgaagttcttcctcaagttcttctgtgcttcaccgaattgggaacggtggcactcatcgaagatgaatacaacctgcttctgataaataggcagattactctcgcttttcatgaggttgttcaacttctgaatggtagtgacgataatcttgttatcatctttatcgatgtttcgcttcaggcctgctgtactttccgagccgttgacgctgtcgggtgagaaactttggtactctttcatcgtttggtaatccaaatccttgcggtctacaacgaagaatactttatcaatgaaatcaagcccggtggcaaggcgggcaaccttgaaactggtcagtgttttgcccgaaccggtggtgtgccaaatgtatccaccgccttccgccgttccccattgcttcgtttgataggcacttttaatcttccacagaatgcgttctgtggcggctatctggtaggggcgcataatgagcaacgtgtcgctggtatcaaatacggagtaggtgagcagtatttgcagtaacgtattcttctgaaaaaacgttgcagtgaaatctttcaggtctttaatcagcgtattgtccgcctttgcccaattcatcgtaaagtcaaaactgtttttgtttcgtttcaccgtattggcaaaataacgggtgtccgtgccgttggagataacaaaaatctgaaggtacttatatagggaactttcgctgttgaaactttccttgctatagcggtgtacttggttgaaagcctcacgaatggctactccccgttttttcagttctatctgcaccataggcaggccgtttaccaaaaccgtaacgtcataacggttggcttgcgtcccggtctgttcaaattgattaatcacttgcactttgttgcgggtgatattcgtcttatctaccaaataaatattttgaatatgcccatcgtcaaatacgaagtcatagatatggttctcgtgcaccttttttgctttctctacaaggctgtcgctgggtttatccagatattcatccacgaatcgtgtccattccgcatctgtaaagacaacctggttcagggtttgcagttgcttccttgcgttggttaacagagcatcaggagaggtaatttccggaacatattcgtagccttgattcttcaaatcatctatgagttcacgctccaaagcggcttccgtctgataaccggcaggtggttcgcatgctattgaactttttacatagttatcaagaactatgtaattttgtaattccgctatggtattatattgcatcattgttgttcctccttccagtacttattttcaataagatgatttaataagaattttaccgtttgtttttccggttccgtaggttccggtactacttcatttgacaatgtggaatggcttgtaaactgaataactctattataataggtttgtttgtcatcaggcagcaaatcagaccaatgtggatagcctaagaagttggctgttttttcgtagaggttgcgcagaagcataaagtggtatttctgaatgctatttgtagcgatggcatcttgaattgtttgtattaaatggagatgatatgagaaacttttgtttgaatctcctttcttcatttgaatgtcgtaagtaccatcttctttcttattgagcatgtagcaactggcctttttcctattattgtcatataataagtttttaagctcattatgaagcacgttatagaacaacggattatgtgttgaaatgataaactgtaacccattggatttcttaatgagatctgccaaattaacagccagctcaattagatgattttcatctaaagagctaaccggatcatcgatgaatatatactttaagtcattaaatttatccgtttctctatctgcaggttctgctatgtttaaaacttcaacaacttgtgcaagcaaactataaaatacgcaccagattaaacaactctcttcaccttttgagatttttatattatcaatcgtattctcattgcccgcagcaatagagaacgttatttcgttgaatctttcattgaatttaggcattagcttatcgctggtataatgttggaaatgggttattatattgttttcctgcccttgatcacgaagtacccaatctgtgaaactgtttggttgtatttttagttttcggttggtgtcggcattcaggtcgttgtcccaatagaacaaatcttccgtaaaagcattgtagtaaagtatttttgcttttgcgtcttccagctcttctgtttcggtattttttggtgctatcagtcttttaaattctctggacagacgcgtttttcctgtaccgttgaaagcatagattaactgcacttttttattcgcatctttgagcgtttgtgctatttcggttagtgtttgtcccatactaattttatattattctttggaaatgagagtaacatattacggtagtactcgtattgcttctgacgtaattcaatctcttttggcagaccttcggtgagtgaggttgtgagtgcgtcaaacttatcaagaatagagactatgtgttcttgctcttcgagggaggggatagggataagaagtttttcaaaagcagtttttgataaacgtggtacacttgaacgtcgaacttgactatatattttctgttgttgggttattagaaaatgatataaaaatctactttttaagtcattctttgttacaaaataataaacatcatcagctgcccaaaaatcaacatcactatagccaatttcgcctgcagaaccagcactaataataaatgtagtatcagctattacattatttttatggtaatagccaagaggaatcatgcaattttgataaacagcatatttgccagttttttctaattgatttttaataagtcgtttaccccgttttatctctacaacctcttccaatactttccattctactttaccccgcggctgtaaaacagaattgccagtggggggattcaatgtggataatggttgtattgaattgtcgctgttttggatggaagtggctgaccggttcgaacgtagtgaagactggtcggactcttccatagggtaggcgagtagttgattacgataatattcatattgggattttctcgcttgcagctccgcttgcagctccgct

SEQ ID NO: 4119 - DNA, 10142 bp, Unknown
  gut microbiota DNA sequence
gattgtttggatatgggataggaatttgaagtttttctataacaaaagcatcaagtgtaggaattccagcaacccgaactcttgatttcagataatactgttctcccaataaaaagtagtacaaaaatttattgtttagtttagccatttgttcaatacaatacgtaccatcagatgaccaaaaatcaacagaactatatccaacagtgccagctgatgccccaacgttaataatcataacagtatctgctggtctattagcattataataatagcctaagggatctaaaccaccatgaaaaacgggatatttatcatttgctgacaatagattacgtgttaatctttttcctcgtagaatattggtaatttctcccagtgtcttccactctacctctacaccttccaataatttctttatattactcatagtccatcagtttacgcaattcttcttgcaattgtttcttatcaggtaaatagagttgatacctacttacaaacagttggtttgaaatgccttgtgtagcatattcaatcagcactttgtctttgtatgctccaagaacaattcctatcggttcattatcaccttccgtattttcttctttcttgaaatagtttagatacagattcatttgtccgatatcgttgtgctcaatttcgccacgcttcaggtctatgagcacaaaacatttcagaatacggtgatagaataccaaatcaacataaaaatgtcgcgaaccgatattgattttatattgtcgcccgataaaggcaaatcctttgccaagctccaaaagaaagtcctgtaaattggctattaatctatcttccagttcgccttccaaatagacttgcttttcggggatgcctacgaactctagtacaaaagggtctttcacaatatcctgcggattttgtatctcttgcccttgtctgctcaatgtcagaacttcttctttgtttctgctcaatgccaaccgttgaaaaagtccgcttttcatttgccgctttaactcgcgcacactccatttctcgatttcgcattgcttggtatagaagcttatttcaagttcgttacctgcttttagaatttccagataatggctccaactcaattgtccggacagtgtttggatttttgggaacgccaaatagaactgcctcatttgaaacacgttgcttcggctgaatcctttgccgtatgcaacggtcaggtcgtgcgataggcggttcaacaactctgccccatattcggcacgttcttttcctttctgctcgtactctacaatatagtgccctatttgccagttggtctttatcaaggttgcatttaccgtttggatagctttgtcgcgcccttcgctcaaagcctttccaatggcttcaacaagttccttataggaagattgtccgatagtctcgtttatttcgctattcatggcttacccctctatttctcttataatggcatcaatatcggcacgcagtgcatcaacgcgtttcaccgtccgggcaatatctgcattcagcttaacaatatcaattacttcgcgtttgtcttctgcttccacataagaacttacagagaggttgtaaccgttttcttctattttactgttatctaccgatgccgcaacatatttcacaggttcctttttattgaataggtctataatctttgctatgtgttcatcggtcagtacattgttgttagtctcttttttaaagaattcctctccgctggcatcgatgaattgtgtctttgtatctgttttgtgtttggagagcacaaggatatttacggctatactcgttccataaaatagattgggcgggagagagatgacggtttctataaagttattgtctacaagatactttcttatcttttgttcggccccgccacggtagaagatacccggaaaacagacaatagcagcccgtcctctggcggaaaggtagctgagggcatgcagcacgaaagcaaagtcggccttggacttgggagccagtacgccggcaggggcaaaacggtcgtcgttgatgagtgtagggtcatcgctgcctacccaattgacagaatagggcggattggagacaatagcatcgaaaggcttttcatcgccatagtggggctttatcaatgtgtcgcccaaagcaatgtcgaatttgtcgtaattgatattatgcaaaaacatgttcatccgtgccaggttgtaggtagtatggtttatttcctgaccgaagaagccttcttcaataagatgggcgtcaaactgtttttttgcttggagcaataatgagcctgagccgcatgccgggtcgtagattttgttgacagaggtttgtcccgacagggctaattgcgctatcagttttgatacgttctgaggtgtaaagaactcacctcccgatttacccgcattggcggcataattagaaatcaagaactcataggcatcaccgaaaagatcaatctcattgtcttcgaagttgccgaagtccaaactctccactcctttgataacagcagccaaacgcttgttcttttcttctaccgtgttccccaaacgattgcttgtagtatcaaagtctgcaaacagtcccttaatatcatgctcggacggatacccattggccgatccttctatcgcatcgaaaatcgcagctaaatctgtattcagattaggatttgtataggcgctctttgctatgtttacaaagagttggctgggataaatgaaatagccttttgttttgattgcatcgtcttttatctcagtggtgataacatcgtccgacatatcggcataatggatactgtcatcgccgccttcaatgtaactggtaaagttttcactgataaaccgataaaaaagagttcccaggacaaattgcttaaaatcccaaccatcaacagctccacgtacctcattggcaattttccaaattgtagattgcaactcatctctttgcttgataccagtcatatttattcaaattgattcttgatttataatgcaaaaatacaaaatttatcaagaatataataacaagcatctcctaactttgggtttccggctgtttttgacgatagaatcctactacatataaaaataatgagaaaggtttaagaacaacatgaaaagcagggatatgtaaaaaggattgcacctttttatttgtacggtgcaatcctttgtatgtatctttgataaaagggtatgccaaaactaaaatttgcttgctgtttttttgttctttttccgtgaaatccgtgtctaaaagtattttgaatgccctctatctcagagaaccggtgtctggaacaggaacgtgaaagaagggctgtctttcaaatcctttacggcatctcctgcatagacctctccgttggtcagcgagagtttcttgaccttggcttgggggctgaaatccatcttcttcaaatcgagccagaagaggttgggagtaagggtggattcaaagtaatataccttatctttctgattggctaccgagcgccagcgcgtggaagagatgtgaggcttgtcgggcgtagtgattccgaacggtacggatacgttacgcatcacactcaatacgctggggactgcaatcgccgcgtctgctgtctgcggaatggcatgaatgtagaatgatgcgcgtacaaagcggtcgctggagcggttggttccgggcagcatctgcaatccgccgacttccttccaatagtcgttgacggccaattggtactcgtatctgggcgagttggtcatcacccggtattccttgccctcgtggatgcttagtttcccgtccagatattccaggatagcggtattccccgtttcgtccgtaatagccagatgaagggtggaagccgagccgttgggcattcggggagcgtcgatgcggaaggtctccttcttcagttcgtccacggcttcgcgcacggtggcgaagttgtcgagcacatactgcgtccagatgctgatgcccattacggggcgggtgtctccgggacggtcgtatacggactccggcaggaacagcagtccggccaccagtcctttctcgttcatgccgtcgcacgtacctatatcatagcccgtggcaatgacactgccgtactttgaagtccatttcactgtttcgcctttattgtagccggcccgttgtattcctcgcggaaacacgtagatgttgctcatgatgtcctctttccagtccatcgtacggcctgtgataaccagattctccggtccgatgtaagtggcgcgcgtgcatgcgtccgcttgctgtatggttactgaaaacagggcagccaaggctgtcagcgctaccgttcctctttttttattcataatcttgtttgttaaatgggttatatgcaaagagtaacaaatgcggcgtcaaacagtttgatacagacaggctttttagcttctattccgttttttctttcagcagttcttccattttcagtacttcgtcgcggtattgtgcggcttcgatgaagtcgagtttcttggcagcttcctgcatcagtttcctggtgcgctcgatgctcttttcgagttgggcgcggctcatgtaccggacaatcgggtctgcggcaaccgtggtgctgctctcttgttccacatagggacggggcgcggttgccggggatttttccttgccggttccaccttcggcaaatccttccgtgccggcaaatacgttgaggttctttgctttcctgatttgctgaggggtgatgccgtgctcctcgttatatttcaactgcttctcgcggcggcggttggtttcgtcgatggtgagctgcatgctttccgttatcttgtcggcatacatgataaccatgccgttgacgttgcgggcggcgcgtcccgccgtctgtgtcagcgagcggtgggagcggagaaatccctccttgtcggcatccagaatagccacaagagacacctccggcaagtccagtccctcacgcagaaggttgacaccgacaagtacatcgtactcgccctcgcgcaagtcgctcataatctttacacgttccagcgtgtctacgtcgctgtgtatgtagttgcactttacgctgttgttgagcagatactccgtcagctcttccgccatgcgcttggtcagcgtggtgacgagggtgcgctcgttgcgttcgatgcgcaactggatttcttccatcaggtcgtctatctggttgtggctgggacgcacttcgataatggggtccagcaaaccggtaggacggattacctgctccacaacgatgccttcggattgcatcagttcgtagtcggcaggggtggcgctgacgtatatcacctgctttgccatcgactcgaattcctcgaacttcagcgggcggttgtccattgcggcgggaagccggaaaccgtattccaccaggtttgtcttccgggcacggtcgccgccgtacatggcgcgtatctgcggaacgctgacgtgactttcgtcaatgacgataagaaaatcatcgggaaagaaatccagcagacagtaggggcgcgtacctgccgcacgcccgtcgaaatagcgcgaatagttttctatgcccgagcagtgacccagttcgcgcagcatctccatgtcgtaggtaacacgctcctgcagacgctttgcctcgaaaggacggccttcgctttcgaaccactgcacctgcttgtgcaggtcgtcctctatctcgtggatggcgcgcagggtggcttctttggtagtcatgaagaggttggcggggtatatcttgtaagcatcgaaacgggcgattgtaacaccgctcacggggtctacctcttcgatgctgtccacctcgtctccccagaaaacgatgcgcagaaggttgtcggcgtatgcaaggtagatgtctacggtatcgccctttacacggaagttgccgcggttcaggtcgatgtcgttgcggacgtagaggctgtctacaagacggcgcaggaatacgttgcggctgtaggtttttccctgctgcacttcgattacgttgttatagaaatccgccggatttcccataccgtagatgcacgatacggaagataccaccaccacgtccttgcgtccggaaagcagggcggaagtggcggcaagccgcagcttgtctatttcgtcgttgatggcgaggtccttttctatataggtgtccgaagagggcaggtaggcttcgggctggtaatagtcgtaataggatacgtaatattccaccgcgttgttcgggaagaatcccttgaactcgctgtagagttgtgccgccagcgtcttgttgtggctcaatatgagcgtaggcttgttgatgttggctatgacgttggcaatggtgaatgtctttccggagccggtcacgcccagcaaggtctgtgcgggaactccctcaagcactccttcggtgagctgtgcgattgcttccggctggtcgccggtggggcggtaggcggatgttaactcgaatttattcatttcatcaggattgtcgggcaaagataggaaaggtatgaaaataaagcaacttaatgggtctaaaaacgtcagtctcattcccgatatcattgcagaagaactcggcagactgaaaagaatgtaaatatatcatatctttttctactccttgatgaatgttgaagtttttgtgctgaaaatttgcaaatcagtaagtaaaacataactttgcggtatcaatttaacaataaccattaatgtaatacaacaaaaacatgatttggaacgagagtatcgaatgcatggaccgcgaaagtcttcgtaaaatccagggcattcgtcttaaaaagacagtggagcgtgtgtatcatgacactcctttctatcgcaggaaaatgcaggaactgggcattacccccgatgacatcaacagcatcgatgatatcgtgaaacttccttttaccaccaaatacgaccttcgcgacaattatcctttcgggctttgtgccgttcccatgagtcagatagtccgtattcacgcatcttccggaacaacggggaaacctaccgtggtggggtatacacgtaaagacctgtcggtatggtcggaatgcctgtcgcgtgcttttacggcatacggtgcgggcagctcggacattttccagatatcctacggatacgggctctttaccggcggactgggtgcgcatgccggtgccgagaatatcggtgcatccgtcattccgatgtccagcggcaatacggagaaacagattacactgatgcacgatttcggttcgacggtgctttgctgcacgccctcttatgcgttgtatctggcggatgccattaaggactccggtttcccgcgcgaggagttcaagctgaagttcggtgcattcggtgcagagccgtggacggagaatatgcgccgcgacatcgaggcgaagttgggaataaaggcttatgatatttacgggctgagcgaaatagcaggccccggcgtggggtacgagtgcgaatgccagcatgggacgcatctcaacgaagaccattatttccccgaaatagtagacccgaacactcttgaaccggttgctccgggcgagacgggcgaactggtgtttacccacctcaccaaagagggcatgccgctgctgcgataccgcaccaaagaccttaccgccctgcattacgacaaatgtccctgcggccgtacactggtgcgtatggaccgtattctcgggcgtagcgatgatatgctcatcatccgtggcgtgaatgtattccccacgcagattgaatccgtcattctcgaaatgcccgaattcgaaccgcattacctgttgctcgtcgaccgtaagaataatacggataccatggaactgcaagtggaagtccgtccggaatactactcggatgaaatcaacaagatgctggctttgaagaaaaagcttaccgcacgcctgcaaagcgtactgggcctgggcgtggatgtccgcctggtagagccgcgcagcatcgagcgcagcgtaggtaaagcgaagcgcgtaatcgacaatcgtaaattgtaaatcgtaaaatagtaaacttatggtagcaaaacaactttctatttttttggaaaacaagtccggtcgccttacggaagtgacggaagttcttgccaaagagggtgtcaatctctctgcactctgtatagccgagaatgccgatttcggtattcttcgcggcattgtgtccgaacctgataaggcgtataaggtattgaaggataatcattttgccgtcaatgtgactgatgtggtgggaatcagttgtcccaatattccgggttcattggcaaaggtgctccgttgcctgtctgatgaaggcgtgttcatcgaatatatgtactcctttgccaacgggcagactgccaatgtcattatccgtcccaacgatatggaaaactgtatccgggtattgacggagaaaaaggtggacttgctggctgcgagcgacttgtataaactgtaaaaaaaggacagtatgaaggttatgaaagggagtgtgccaaagtagggataccccattcatctgtgtttttgaaaaattaaggtgcgtatctttgtttaattcgatgcgaacctctatctttgcacattatttgaataaaagtaatgaagaagaacgtccttataactttgcttgcagcactgctgctctcctcatgcggagaatacaacaagttgctgaaaagcacagactacgaatacaagtatgaagcggcaaagaattacttcgcaaaaggccagtacagtcgtgctgccacgttgctgaacgagttgattgccattcttaaaggtactgataaagcggaagagtctctttacatgctgggtatgagctattataaccagaaagattatcagactgccgcgcagacatttacccaatactataatgtgtacccgcgcggtacgttcaccgaattggcgcgtttccatgccggaaaagcattgttcctggatacgccggaaccccgtttggaccagtccggtacatacagtgcgattcagcaactgcaaatgttcctcgaatatttccctgacagctcgaagaaagacgaggcccaaagcatgatattcgctttgcaggacaagctggttatgaaagaatatctctctgccaagctctattataatttgggaaattatttgggaaataattatgagtcttgcgttatcactgcacagaacgcattaaaggattacccttacaccaatatgcgtgaagatttgtccatccttatcctgcgcgccaaatacgaaatggcggtgtatagtgtggaagacaagcgtgcggaacgttatcgtgaagcggtagacgaatattacgcctttaagaacgagtttcccgaaagcaaatacatgaaagatgccgaccgcatcttcaaggaagcgcagaagattttgaaggactgacaggaagtgaaacaattgttgtagaataaaattaatttagatagaaatttatggattacagaaagacaaatgctcctactactacggtgactcgtgatatgatggagttgtgtgaggataccggtaatgtatatgaatcagtagcgattattggtaagcgtgccaatcagatcagtgttgaaatcaagaatgacctttccaagaagctggccgagtttgcttcttacaacgataatcttgaggaggtattcgagaatcgcgaacagattgagatttcccgttattatgagaagttgccgaaaccgacattgattgccactcaggaatatcttgaaggtaaggtatattatcgtaatccttccaaggaaaaagagaaattgcagtaatgatacagcgtattcaatccgtttatttgttattggtggctatcctgctggttgtggctctttgcttgccggtgggacagtttatcggtccggatgggatagcggctcatatattcaagccgttgggcgtgactttggccgatggaaacttccagtctacatggggcttgttcggcattctgctgttgagtgcgattattgcgttatgcaccatattcctgttccgtaaccgtatgttgcaggttcgtatgacggtgttcggcagtcttttgctgataggttattacattgcttt

SEQ ID NO: 4120 - DNA, 1459 bp, Unknown
  gut microbiota DNA sequence
tggaacaatggagagaaaccaatccgctgacaaatagcttagattggttgccgtaatagaaatatgtttaaagtagccctgcaataactataaatgactaaccttgcacatatcgtatgtagtaatattgaaaatgaagaagattagaataacagctataagaaaggtggaacattgcgatttgtcggctatgtacgaaaatcctattgaacacacttgtgatattgaagaaggtacaacttttatttcagtcgatgggcagaaaccagaagagctgtgtgaaagcgcatggggctcaatgagctattttgttacggaattagccaatggaggcggtaacttttatgatggttggatgaagaatccgcactcggcaatgatttcgtgtaacgatggtttccgtcctgttagtttttatattgaagtgattgaataatgatgtgcattaggataaaatgccagtgttcagctaatagagaataccagaactttccgcccggttgatagcttcgatcacattatcggcattcaattttgccaatatattcttgcggtgattgtttaccgtgtaaatgctaaggttcagtttataagcaatctccttgctcaaaaatccttgtcggattaataaaagtatttccttttcccgcttggttaattgttggtttgccggaacaactgccgatggaagcatctcacccgttttccgatttataaccgtccgcctgattcgctccataggtgtttggtcaggcgcaatgtccaccactcccataatcatccatgcctttccatttttgtctttctgaatcacttggtggcgactgattacattcacatattcctgccgggtattcagcatacgaatctggaatatctgctgataatcattcctttgttcctgcggaagtgaatagatgaactgtccgtgttcaatctggtgttcgatgagttgtgcccggtcgtccgggtgaatccgttcttccaataaattcccctgtttctgaatcgtttttatccatgtagggttatatccgaagatagtagcaaagttatcggatgcaaaatcgtatcgttctttgaaaacatctaccgtaaagatgcaactttggctcattcgtgagaatgtctgtatagatgctctgcgttcattccataaatcatagtccacatccagcggactgatctgctgtcttgcccataattcttcgggagttatcttattggtagccatgtaacaaaggtaaacgatttttttgaatttctatgttcatttgcttttctcagcaatgacccgcaatgagaggtcaataggggtcaacgtaaaaacctgagggattcatagcttatgcataaattttcgccaatctgaacaggaagaaaactctgtcctttactcctctgaattgtgtgcggaactcctttatttttgcattgaacgattcggaagcagcgtttg

SEQ ID NO: 4121 - DNA, 47910 bp, Unknown
  gut microbiota DNA sequence
tcatacatcggtatgcagactcaggaagtggctatcaaaccgaacttaaaagtggtattgaaacctgatactgaggtgcttgatgaagttgtcgttgttgcttacggtactgctagccgccagtccattacaggtgctgtagcttctatcgactcaaagaaactggagatgcgccctgttactgaagtaacgggaactttggaaggtgctgctcccggtattcaggtgaataactcatatggcgagccgggtagcgataaatccgaaatccgtattcgcggatttggttctgtaaacggaactaatgctccgctgattgtcgtagacggctctccttatggcggaagcttgaatgatatcaatccgcaggatattgaatctatttctgttctgaaagatgcttcatctgccgctctttatggtaataaggctgctaatggagttatcatgattaccactaaaaaaggtaaaagtcataagttgaacttccggattggtgtgaagcagggtatgtatacccgtggtataccggaatatgacaaattgggcgtaaaccaatggatggaagctatgcgttccggtatgcaaagctattgggaaaaagacggtggagttactccgcaacaagcattcgaagcatctaaaacagtcaatgatgacattgttttttctcctatttttgataagaacggtgctgccatgttcgatgaaaatggaaagttcgtagcaaaggtaaaacccggttacaatgatttggattggctgaaggcattggagcgcacaggttatcgtcaggaatacacagccagtgcggatgctatgggagaaaagtatgatattttctcttctttcggctatttgaatgagaaaggatatatcattggatcggattatgaccgtttcactgcacgtttgaaggctaactatcagccgacttcctggtttaaaacaggtgtaagtctgagcggaacaatgtccggctctaattatcaggctaatgctcatgatgcatattttgctaatccgttctatacagccggtcagatggcaccggtctatccttatttgatgcataatgaagacggaagcgtggctacagatggcaccggtaactcttatgatataagtaactatgattatttgggtggtcgtaatattatttatgagattcagaatgatatcagccgtaaggaacgtaatgccgtatcaggtcagatatatggtacgatttctttcttgaaggattttgcggctactgtaaggggggacctctataatgtaaataacacggaaaaagccttcaataacccctattgcggtgacggtgctgctaacaacggccgtctttcaaaagtacatgaccgtacacgcgaataccgttttacacaggaactgacatgggctcacgattttgataagcaccatatcgatgtattgctggctcacgaatctttcaagcactcctataattatgatttcatgatgaaggagcagatgaaagtcagtggaaatacggagatgagcaattttgcaaaaatgacaagtatcgatggttataaccaagaatacactacggaaagctatctttcccgtgcacgctataattttgcggaaagatacttcctggatgcttcattccgtcgcgacggttcttcacgtttctccgatccgtggggtaatttctggtcgctgggtgcaagctggattatctctcaggagaagttcatgaaagaccttacatggattgataatctgaagttccgtgtttcttacggtgaagttggtaatgatgccggtgccgattattatgcttataaggaactgttctattcggatgtcaatgccggtatcggtgcgttctataaaattcagatacctaataagaacttgaaatgggaaacttccggttcattggatatcgcgttggaaggtcgtttgttcaaccgttttaatttctctttggatttcttcaataaaacatctaaagatttgcttttcacggtttacaatccgctttctgccggtgcaaccgactggtttgccacttctgacgagacgccgtccggaatgtcacaatattttgctaacataggtagtgttcgcaataccggtcttgaagttgctatggatgtagatgccatccggactaaagattggaagtggaatatcggtttgaacctgactactatccataacgaaattacaaaattgcccggcggtaaagacattctgcatggaacacagaactacagtgaaggacacagcatctatgaattctatacttatacttatgccggagtagaccaaatgaacggacgtgcgctttataatgcaaactcacagctgggtgaaagtacaatcaatgctttgaaagctcaagatgagtatgttactatcaacggtaaaaactacgtgtacaatacatcatatgccgaaaaagaatggcaaggcagtgcactgcccgatgtatatggaagtatcaatacctctttgacatggaaagacctgacactttccgtactctgtacatattcattgggcggaaaagtatatgattataattatcaaggattaatgtatactacgactaatggtccgggagccttgcataaggatgtgctgaatggctggcaagctgctccggaaggtatgaccgaagattctcccaatcgtttgaatccgaacggtacgcctcagttcgacctttcaagcttggcttctacttcttatggtgcaagttcacgctggctgacggatgcttcttattttgtcatcaaaaatatcaatctgaactattctttcccaaagaaagtcgttacaaaatggggattgggtggattgagcgtttacggctccattgaaaatgcggctacttttacggcgcgtaagggtatgaatcctcaatatagcttcagcggttctcaagataatacattcgttgcagcacgtgtgtttacgctcggacttaatttaaacttctaaaatgaaacagattatgaaatatacattcaagaacgtaatgatattaggactcggctgtctgttgggatttacctcttgctcggacagttggctcaatacagactccacgcagactgcggggggagatgtgattttctctacaacggataatgcaaaacttgttatcaacggtatttgcaggacaatggttcagcaacatgcctattatggacaaaacttcaacggtgaaggtactatgaagttgctttatggcgaatatcccggtcaggatttcaacttcccttatatggcaccgggatggtctccgctgatgaacaaccagtctaccataacccagagcagcagctctatctatgattcttacccctggtattactattatctgattatcggaaatgccaatgcggtaatcaatcgtattgataaagcagaaggttcgcaagaggagaaagacttcttgaaagccgaggcgcttacattccgtgcttattctttcttccgtttggctgaattatattgtgagccttgggcacgtagtaatgatggtgctaccgatggtgtggtactgcgcattaaggaagtggccgaagctggtgaagagacagatttgaagttgtctacattggccgaaacctataagcaggtttatgatgatcttgatgaagcccttagattatatgaggtttccggacttacccgcgatgacatttactgggatgctacctctaatatcagtttcccggatgctccggtggctcatgccatttatgcccgtgctgctttaacacgtcaggattatgccgtggccaaggaacatgcggctttggcgcgtgcaaatttccccttgatggacacgaatacatattatagcggtttctgcactcccagcagtgagtggatttggggtgtgtacaatgatgcttccgaaactatctggtattatggatggcagctcttcatggcttgtaacggttactatgcgcagcaaaatatcaatgtatgtatcaatcgtgatttagttgagtcttttgccgacagcgatattcgtaaaggattgttcttgacggaatctacattcttgccggaagatggaagtaaaacattcttggatgttgtaagtactgaaagccgtaatgccaataaatttaacagtacagcggagggcaaggccgcttctgcgaaagccaataagtatgtaaaggggacggtagcctctgcttcaccgcaggcatatgcttatgccagcctgaaattccaggctacggcacagccggctgtaggttgtcagcccattttccgtgcttcggagatgttgttgattgaggcggaagctaattattatctgagttcagacccgactgctgcacaaaacagcttggttgaattgaataaaaacagcggccgtgaccctcagtatacgtgtacggctaccggtgaggatttactgaaagagattaagaaatatcgtcgtctggagttatggggcgaaggtttcagttggtatgactgcaaacgttggggcgatccagtggttcgtaactcttttaaggaagacggtaattacagttcgtatattagcggaacattcggatttaaagatagcaactatgtatcggaattctggaaatggattcttccgaaccgtgaaagcgattataacagcgctatcgaaatgaaataaacggaatatccgtaaataattaaggcgggtgtgcagggccgaaagaccggaaggtatgggctggcacatccgctttccgttttgtggtatctgacggtgctcgatggtttacgacaggaatccgtatccttattattaaaaatgggaatgaacactatgagaatggttttgttttttcttatatttgccggcacatataatatataataaaggtacatatatataataaggtataaagtagaatgaaagaatttgtaatttccgaagcgcaggtcgaaaccgcagtattggtaggtcttatcacaaaaactcaggatgagcgtaagacgaacgaatacctcgacgagctggcattcttggctgagacagccggggcggaagtagtgaaaagatttactcagaagttagaccaggcaaactccgtgacatacgtcggcaagggtaaactggaagaaataaaagaatatatccgcagcgaagaagaagccgagcgcgaaatcggtatggtgattttcgatgatgagctctcggcaaagcagatacgcaatatcgaggctgaactgaaaataaagatattggaccgtacctcactcatcctcgacatctttgccatgcgtgcacagactgccaatgcgaaaactcaggttgaattggcgcagtacaaatatatgcttccccgtctgcaacgtttatggacacacttggaacgtcagggaggcggttcgggagccggtggcggtaaaggttccgtgggtctgcgcggaccgggtgagacgcagttggaaatggaccgccgtatcatcctgaaccgtatgtcattgctgaaagagcgtctggcggagattgacaagcagaaagccacccagcgcaagaatcgcggtcgtcttattcgtgtggcattggtaggatataccaatgtcggtaaatctactctgatgacgttgctttccaagagcgaagtgtttgcggagaataagctgtttgccacgttggacactacggtgcgcaaggttatcatcgagaacctgccgtttctgctgtcggatacggtaggatttatccgcaagttgcccaccgatttggtagactcttttaaatcgacgttggacgaggtgcgcgaagccgacctgttgttgcacatcgtagatatttcccaccccgattttgaagagcagatagaagtggtgaacaagacattggcggacatcggtgcatccggtaagcccatgatacttgtattcaataaaatagacgcttacacctatgtggcgaaagcggacgacgaccttacccccagaaccaaagaaaacttaacactcgaagaactgatgaagacgtggatggcgaagttggaagacaattgccttttcatctctgcccgcgaacgtatcaatgtagaggaactgaagagtgtggtttaccggcgtgtaaaagaactgcatgtgcagaagtacccctataacgactttctttatcagacctacgatgaagaggaagtttaattcaatgaagaattgattcttcatttttaatttgaatattatgacttacagaaacttgaccgaagacgaagttcttcggttgaagagccagtcgtgtctggcagatgattgggggaaagtaaccgttgcagaagagttttcaacggaattcgtacatcatacccgtttttcgggtgaggtgcgtttgggggtattccattctgaatttactttgccgggtggaataaagaaacattccggtttgcggcatgtaacgcttcacaatgtaacggtgggtgataattgctgcatcgagaatatccaaaactacattgccaattatgaaatagggcatgatacttttatcgagaatgtagacattattcttgtagacggattgtccaggttcggtaacagtgtggaagtgtctgtcttgaacgagaccggcgggcgcgaagtgcttatcagtgacaaactttctgcccatcaggcctatatcatggcgctgtaccgtcaccgtccggaactgattgcgcggatgaaggaaattaccgatttctattccaataagcatgcttccgctaccggttctatcggtagccatgtaatgatactcaataccggctctatcaagaatgtccgcattggcgactattgccacatttgtggtacgtgtcgtctgtacaacggaagtgtcaacagtaacgagaacgcgcctgtacatatcgggcacggcgttatttgcgataattttatcatatcgtccggttcgcatgtggatgatggagccatgcttacccgttgctttgtagggcaggcttgcaaactgggacataactactctgcctcagactctttgtttttcagtaactgccagggagaaaacggtgaagcgtgtgctatttttgccggaccttatacggtgacacatcacaaatccaccttgcttatagccggtatgttttcctttatgaatgccggttccggttccaatcaaagtaatcacatgtataagctcggtcctatccatcagggtacgttggagcgcggagccaaaaccacttccgattcctatatcctgtggcccgcaagggtgggggcgttctctctggttatgggacgtcacgtcaaccattccgatacttccaacctgccgttctcttatctgatagaacagaacaatacgacatatcttgtgcccggcgtcaatctgcgcagtgtgggtactatccgtgatgcgcaaaaatggccccggcgcgaccagcgtaccgataccaacaaactggacttcattaactacaatctgttgagtccctataccgtacagaagatgttcaagggacgggagactttaaagaatctgcgttatgcctccggcgaactttccgatatttattcttttcacagtgccaagatacgcaactcggctttggtgaaaggtatccgcttttatgagatagccattcacaagtttcttggcaattcggttatcaaacgtttggaaggtatcggttttcatagcaatgaagagattcgtgcccggttgaagcccgatacatctatcggtagcggcgaatgggtggatatttccggactgatagctcccaaaagtgagattgatgccttgatagacggcatagagtcgggtgcgattaaccgtttgaagcatatcaatgccgagtttgagcggatgcaccggaattattatacctacgagtggacatgggcttatgagaagttggaagaattctatggcattgctccggaaaatatgactgcagaggatataattcatattgtcgagaaatggaaagaagctgttgttggtctggaccgcatggtttatgaggatgccaaaaaggaattttctctggcttccatgaccggttttggtgcggatggttcacgtcttgaaaaagaacttgatttcgagcaggtacgtggtgactttgaaaacaatccgttcgtaacggccgttctcaaacacattgacgtgaaggccgcattgggcgatgagctgataggacgtatgcaaaaagtacaatgaagatgaggcggagggatggcaaatccattcgttttatatgattaaaatagagaaagcggggttgaagtattaggtttcaatctcgttttttctttctaattaaagaaatatttcaagattacttcttacctttgctgttacgaaatcacttttaaactaaatgaacaagtaattatggcaacaacacctccgttcaagtatcagcccatgttcgaaaagggtaaggatacgactgagtattatctgcttaccaaagactatgtgtctgtaagcgagtttgaaggaaaacctgtcctgaagattgaaaaagaaggcttgactgcaatggccaatgccgctttccgtgacgtttcgttcatgttgcgtcgttcgcacaacgagcaggttgctaaaattttgagtgactctgaggcaagtgacaatgataagtatgtggcactgactttcctgcgtaatgctgaagttgcctcgaaaggcgtgctgcctttctgccaggatacgggtactgccattatccacggtgaaaaaggacagcaggtatggacgggctattgtgatgaagaagctctctcactgggtgtgtacaagacctataccgaagagaacctgcgctattctcaaaatgctcctcttacgatgtacgatgaggtaaatacgaagtgtaaccttccggcacagattgatatcgaggctaccgagggcatggagtacgagttcctttgtgtgaccaaaggcggcggttctgccaacaagacttatctctatcaagaaacgaaagctattctgaatcccggtacacttgtgcctttccttattgagaaaatcaaaacgttgggtacggctgcatgtccgccttatcatatcgcattcgttatcggcggtacatctgccgagaaaaacctgctgactgtgaaactggcttccactcatttctacgacaacctgccgactacgggtaacgaattcggccgtgcattccgtgatgtagaactggagaaagaagtgctgaaagaagctcacagaattggtcttggtgcacagttcggaggtaagtatctggctcatgatatacgtattatccgtctgccgcgtcacggtgcttcctgtccggtaggcttgggcgtttcctgctctgccgaccgtaacatcaagtgtaaaatcaacaaggacggtatctggattgaaaagctcgacagcaatccgggtgaactgattcctgccgaactccgtaaagccggtgagggtgatgtggtgaagattgatttgaaccaaccgatggaaaatatcctgaaagagctgactaagtatccggtttccacccgcctgtctctgaacggcactatcatcgtaggccgtgacattgctcatgccaagctgaaagaacgtttggaccgcggtgaggatttgccgcagtatatcaaagaccatcctatctactatgccggtcctgccaaaactccgcagggaatggcttgcggttcgatgggcccgacaactgccggacgtatggacccgtacgtagacctcttccagagtcacggcggaagcatgattatgcttgccaaaggtaaccgcagccagcaggttacggatgcctgcaagaagtacggcggtttctatctcggctctatcggcggtcctgccgctatcttggcgcaaaacaatattaagagcatcgaatgtgtggaatatcccgaactcggtatggaagctatctggaagattgaagtggaagatttcccggcatttatcctggtggatgacaagggtaatgacttcttcaaacaattgaaaccgtggaattgcagtaaataacggataatcccgaatatgatataaaagccgctcaggaaactctcctcgagcggctttttgtatgatgaccggtggaatataaggcaggtaatggaatttcctttttaatgttgccgttaatcttttatctgttttttccactgttcgtactttttcagcactttcaatccggcattgttataccagctatagccgttgcggcgctcataccctatctcggaaatatcgtacttcttcactccgtcgcggtcgcagaagaaagggcggttgtcttcaagggtatagaaacgtgcccaaaatacggggcaaggatagtcatcctgcgggcaaggaaccatccggtagtctttcttgccttcactgttggtaaagtccttacgcatgatgcccgtaatcatgtttgccttgaaccaactgacggctgcttctacagaagcgataatccggggtgagggggcggggatggacatcagcagcaggacgatattgtccgattcggcgccgctgagcgagggaagttcgtaggcgcgtgctttggcaggggcaagggtgtgttcatcgtgctgggcgcaccacacagtcagtttgccgttttgttttacctgagtgttgagaatgcactccacacctttgtcgaatgcgatacgggcgcgttggcaaagggtatccggtacataggtgtacggggctttcttgttgtacacatcacgcaacaggttcatgacgttcaccattgcattgtcgttgtaggtgatgtgggtataataacctttggggcgcggccagaactgaggccagccgccgttggggtattgcgctttcagtaggtagcgtatgccttctaaggcagcgtctttgtatttctctatgccggtggcaaggtagatgcgggaaaggtagcgtatctctgtgcttgtggcattgttgtcgatggtgctttggttgacgttatctttgtcggcaagggctttctggtactcatcggctgtcagttcggcgggcatatagatgtttttgggccagccaccggttgtttgctggtagagcagtacgttgtcggcaatacggacagcttcgggagtcgtgaagaaggcatcgtccaatttaggggccagctttacccaatccttataaggatgtttctctttgtagtcggttgttttctgtgcattggcgcctgtaaacaaggcaagcaatgcacagaaaaagattgttcgtttcatattggtattgtttttggtttctctttacgaacaaaagtagggaaaagtttgaagagaagatggcaatatttgtttttaagggagtaaaaattgtgatttatacggtatgtctattccaaatactgttctactcttccgctgatttgcagcagggatatttcgcacaatttggtgtcgtactctgccgataggatacgctcctcggcatccagcaggctcttttgcgcttcgcgcatctcgataccggagaggttgccgagcatatagcgttccatggcaatctcatggttctctttggctgcaacgaggttctgtcgttccagcttcagcatctggagattgttctggtaggcttgccataggttgctcaagtcggcgcgcagggcttgttccagttgctcgcgttccaaacgggcgttttgtacggcaatgcgtgcattgcggagttcgcggcggcggttaccgtcaaagagattgaaacctacggtgacgccgaagttcagcccgaggttgctgcggcggctgttggcggaaatatcatatttgttgagggtatagccgtagccgccattcatctttacgtacgggtagtcgcgggaactggcttttttatagtccagccgtgccagcgtattgttctgttcggctttcagtaaggcggcgttggcttgcaaggtggcattccagagttcatcgaaattcagtttggcgctgacattgatgaggctgtcttcaacgatgaaagggcggtctacgtcttcacttgccatcagctcgttcagttggatacgcgaggtatgcagtaattcctgttgtttcatgtattgcgcactgtcggcattgaagtctactttggcctgctggtagtccaggcgggagaagttaccgatgtgataccgttcctctacgatgcgcaggcgctctttggagagcgatacagcgtagcggaagtttttcagacggatggtgtgctgcacgtagttgtagtactcggcggcgatgttggcaatgaggtcttctatggcgatacgggtgttggtttcgccctggcgttccagttctttcagcttttggtagttggcggtgatgttgaagccgtcgaagattgtccagctcaggttgatgccggcatcgacggtctggtcgaacacgccgttttctttggtggtttcaccggtggtgcgcagcttggtttcggtattgtccaaagtacctttatagccggcagacaagtcgagcgtgggcaggtagccggcattggcaagggtggcattgttcttgcttacttgctgttcgttacgggtgatacgcagggaatagttgttcagcagtccctgttccagacaggatttcagggtatagacaggtgctggctgtgcctggacggcaagcgcggtgcacagaatgatcaggaaagataaaagcgtacgtttcattcgttcttcagtttacttcggttggtagatacataactataaatagcggggacgatgtacatcgtaagcaatgtagacacaagcataccgcctactacggccgtacccatggcgatgcgttggttacacccttcgcccgtggcgaatgccagcggtatcagtcccagtacggtagaagcgctcgtcatcaggatagggcgcagacgttgcagggcggcatccttgatggcttgcatcttgtcctcgccggtttcctgcttctggttggcgaactctacaatcaggataccgttctttgccaccagcccaatcagcatgatgataccgatttggctgaatatattcatcgtgatgccgccgaaatacatgaataccagtgcgcccgcaatggcaaggggcacggtcagcatgataatcagcgggtccttgaaactttcgaattgggcggcaagaatcaggtagataagcaggatggccaggatgaaagcgaacatcagactggaagaactttcgcggtactcttttgagtcaccggtgagggcggtgcggaaagtatcgtccaatgtttctttggcaatcttgtccatttcgtccagaccttgcccgatggtcttgccgtcggcaagtccggcggaaatagtagcggacacgaaacggttatagcgatacaacttgggcggggcaatgccgtttgtcagctctatcaggttgtcgagctgtaccatgtctcccttgtcgctacggatgtagatacctttcaggtcggcaggcttgttgcgttgctgacggttgatttctcccaatatctcgtattgctttccattcatatagaagtagcccatacgctggccgctcagaccgtattgcagtgtctgggcgatgttgcgggtgctgacccccatgatgcttgccttgtcgcggttgatgttgatgcgggcttccggcttgctgaacttcaggtctacgtccgccatctggaataccggattctcatatacctttgccatgaacttgggcagcacttcctgcaatttctcaatgttggtggcttgcaacacatactgtacgggcataccgccgcgccgtccgccgaaggatgaggactgttgtacaaaagagcgtgccatggtctttttctgtacagctttcgacagcttttccgccacttccatttgcgtgtagtcacggtcctgcatgtctttcagggtgatgcgtacgttaccgctaccgctggatacgcgggcggttaccgcttcggcatcggggacgatggagtcgacaagctgattgatatcttccgtgtagtcgcggatgtattcgtaggtaacaccttcggctccgcgcgtgttgatgctgatttgcgaacggtcttccagcggcgccatttccgcagggatatggttccaaagaaagccgataatgagaatggttgccgcagtgaaaggaagtgcaatccagcgtttgcgcaggaaggctgccaaagaacggctgtaaaggttattcagtccttcaaagaacggttcggtcttacggtagaaccagctttgcttctctctctttatcagcagcttggtagccagcatcggcgtaaaggtcagtgcggcaaaagaggagatgatgaccgaaccggatactacgatactgaactcacggaacagacgtcccgtcataccgtccataaatacgatgggaaagaataccgctaccagcgtaatggtggtagagattacggcaaagaagatttctttggctccctcgataccggcctctttcgggggcattcctttttcgatgcggacgtagatgttctccgtcattacaatggcatcatcaaccacaagtcccacggcaagtacaatggcaagcatggagagtacgttgatggagaatcctgccaggtacataacgaagaatgctccgattaatgatacgggaattacgatacacggaaccagggtgacgcgccagtcgcgaaggaacaggaagatgatgatgatgacaaggacgaaggcctcgtatacggtctgctttacttcatcgatggaggcacggatgaatttggtgttgtcgaagccgtaggagtaatgtacgtcttccggcaggtctttcttcatgtactccattcgctcgtacacggcatcggctatttggatgtggttggcgcccggttgcggaattactacgatgcctaccataggcacgccattcatcttcatatagcttttgatgtccgccggaccgagttcggcgcggcctatgtcgctgaaccggacaatacggttgccgtcctctttcaggatgagattattgaattcctctgccgtatgcatcaacccgagtgtgcggatagtcagttcgatggtgtttccctcgatgctgcccgaggggagttccacattctcattgtctaccgcattctttacgtcgatgggggtaataccgtaaccggacatcttgatagggtcgagccacaagcgcatggaataacgtttctctccccaaatgcttacactgctcacatcggagattgtttgcagttgctcttttacggtgaggtcggctatttcgctgagttccagcagcgagcgtttgtcgctttgcaaagcaaccatgaggataggcatggcgtctgcatcggctttggatacggttggcgggtcgcagtcgcgtggcaggtaacgctgggcgcgcgacactttgtcacgtacatcgttggcggctgtctccaggtctacggaaagttcgaattctaccgtaatacgtgacgagccctgttggctgacactggagagtgaacgaatgccggggataccgttgatattctgctccagcggttctgtaatctggttctcaataacgtcggcgtttgctccggggtaggagcaggatacggaaatgatgggattgtccaccgacggatactcgcggacaccgagatagttgtacccgatgaaaccgaagagtaggataatcagtgtcaataccgtagagagtaccggtcgccgtatgcttaattcggatatattcatgatatgaagcgtaaagtatgaagtattaaggtataaagtgcaaagtctggaatataaagtataatgtacggattatgagttacatatgccggcatagacttgccatagctcatactttataccttatactttataaaatttcgtactcagttaatgttgtccaatgtcacgggcagtcctgtgcggagctgcaaggttcccgaagtaatgattgtatcgcctatgttcaggccttgcaatacttgcacttcggcttccgtccgaatgccggtagtaatctctaccggttgtgcttttcctgatttataaaggaaaatcttatccttgcccatttccggaacgatggcctcggagggtacggcaagtgcgttttgtatttcgtccttattcagcttgatactggcataacggcccggcagtacggcgctgttggcattgggatagagcgcacggatagtcagtgtatgggtcgtggggtctatctttgattcgcgtgcatagacggtggcatggaaagtgtttagcttgccttcgagcgtgaagtccagtcccgcacctgtctttacgtcattggcatagcgttcgggtactgcaaactctactttcagcggagaaagtttggtgagcttggctacaatggtggagggagacgcgtatgtcccgacactgacctgccgcagaccgatcactccgtcaaagggagcgcgaagttcggtttgtgcaatgttggactctatcaggtcgatgtcggcattcagggttgccagttcggtttttacctgttcgtatgcttccttactgacggcatctctttccagcaacgcattttgacggaacacgcggtcttccgccagtttcaactgtgataccagtctttgtaattgtgcctgaagagggcggtcgtttactttggcgagcaattgccctttcttcacgaagctgccttcttcaaagtttatttcgataatcttgccggatgtctcgaatgaaaggtctacttcctcatcaggcagcaggctgccgctgatttgtatttcgtctttcaacagttgcggtttgattattcgggcatttacgttcagcacctttttgccgccacgtttaccggtcattaccttgtcggcagctgccaattcttcgtttgtcttgggaagctgggaataaatgcctccgcctatcagtccggcaccaatgaatatgatgatgccccatttcacttttttattcatgttgtagtattagtagtatatttagccatagattttgacggaaaatatacccgaaggtttaaaacgggaaaagttaataaaagtgatagggtaatagaacggtaaggcaaacctgccactttattattctcttagtatgctgccctgtatttgccttcttccttatcttccagcatgttcaggtaagaggcgtagcgggattcgctgatgtaatgttgctctaccgcttcgcgcacggcgcagcccggttcgtggcggtgggtacagttgttatagcggcagtcggcggaagccttgaatatttccggaaagtaatgccctatttcttcttcctccatgtcgaatgttccaaagcctttgatgcccggtgtgtcgataatgtagccgtcacccggcacgggaaacatctcggaaaaagtagtggtgtgcatgcctttgttgtgataggcggagattgcgccggttttgatatccagttccggaaggatggcattgataagggtggatttacctactccggaatgtccggagaagagcgttattttccctttgagtttttcttttatagtgtcgactccctcaccggttttggcggatatcttgaaacaagggtaaccgatggtagtataaagattgataagtccgttcaggtagcgaagctcgtcttcgttgtaagcgtctgctttattgaagatgatattaacgggtacacggtatgcctcggccgatgccagaaaacggtcgatgaatgtagtggaggtttccggataattcaccgttaccaccagcatacactggtcgaggttggcagcaaggatgtgagactgtttggacaggttggacgaacgccggataatatagttcttccggtcttcaatttcgttgatgaacgctgttccttcctgattcaatatgatttgcacatggtcgcctactgccaccggattggtgctacggatacctttcaggcggaagttgcctttaattttgcattcaacgtatgtcccctcgtcggtctttaccagataccaacttcctgtatttttaattaccagtcccctcaaaatagttgaaagttgagagttgggagttgaaagttgaaagtaaggagttgttggagaacggtcggtgccgcacggtaactctcggctttcaattttcaactctcaactatatttatactgtcataatctctttatcctttgctgccagcatatcgtcaatctgcttgatatacttgtcgtgaatcttttgcagcttctcttcaccgcctttttgggcgtcttccgccaatccttctttcactgatttcttaaaggcgtcgatggcatcgcggcgtgcgttgcgtacactcactttggcggtttcgctttcgttcttacactgtttggcaagttgtttacggcgctcttccgtcaacgggggaatgccgatgcggataatttcgccgttgttttcgggcatgatgccgaggtcggagtcgatgattgccttttcaatgatgcggaacatgctcttgtcccacggcttgatggcgatactgcgggcatccggagtggttacggctgctacgttgttgatgggaaccatgcttccgtaagaatcgacacggattccgtccagcaaacgaacatcggcttttccggcacggatgtgggccaatgattcttccagatacattacggccatatccattttctcttgtgcttcgtctaagatgtcttttacgtctttcatatttctattgtttgaagtagcttttagtttgaaactttgcaaatataattgtttcacgacagattacacagatttacacagattattttatccgataatctgtgtaaatctaaatccgtatccattaatgtaaaccggcggatgtacgccgaggaatgtcagttatgtaccagcgtccctatttcttcgccttgcattactttcttcaggttgcctacggtgtccatgtcgaagacgatgatgggcaggttgttttccttgcacatgcaggtagccgtaaggtccatgactttcaggccgcgtttcagcacttcgtcgtaagtgatgtcgtggaatttcgttgccgtagggtctttctccgggtcggcggtgtagatgccgtcaacgcgggtgcctttcagcatgacgtccgcttctatttcgatgccgcggaggctggagccggtatcggtcgtgaagaacgggttgcccgttccggcagacatgataaccacttcacctgcttccatacactcgatggctttccatttattgtagaattcgccgataggctccatgcggacggcggttagtacacgtgcctttacgcctgccgctaccagtgccgagctcagtgcaaggctgttgataacggttgccagcatacccatctggtcgcctttgacgcggtcgaaacctttgttggcaccgctcagtccgcggaagatgttgccgccgccgataacgatgccgatttgtatgcccatctcgtgtatttccttaatttgtgccgcatattcggcaaggcgtttctcgtcgatgccgtattgcttttctcccatcaggctctcgccgctgagtttcagtaagattcttttgtatgttgccatagtttattaatttatttcgcttagcggcaaagatagaaaaataatgccaatcggtataaacaaattccggttattctttcaacgtgtagtcgccggcttgggcggtgaccactgcctgtaactcgtcgagtgtcttttcgccttccgaaaactccacgaccgctaccggcgggttgagggttacggtggcatgtacgccttccatactgttcaaggctttttccacatgcatgcggcaatggttgcacatcatgccttccactttaaattcttttttcatgacgttttcagttgatggttctactttattttccggttgtcctgccggggtggcggcagggctttccgcagtctctatctttttccttttcagccgcagactgttggttactacgctgacactgctgaatgccatggctgcaccggctatcattggattcagcaggaagccgttgacggggtagagtacgccggctgcaacgggtacacctattatattgtaaatgaacgcccaaaacagattctgacggatggtgcgcacagtcagtcgggagagtttcaacgcttccggtatctttgtaaggtcggaagaaatgatggtcatcttggccacatccatggcgatgtcgctgccaccgcccatggcaatgcttaaatcggcttgcgccagggctgcactgtcgttgatgccgtcgcctgccattgccactttcctgccgtttttctgcaggctgccgataaaggcggccttatcctgcggcagcacccccgcccgataatggaggatgccggctttgcgtgcaatctcccgggcagtggcttcgttgtcgcccgtcagcatatagacttcgatgccggcggcttgcaattcgctgacggcttgtatggagctttgttttatttggtctgtaatcccggctatggcaagtgcgttttcgctgtcggcaaaccagatgacggtctgtgcatccgctgccaggcgggcggcttcatcgcttagcgaccggctgacggtaatccggttttcttccagcagtttccggttgccggcataataggtctttccgtccgactcgcctttcacacctttgccggtaatactttcaaagttgtctatacttacgtcccgggcattctgtaaatggcggactacggcttcggcaagcggatgttccgataacttttccagactgtagaaaatgttttcatgcgctgccgtctgcgttgcccaaatcaaatcgccgactaccggctttccttcggtcacggttccggtcttgtccagtaccaccgtatcaatctttttggcggtttccaggctttcggcgtcttttatcagaatgccccgttccgcacctttgccgatgcctaccatgatggcggtgggtgtggcaagtcccagggcacacgggcaggcgatgataagtaccgtaaccagcgccagcaatccgtgtgtaaaaccgttctgcccatccagcaacatccatgcgatgaaggacagtacggcaatgccgataataaccggcacgaagatgcccgcaatcttgtctgccaattgctggacgggggctttgctgccttgcgcatcctgcaccatgtggatgattttagcgagcagcgtatccgtccctactttctccgcgctgaaccggaaactccctttttggttgatagtgccggcaaagactttggcgttcttttgcttggctactgctaccggttcaccgctcagcatgctttcgtccacgtacgaactgccttccgtaacgatgccgtccacggcaatccgctctcccggtttcactaaaataatgtctcccggacgaatctgttcaatcggaacaaccttctcagatgagggaccggtgataacggttaccgttttgggttgcagacccatgagcttccttatggcggaagaggtatttcccttagccttttcctccagcaaccgccctaacaggataaaggcgataatgacgcttgcagcctcgaagtagacgtgcggatggatgcccctttccagccaaaattcagggaacagcatgttgaacaggctgaacaggtaggcgattccggtgctgttggctaccagcgtatccatattggcggtgccgtgtttcagttgtttccatgcgctggtaaagaaacttcttcccaaccagaatacgacgggagtagagaacagccacataatgagattggcgtacggcatatccataaagaacatgccgataaccataacgggcacggataagacgatggcccatgtggtgcggaatttcagcgcgcgatattttttgtcgtgtgcctgctccactttatccggtgtattctcatcctgtttaatcagcaagtcgtatccggcattctgcacggcctgctgcagggcttcgggagagcaattttgggagtcatattccacagttgccgttgccgaagcataatttacggttgcttttcggacgccgggctggcggttcagcgtcttttccactcttgcggagcatgaggcgcaactcattcccattacgggaaaggtttcttgaacgatgcttttgtttgtcatatcaatagtagtacaatttatttcttccaggataaacttccggtttaatgggaataaacttgaagttcaataggagtaaacttgaagtttaataggaataaacttttagtttaatgtggataaacttttctatgaaacaaagatacggcaaggaagttgtccgatagttgcaaaattcgggatatgatttataagattctgcttatatttcgtcaagcggcttgcgtttgttcccctttattttcttgaagtgactgggagtcattccggttacatgcttgaattgggcgctgaggtaggagacactcgaatagttcagcatatcggctatttcgttcagggatagctccccgtacatcagcagttctttggcacgctctatcttctgtgcgatgaggtatttttcgatagtggtgttggttgtttccgagaaaagcttgcttaatgcgctgtagtcccggtgcagcttggatgccaggtaatcggactgattggttttcagtccgttgtcatcgtaatgtaccaattcgatgatagcatcttttatctgctctacagtctgtgatttcttgtcgtcaatcagttcgaatccgaatgtttcaagcgaggcttttacacgctgatacgtttcgtcgctgactgcgtcgggcaggacggcgatgcccagttctaccgaaagcgggtgcagccccagttgctcaagctggcttttcaccaccatgatgcaacggttgcagaccatgttcttgatgtgcagtgtgttttcgggattgggtgtaatatcgggcattccgttctttttcgggcaaagataataggtatggtttgtttttgctttcatttgtctgcgaataaatattaatggggtttatggcaacctcatcgtgaaatgcctttagtgaaagcttttttccataaccttccggctgagcaatgtctgcatagcgccccgcatggacaggtaaacaagaaaagcaagccacagggcatggttgcctaaaaccgtgtggaatccgtagtacaccgcaaagaagctgacggctgaggctgccatggagagaagcatgccgcgcgttgccgttgcgccgataaagatgccgtcccagataaaggcggcaattccggcagcgggtatggcaagcgcccaatagaagtaagtgtcggcggcggttattacgttccggtcatcggtcagcagtgccagaaaagcattgcctcccgaggcatagaccagcgtgaacagtacggtcagcccggcgccccatataaacagatgccggacggtatcggtaaatgctttccggttgcgggcacctatgtatcgtccgctcagggcttctcccgcataggcgaaaccgtccatcacgtaagagaaaagggtgaagagttgcatcagcaacgtgtttaccgccaggataatttcaccttgcgaggctcctgccgaggtaaagaataacgtaacggctaccagacataatgtccgcaggaaaatgtcgcggttcacttggaaaaagcgtatcattgcctctttttgaagcactcctttccaaacgatatacttcttcagtttgccgtagcggttcatccacagtaccagccccataagaaaacccgcatattgggcaatcagtgttcccaaggctacgccttccactttcatcccgaagaaacagacaaggctgaggcttgccatgatgttgacaatgttctgcgtaatggctatgtacatgggaatgcgggagttctgcataccgatgtaccacccggagagtccgtatagccccagcatggcgggagcgccccatatgcagatatgaaagtagagtgttgccatttccctgacttcttccgtggggtggataatctggaaagccgcttgcctgataggaacttgcagcaggataaggcataatgccacggcaagtcctatccccaccgaacgtatcagcaggcggacaatttccggcaggtcccgcttgccgtaagcctgtgatgtcatgccgctggttcccatacgcagaaagccgaatatccaataaatgatattgaacagcatgccgcctactgcaatggcgccgatataggcaggagaacccaggtgtcctacaatggctacgtcaatcagcccgagcaggggcacggtgatgttcgatacgatggagggtaaggctatctgcaatatctgtctgtctatgggattcattagcaatgttttatttaagagaacgcaaaggtacgcagaaaaagaaaaaacagtgggaaagattaactatatttctactttcatctattgacgattgccgcggaaatccgtaaatttgtagatgaatttctattgggatatttcaggctgtttaactatatacactttaaaatgaaaaccttgacttttcttttcttcggactcctgctgtgtccgatgacgcttttggcacaatcggcagatgtattgttgcagaaagtggctgatgccttgtcggcaggtaaggacgattatgccgtgagtctgttccgtcaggctgccgatgcggatgcgggacagacggagatgttctattggacaagcgttggaaaagccactgaggcagctccgcggcttgcgcaggaactggccgtttgctacagagacaaacggaattacgacaaggcataccttttttataaggagtggctgcagtattatccggcagatgtttccgcacttgtagcctgtgcagagatgcagatgatgcgcggtgaaacgaaagacgcgatgaaactctatgagaaagtgctggctttggatgctgataatcttcaggcaaatatatttttgggcaactattattacctgcaagccgagcaaaagaagaaaacgttagaggacaactataagaaaatcgtagcgcccacacgtatgcagtatgccggttaccgtaacggattgtcggatatttactccaatgggtatagcaaggctaagggttacttgcagaaggtgcttcaactcttcccgtctaccgaagcggggaagaccttggagcggataaagaaattggaaaaagagatgaataattgacggttcatctcttttcttttcctgcctgtagcaatgtctatttggcggtacggattggcaacttcataagtccgtctggtgcagaacgggtgtctgcctcctgaacggctttggggcccggtatcagaggactgtataacaagacatgccggatgcgtgcccgctgttcgggagtaaattggtcggaatggctgattgcgtaatccatgatgttgtgtgagacaaaggattcgcctgtcaggcaattctcacggttcaccaaattggcaaatgtgaagttttccggttcattcgccgcgatatatgcgtaattcatatcgtatgcttccttattgtaggtgggggtatctgtgcaatagtcggtatcttcacaactgtttcctctttctgtttcggagaatacatggtgtaatcctaaataatgccctaattcatgagccaacgtaacggtaatgtctgctggtttgtatgtggttgccgtactttcttcgttgatgaaccggctgttgatggatacacaataggggaaggacaagttcttcagttccaatcgggatacattgatttcactgagaccggccaggctgttcgccccttttgtggtaaacggcagatgggatatccctaatgtcgttgtattactgccgggctcattggcaaagttgtagaccattatattgatatatctgttggggtcccatacatatcttacatacccttttcccgcagtttcgtttatatcatcattcataaaggcatcgcaatctatcggatagctgcccggccatgaaatgtattccactcccggctggtccgtcttttctccatccggacttgcggtggcgagtgtaaaggtaaggttcatgtctgcgctttgcacgctcttcttataaagccggtttactgcgttcaatatttcagacaggcggttggggctgacatactgttgcgcgtcggacttgttttggtaaagcacatggaaaaccaccggcagattgtagtgatattgttctatgggtgtatatccagctgcttgagtgatttctatttttctgctcatcttggtagccggtgatgcgactgttactgtaacttttctctctttactgtcggggttggcttctatttgcagggtcaatgtctgatttccggagcctttgcctggagtgacgttgcaccattgtgccgttttggatatttgccactccacatcgcttgttacggaaaccgtcaatgtggctccgtcgccatcgacattgctgaatgacgattcggagagttccaaacagttggtttcattatcttcgcaaccatatacaataaaacttgctataacggctacaattaaggcttgtatcttcatgggtttatatattgatttcatacaaaacgtgttttataaagataatgtttgccaatttgtctaatcagataatgtattgcacctctttaaataaatattcccgttccttgccgttctcgtcttccagaacaaaacgtccgtcttgctccacacgcagcaggcgggcagagaatttgccgccggcatcttcgtaagggtgaaaacctctgcggcggaatagggagcgggcataacgggcggttatttcggcggtataagtaccgctgtcttccgtctgcaaaccgttgtagtagatttgtacccttttcagtatgtgcgataaaatctcatagcggtcgtgttcctgaccggtaatttgtttcagcgataccgggttgggggcatcactgtgaaactcattctgattgatattgattccgatgccggaaatgctgcgtccgatgaagtgtccggataggtcgttctctatcagtatgccgcatattttcttgtctctccagtaaatgtcattcggccactttatcgtaatttcgtccgaccatctgtccagctcttccttaatggaaagagacacgatttgtgataggataaactggcggcgcgcttccagaaaagtgggatataggacaaagctgaaaagcaggttcttgcctctttctgcttcccaggtgttgccgcgctggcctttgccggctgtttgaaattcggctgtaactgtggtcagttcggcaacggattcttgcaactcattacataactggctgatgtaccagttggttgagtcggtttcatccaacactatcagcggataaggaaacgtttcagggcagggcttcatactcattgcgcatttttttagtgaatttctttattacttcttcgtaggagtggtctatcagatgttttatcagtttgtcatctgcatcactgtccaggagcacctggttccaatacttcttgttgaagtgccaggctccttcaacggcattgtagcggtcgcgcaattccagcgcgtattccgggtcgcatttcatggtgatgcggtcgggagtgttgagattgatgcataaaaacatctttcccattacccggataacgaggaaatcctcaccgaaaggagtatcttcggttgcggcctttttactgaggcaatattcgcgggcggtttctatattcattgtattcaggggttagggttcttttaaaacacaggcgggtaaaatgcttctttgatgtgctctatctcgaaagcaccggcatcgcccactgctgtaatgatgtcgaagcgcacgggggcgtcaatacagaaatgttttacgtaagcatcggctgctatgacaatacggcgtattttctgccagttgacggcatcttgcggcttgatgtattccgtgttacttcgggtttttacttctacgataatcaatccgttgtccttggtggcaacaatgtccagttccaaacggtttttccgccagttccggtcgcgtatcacatatccgttatgttccagataagccgcaaccgcatcttctccggcttttcccagagcattatgtattgccatagtacaattttctttctttcagtacaaaaatacgttttttctgctttgtttttacagaagtaaagctaattttgcaaagaaatatgagaaagagagacaaaacgtgtgcaaaagcaacaccggaagaacctaaacgcgagcagcgcatggtatgcctgatgagcgaagaagagctgcggattgtggatcgttatctggagaagtataagataacgaacaaatcgcgctggctgagggaaaccattctcatgtttatccataagaatatggaagaagattatcctacactgttcggtgagcatgacatgcgaagatgagaagtggtggaataggatagatgtgcgatgtggaatgagataaactgcaagtagtaagaattatgacagatacggattatatgaagcaggcgcttatggaagcgcaaaaggcaggtgagcggggtgaagtgcccgttggtgccgttgttgtttgcaaagaccgtatcattgcccgtgcccataatctgactgaaacgctgacggatgttaccgcacatgccgaaatgcaggctatcactgccgccgctgctacgcttggtggcaaatatctgaacgaatgtactctttatgtgaccgttgaaccatgcgtgatgtgtgccggtgccatagcatgggcacaaatgggacggctggtatttggtgcggaagatgagaaacggggataccagcgttatgcaccaaaggctttgcatcctaaaactgcagtagtgaaaggagtattggcggatgaatgcgctgcattgatgaaagacttttttgctgcaaaacgcagataatacttttctgaaaaatttcgctataacaggttaactttgtagtgcggaatacaaataaattatcctacgggataattattgtgtaatgatatggctctctgcaattgttattcttctttgatttcttcgaaatccacatattccccctcgtcctgggaaaacagtttcttgtgcctgccatgtgcggtttcttcttttatccttgttttaggttcttcgttggaagaagagccggactgttgtctgccattgaaagaataccctcttccggattgataatttccattctcgttccggtaagtgtttgatgagcggcggctacccaagccgaaaatactccggataacagtgccgatgatgctaagtccgataagcaggatggcgattataatgataaataaaaatcctaaaaaatgaaacatgggctaatgtctttttatgtgttcgttttcagcgaacgataatacaacaaccgtgccaagaaaatgtttacttacgctttcctgtgagaagtgacagcaagatgtaccatacaattaccgctgcaaaaccgctgactttcaaaaaaacaagaagcggaatactgataatcaggaaactgaaacttactttgttgtctttccatgagaggctcttgaatttcaatgagaacatcggtgtttccgataccagcaaccacgaaaacaagcaaaccaatgctaagagataaagcggattaaagctctccgagataagtatgggatgtattcccgccactaacgacgcccaaaaaagggcattggcaggaaccggtacgccgataaaagaactggtctggcgggtgtcgttgttgaacttagccagacgcaacgccgagaatacggaaataaggaatgctgtgtaaggcatataaggagcgatgaactccatggatgccggataatgcatttctttaaataaagagaacactattagtgagggcgctacgccgaaacttacatcatccgccagcgaatccaagtctttgccgatgggagagtgtgcattcagcagacgtgccatcatgccatcgaaaaaatcgaatacggcactgaggataatgaatgcaagcgccaggttgtagttggcttcaaaagccatgacgcaggcgatacacccggagaacaggttcaggcaggttaaggtattcggtatggagcgggtaatgcagtttgccattgttacttgagttttgctattacggtctggttgccggtagtcagttgtccgagtttaacaagaacttccgtacccagcggaaggaatacatccacacgcgaaccgaacttgatgaagcccatatgttcgtcgatataacactcttcgcccggttcggcataagttacgatacggcgtgccatggcgccggcaatctggcgtgccatgatttccacaccttcgggggtttcgattactacagtggaacgttcattgtcggtgcttgctttgggcaaccaggctttcatgaacttgccgttctggtgagataccgacttcacggttccgtccaccggataccagttggcatgtacgttgaccagactcataaatatggaaaccatgatacggcggtcatggaaatattcggtttcttcaacctcttccactaccacaatctttccgtcagctggggcaaccacgattttttcagtattttcctggccgaacaaacgtataggacaacggaagaagttcactaaaatgccataaaccacaaggctgataactgccactacgtagaaaggaatcttacattccaaaccgaagtaaagccctgcgtttacggcgagtatcaacaataaactgccggccaatgtatgtgttccttcacggtgaatacgtattttctttaattttttaagtcgacccatgtatcttgttttattcttttctaatgcaaattatctgcaaaaataggcttattttgaaaatctaacaagaatttagtcatagaattacagatgttgataactttttgaggaatatttttgttagatgtagcataggtcgtacctttatgctcacttatagaaaggataaatttatgcaggattttgttcatttgcacgtacacacccagtattcacttcttgacggccaggccagcgtaagccggctggtagacaaggcgatgaaggatggtatgaaaggtatagccgttaccgatcatggcaatatgttcggtatcaaggaattcaccaactatgtcaataagaagaacagcggtccgaaaggggagataaaagacctgaaaaaacggattgccggcatagagagcggtgagatagaatgtgaggataaggaagcggagatagcggcttgcagagcaaaaataacggaagccgaaaataaactgttcaagcccgttatcggttgtgagatgtatgtggcacgccgcacgatggacaagaaagagggtaagcccgaccagagcggttatcacctgattgtattggcgaagaatgaaaaaggttatcataatcttataaagctggtgtcccgtgcatggactatgggatactatatgcgtccgcgtaccgaccgcaatgaattggagaagtatcatgaaggattgatagtctgttccgcctgtatcggtggggaggttcctaaaaagattatcaacgaccagttggaagaagcggaagaagccatccgctggtataagaatcttttcggggatgattattatctggaattgcaacgtcataaggcaactgtttcccgtgccaatcatgaggcttatcctttacagcaaaaagccaatgccaaactgttggaatatgccaggaagtacgatataaaagtaatctgctccaatgacgttcactttgtggacgaggagaatgccgaggcgcacgaccgccttatctgtttgagtacgggcaaggatctggacgacccgagccgtatgctttacaccaagcaggaatggatgaagaccaaggcggagatgaacgagctttttgccgatgttcccgaagcgctttccaatacactggagattttggacaaggtggaatattactccatagaccatgcccctatcatgcctacttttgccattcccgaagatttcggaacggaagaggaatacaggcggaaatatacggaaaaagatttgttcgacgagtttacgcaggacgaaaacggaaatgtcgtcttggacgaggaagccgccaaagccaaaatcaagcgtttgggcggttacgaaaaactttatcgtattaaattggaagccgactatcttgccaaactggcatttgacggtgccaaacggctttacggtgacccgttgtcggacgaagtgaaagaacgtttggtttttgagttgtacattatgaagacgatgggtttccccggttacttcctgattgtacaggactttatcaatgccgcccgtacgcaattgggcgtttcggtgggaccgggacgtggttcggctgccggttcggccgtggcatactgcttgggcataaccaagatagaccctatccagtacgacctgctgttcgagcgtttccttaatcccgaccgtatttccttgcctgatattgatgtggacttcgatgatgacggacgcggtgaagtattgcgctgggtaacggaaaagtatggtcaggagaaggtggcgcatatcattacgtatggtactatggcaaccaaactggccatcaaggatgtcgcccgtgtacaaaagctgcctttgtcggaatccgaccgtctggcaaaattagttcccgataaaattcccgataagaaactgaatcttcccaatgccatcgcttatgtacctgagcttcaggctgcagaagcatcgcccgacccgttggtgcgcgatacgttgaagtatgccaagatgctggaaggtaacgtgcgtggtacgggtgtgcatgcttgcggtacgattatctgtcgtgacgacatcaccgactgggttcctgtgagcacggcagatgataaggaaacgggagagaagatgctcgttacccagtacgagggttcggtcattgaagataccggattgattaaaatggacttcctgggactgaagaccctttccattatcaaggaagccgttgaaaatgtacgtttacaccggggactgtcgttggatatcgacaagatttccattaaagaccccgctacctataaattatactgcgacggacggactatcggtaccttccagttcgagtccgccggcatgcagaaatacctgcgcgagttgcagccaagtactttcgaggacctgattgccatgaatgctctttatcgtccgggacctatggactatatccctgacttcatcgaccgtaaatggggacgcaagcctatcgagtatgatattcccatcatggagaaatatctgaaagatacctacggcattaccgtctatcaggagcaggtgatgcttctgtcccgtttgttggcagactttacccgtggtgagtccgatgccttgcgtaaggcaatgggtaagaaactgcgcgacaagctggatcatatgaagccgaagttcattgctggcggacagaagaacggacacgatgcgaaggtgctcgaaaagatttgggcggactgggagaagtttgcatcctatgctttcaataagtctcatgccacctgctattcatgggttgcctatcagacggcgttcctgaaagccaattatccggcagagtacatggctgccgtaatgagccgaagcttgtccgatataacgacgataaccaagctcatggacgaatgtaagtccatgggcatcaaagtgcttggacccgacgtgaacgaatcgaacctgaagtttaccgtgaaccccgaaggtaatatccgtttcggattgggtgccgtgaagggagtaggtgagggtgctgtgcaaagtatcatggaagagcgtgcgaagaacgggccttataccggtattttcgattttgtgcagcgcgtcaatctgaatgcctgcaacaagaagaacttggaatgccttgcccttgccggtggttttgacagttttcctgagctgaagcgcgaacagtattttgccgtcaataccaagaatgaagtctttattgagacattggtgcgctatggcaaccgttatcaggcagataaggcggcagcggtcaactccctgttcggtggagaaaatgtagtggacatagccactcccgaaattccgcaggcagaacgttggagtgatctcgaccggttgaacaaggagcgggacttggtaggcatttatctctccgctcatcccttggatgaatatgccgtggtgctggaatatgtttgtaacacacacatggcggaactggaggacaagaccgcccttgtgggacgtgaaataactatggggggcatcgttacttccgtccgccggggcatcagtaaaaacggcaatccttatggcattgccaagatagaggactattccgggtcggcagagttgcctttcttcggaaacgactgggtgacttaccagggatacctgggcgagcgtaccttcctttatataaaggcgcgctgccagtctaaacagtggcggcaggacgaactggagctgaagattacctcaatggaactgcttcccgatgtaaaggaaaaactgatagagaagataacgatccttatcccgctcggcgtgctgaacaaggcactggtgacggaattggcggaactgacgaaggagcgtcccggtacaacggaactttactttaaagtgaccgacccggagagcaagatgacccttgacctggtgtcccgtccggtaaagctttccgtaggccgtgggctgatctcttatttaaaagagcgtccggagcttgattttcggataaattaattatctttgcttcactgatggcagtaggcggataacgctgatactgtactgttgaattgatatttaacttaatatttagaagaaatggcattagaaattacagacaacaacttcaaggaaatcctggcagagggtaaacctgtggtaattgatttttgggcgccgtggtgcggaccttgcaaaatggtgggtcctatcattgaagaactggccggcgaatatgaaggcaaagcgcttatcggtaaatgcgatgtagacgaaaacggagatgttgccgccgaatacggtattcgcaatattcctaccgtactgttcttcaagaatggagaactggtggacaagcaagtgggttctgctcctaaaccgacttatgcagcgaaaattgaagcactgttgtaaggtggtggtactattaatcctttaaagatataaagctatgggactggaagacgattttttgaagaatgatctcgatgatgaaaagaccattgagtacatcaaaaactatttgccgcaggagttgaaagagaagttctctgacgatgagttttattattttctcgatttgattgacgagtattattccgagagcggcatcctcgatgtgcagcccgacggtgacggatatatcgaagtcgatctgggaaaaatcgtagattacatcatcaaggaagctcataaagacgaaatgggcgattatgatccggatgaaatccttttcattgtgcagggcgaaatggaatacacggagtcattggaggatgagtaattcacagtttggattataatgaaaaaggaaaggcgcgggatgaaaacctgcgcctttccttttttcctgtatgttgtatatcagtctttccgtttatgctaccggcggagtattcagaaaaaagaataccgccgtgccgataagtatcattcccaatacgccgtaaaaccagcgtgcttgccggcggcctacattccgtacgacaaactgcgtgttctgggcggtaaagaaccaatcccaatctaagattgcagccagcagggagataattcccgcaacggcaaagataccctgaacgatgtactggctcatgtagtgcgattagcggttgatgattaacggccggtactaatccagcggttgcagtgtaacttcccgttcaccgttttctatctcttcgatagtgactttcacggtatttcccggcagcagctcttcaatcagttccggccattcgatgaagcagagcgcaccgctgtacagataatcttcgtatcccatatcgtacacctcttccagtttcttgatccggtagaaatcgaagtggtaaatcaactctccggcaatttcggaacggtattcgtttacgatggcgaaagtaggggaggtaatgacatcggatacgccgagctcttcgcaaaccgccttgataaaggtggtcttgccggctcccattttgccgtaaaaagcaaacacggtattgtcgcccattgcctcgacgaaccggtgggcggcttcatgaatctggtctaatgactgaatcttgatttccattattttgtatttttctgcaaagataatgcaaacctcggcataaaaaatgaacttgttcattttttatgccgaggcgcagcttatcttcgctttttctgcaaagataaccaaaaactttttccccctttacagattgcataaataataatggagaagaagatgatggctgctcccgaaggaacattgagatagtatgaaatgagcagcccgcccaggcaactgaggtaaccgatgcccacagacagccagatgatgcggtgaaacctatgcgaaaagagattggcagtcatctgcgggattgtcagcaatgagataaccagcacgatgcccaccatacgcaggcaggctacgatagtcagtgcaatgaacatcatcagtacatactcaaaggtctgtacgggtattccttgcgagcgggcgaattcgcggtcgaatgccacatagattatcggatgcaggaaaaacgagaagaacaggatgagcagtgctgccagtccgcccagcagggcgatgtcgccaaatgtaatagtcaggatattcccgaacaggtaggcggagaggtcgggtgcaaatccgggagacaggaatgtgaatatgatgcccaatgccattcccagtgtccagaataccgcaatggcagagtcctcgcgcatgtctttccgtttgctgagccattccacgccgaatgccgacagtacggaaaagaccgctgccgacagaatcggtgaaatccccgcatacagtcccaggcctataccgccgaaagaggcatgcgtcagtccgccgctgataaaaaccagccttcgggtgacgatgtacgtaccgataattccgcagacaatgcttgccagcagactgccgataagggcatgttgaaagaatgtatattgtaaaagttccatgcggcgggggttagtgattatttcttctttctcctacaatcaggaatacttcgtcttttatattgtcgggcagtgcaatgccgcgcagttgcaggctgcgcacccaccctgccacgtcttccgactgcatggtgtagaacacgtcacggaactcatcttcctgttcgggcgtatactcgtcgggagcggttccgatgtatttgtccagctcctcgtcgtcatagtattctatcttcttgctgacggcggcgagcaggctctctttttcgcatacctcgtgctgtccgcaacattccgcatccacttcctgcacttcgggcatagcgtccagttcgccattgtcaattttcttctggagtctgcggttgcgtacggttccggctatggcagctacgacggcaagggcaatcaggctaataatcagtatccacatacgttctctttccttgaaaaaaagtgtccttatacaatagaacggacaaagatacacattgttttcgtatctgcccgcttttgaacaggcaaaaagaaagtgtgccggaatgcttttcggccgtcatgcaatcaggctgtctgcagcggcgcgtcgggcgatgttaatgacagatgataaagcctgcttgcttcaaatcttcccaatagcccggataggatttggatactacctggggctcgtcaatccttatctgcggcagtgcgatgcaggcgggggcaaatgccattgccatgcggtgatcttcgtaggtggcgataacgggagcgctttcggcagggcagcgttcaccctcccacagcaggatgctgtcctgctcggaacgtaccgcatagcctaatttgcgcagttcggcgataagggcggtgatgcggtcggtctctttgattttgaggctttgcagaccggtgaagcggaaagggatattcatcaggcagcaagtgacgacaaaggtctgcgcaaggtcgggaatatctaccatatcttcttcaaggcggtcaacgggcgtccccgcgagcgtgagccgcacccccttgtccgtgtattcggtgtgtacgcccaggcgggagaaaatctccgcaccgcggctgtcaccctggtaactgtgggggaacagtccgagcaactctaccgtttcctcttcattccctttcggtgactctccactccccgttttccgttcttcattccccctcagcgccagtatctgataccagtaggatgccgcgctccagtcgctctctacagtgaacggaacatcctggtaaccgccgggatatacagtgatactgttttcggaactccattcggcatgtccgccgaagtcccgtatgagcttgagggtgaggtcgatgtagggacgggaaatgatacagcccgtaagatacaggtgcaacccttggggaagaacagctcctatcatcagcaaggcggatatatattgtgaactcacgtttccggcaagtgatatttcacagccttgcaattccgaaccggtgatgcgcaggggcgggaagccctcattgcctgcgtactcgatgtttgcaccgagctggcgcagggcgtctgtcagaatacggatgggccgctgctgcatacgttgcgttccggtaatgatacggacaccgggcgttacgctgaggtaggcggtgagaaagcgcatggccgtccctgccgccatgatgtctatatgttcgggattgccttgcagcgcacgcaccatgacgcgggtatcgtcgcaatcgctcagattgcagagtgtctgcctgccatgggcaagggcgtgcaggataagcgcacggttactgatacttttggatgccggcagccggatagcggcatgcatcggtacatcgggagcggaaacggtataacgcatagttgtatttgttaagttacggtagcggatgactttatactccgcttgcaaaagtaagacaaatctttgggaaatggaaactgttggctctacattcgtgcttttcagaataccggatgcaggcaatcggcgggcagttccacttcgccccagtctatcattgcattgaacaggcgtatggtggaataagccggaagttcttccatgcgtatgtccttttccgtaagaatacctttgtccagcagttcggcacgtttggtccctttcagcagaggatgttgcggagtatgccaatggctgccgtcaaagagggcgatgttggcgatgctggtgtcggtgagcagatgccggcgtacaatcagaatatcatcatacgcgccgcgccgggcaaacaaccggttgagcgcactgcggtcggtgcttttgcaggcgtagtcgatgtcgtcggcctgtatcagtgccagtgagcggacggggcgcagggtataaggggtacaggtcacttcctcgatgccgttttgcccgtacactatacgcagcttgtgtacgccgcttccgggaatggcgggcaggtagccggccagttgcagagcggggctttcaggccagaagtgcgtacgggtatcgttcattctccgttcatggtaagccgtgttgcgcacttctccgcaatccacccgtatggtttcaataaatcggcacatatattttctgtattacttcgttgtattcgctttcccaacggctttgggcggtgatgccgccgccggctttaaaatagagctgtccgtcttcctgctcgatgaagcgtatcatgacggcgctgtccagccgtccgtcggcgtagcagcccatgactccggtgtagaatccccgttcgtagccttccgcttcggcaatgatttgcatggtacgcggtttgggagcgccggtaatggagccggcgggcagcaggctgaacagaatatcgccgagacgctttgtgtaatcgccgggcagcatgccgcatatttcggagcttgtctgcaggataggccctttgttggtctgcaggcggtctatgtagcggtaggacgctacggtgacatgttcggaaaccatgctgaggtcattgcgtatcaagtctacaatcgtggcatgttcggcagcttctttggcatcgtccagcaggattgattcagcatggggcagggtggcgtcaatcgtgcctttcatcgggaaggattttatcctgccctcttccatgcagacgaagatttcgggcgagaagcagacgaaccggtctttcagccagagtttgtacagggcgtgtgaatgcaggaacacatctttcagcgtcaggttggtgcggagcggcactttgcatgtcagattggtcaggtagctgttgccgcccagcaggttgcgcctcacggtatcgaaagaacggcgatagtcggcgggagcgggcggtgtgaattcccagtctatcgttccggcataccgggcaccggcatcaggtgcattgcctgttcctctgaactggtagaggcatacggacgcatctatcccgtcgagaggttctacgtacgaatgttcctgcatgtagtcgataacaaacaggaagggcgtaccgttgcgcccgaacgtattcatccgggcaatagctgtttctttatccagtgctttcattgtcttaaatcattgtagctatgatttgaatggacagtatgaggaataccattgcaatggggtagaccgttgcgtatgccacgctcggaatattactgtcggtcatggaatcggcggccgccagaccgggggtacttgtcatgccgccggtaatggttcccaagaggtcgagaatactgattttaaacaccatcctgcccacaatcacggctatcagcatgggaaccagggtaatggctgcgcctactccgaacagcagccagccgctttcctggaaggtggcaaccaggttctttcctgccgacgtacctacttcggcgaggaacagcagcagtcccaactgtcgcagcagttggttggcagggcccgacatcgaccagatgacaggacctgtcttgcctattgcgctgaggaacagggccactatcaggataccgcccgtcagtcccggtgagaacgacaaaccgccgggaaaggatatattcagtttgccgaacagcactccgagcacaatacccattgcaatcgggaagaaatcggtatcggacagttttttggcgttattgcccaagaggcgcgccagtcctttcagtccttccttttcgcctaccaccgtcagcttgtcgccgaatttcagcgcgaggtcgggcgagggggcaaggtctattccgcttcggcggacacgcgttacggtacagccgaagttcttcatcaggttcaggtcgcccagttgcttgtttatcatatcctttttggtcagcagcagagattctatctcttgggtgtggctgagcgggagttccccttcttcgcgttcgcccaccagggtggcaagctggttcagggcttcgtcactgcccactgcctgtatgtagtcgttttcacggagtacggtgtgtgcggtggggatggagatttgctcgccgtgcttgtggcgggagattacagcaccggttatggcacgggcattgatttgcatcaggctgcgtccgaaaactacggggttcgtgacacggtagatgcaggtgagcaattcgggaaactgtccgcggcgctctttctccaggcggcgggcttcccggtcgaggtcgatgtgcatgatgcggggcagcagtttcacaaacaggataacgccgattactccgaacggataggcgataccgtaggcaatggatgccagcggcgagtgggtgctgtcaatggcaacggcaagtcccggcgtactggtaagcgctccggctatgagtcccaccacgctcggcgtgtcgatgtcgaaggcatatttcagccccgttgccgtgagggcggcggagcagataatgagcagggtgatgatgatgagagtcttccctttgctccggaaggagtcgaagaagccgggtcccgcctgtatgccgatggtgaagatgaacagtacgagtccgaagttacccagctccttggggatgatgacgccgaaatgcccgaatagcagggcgatgaaaataacggcggatacgtcgagtgacaatcctttgattttaatccttcccaacatgaagccgagggctacgatgaggaacagggcgaaataagaggaattgagcaagtctgtgaacataggctttgatgaattaggtcttttcttgggaacaaaggtaatggaaaaaagttagatagggaaggctattttccttttcggttttattgcttacctttgcaggttttaaaagaatgaagaaaaacgttttatggaaattgatttaactacccccgctttgctgttttcggcaatatctttgataatgttggcatataccaaccgttttctgtcctatgccggtcttgtacgtgctttgaaagagcaacatcagaagagtcattcatcggtgacggccgcacagattgccaatctgcggcaacggctttacctgacgcgggctatgcaggtaaccggcatagcaagcctgctgctgtgtgtggtcagcatgttctttatctatatccggcttcatctggtatcggtctatatcttcggcctggcattggtgctgctgattatctcgctggcaatttcggtgtatgagatttatatctcggtgaaggcattggagatacatctgaatgatatgggcgattgaaaaggagctgccggaagccccgacatattgtccttcaaaaaagagggtgtgtcaaaactaacattcgcttgctatttgtttctttttaggcacggattacacggaaaatacagattttctttgttctttttccgtgaaatccgcgaaatccgtgcctaaaagaaatcatcatttgtccagctctttcagcaattcttctacggcaactttcagttgggtatcttcaccctttacgatggtttcgggcgagttggccactttgatgtccggttccagttggctgttctccaggtagctgccgtcgggcaggcggtaacccactacggggatgccgaatacgagcgacgggtcttgcagacgctcccaggatacgcttgtcatggttcccggaacgggcatacccaccagtttgccgatattccggtggcggtacacccacggtgtgccgtgtgcattggaatagttggcttcgcaggtcaccataatggaaggcttgttccagcggcggctgggcatgtcgcaggcttcgcggccgcgaaccacttgcgtgaagtatttctggccgctgaacagaatttcgatgtcctcgtgcaggcgtccgccgccattgaagcgggtgtcgatgacgatgccctcgcggttgttgtatttgcccaaaatgtccgagtagacggaacggaaactgtcatcgcccattgattcgatatgaacatatcccagccgtccgccggaccatctgtccacatctgccgcacgttgtttcacccagcgggtatagagcagggtattcagcgcgctgccgcttatcggaattaccacctcttcccagcgttctttggtttgcgggttgtagagtgagacgagggttttctttttggctttatcattcaatagtgtgtagtaatccatttcaggggtaatctctgtgccgtcaatcttttcaatgatgatgcctgcctttgctttggttgaggcgttatcgaacggacctttctctatgacttcggcaatgcgcatccctttgtcccggtaattccagtcgaaaagcagtcccagactggcagtcggttcgctttgtccggaagcgtagtaacggccgccggtgtgcgaaacgttcagctcgcccagccattcgctcaacagttcggcaaagtcgtagttattgtctatatgaggcaggaacttgcggtaggcggcgctcatggcatcccagtctacaccgtgcatgtcggtgttgtagaaacgcttcttctgctgtttgtacacgtggttgaacatatattcgcgttccgccgccaaatccattttggcttgtgcccggtaagtgacaggcttcagctcatcggatgccatattcatcttctgcatggttttgccgcccagcaggaaaaggttcttgccgtctttgtccatttccatggaagcccagccggcatccattttgtgaagcagccgggtgtctttcttgcggagatccattttccaaaggtcgtaaccgccttcaaaggcggcaaagtaataaagggtctcaccgtctttggagatgatgacgctgcccatgtccgaggaattcggggtgaggcgtaccatgcggtcttccatgtttttcagttctacggtgatgtcctttacctgagccttgtcatcgtccgcggctttttcttgtcctgcatctttcttgctgcctttcttacctttggcagtgtccttgctttgcgcttttttctgttcggcttccagctccttgcgcagttcgtagtcttccttgttcaggcagtatttgtcgtaggcgtcctgattgaggaaaacgagcatggcatcgtcctgcgaaccccatgaggcatgagcacgcatgccgtaacgctccgtcttgaagagaatggcattgccgtcgagggcaaaacggggcgaaccgctcatgtagccgctgttggtcaggttgatgatggggctgttgccctgtgcgctgacaagacctatatcggaatacgggtcgtgcctgttaccgatgaattcgagggtgaaccattttccgtccggcgaccaggcatagtcgaatccgccgtctgtgctgtaccaggtggagccatcggtaatctggcgcactttcttcgtatcaaggttcaccaccatgaggcgggtacggtcttctatgaatgccagctctttaccgtcgggcgagaattgcgggaaagcacgctcaacggtggctgacggcaacaatgcctcttcttctacaatggtggcgttcgggaagttggggtcttccttgcggactattttggcaagatacaactgccagttgccgttgcgctcactggcataagccagcgtgcggttgtcgggtgcgaaagacaggccgctttcaccggcaggggtgtgggttatctgtttggttgtggcatagtctgccgaagtgacgaacacttcgccacgggcgatgaatgccacttgcttgccgtccggcgaaacggttgccgaggtggctccgttggtaaaggtcaggcgggctgtatcgggccggtcgtcgcggataatctctatttgtactttttgcggggcggcgccatcctgctgggtatatatttcaccgtcgtaaccatagcacaatgttccgttgccgcttatggagaggaagcgcacgggatgggtcttgaaactgcttaccgcttttaccgcttcggggtgtgccggctgtagggagtacacattgaacgaaccgccgttgcgctcgctcaggaagtacaaggtctgtccgtccggcgagaggacggggttgcggtcttcgcccgcgtggcgggtgaggttggtgtgcttctctgtacggcagtcgtacatccatatgtcacgtgtaatggaagaggtgtggtgcttccgccactggtcttcaaatcctttttggtcttggtagaaaaacatgtcgcccgttttgtcgaagcagagggcttcggcgggagtgcccaatacctgttcggtgcgtccgccggttgcggggactttataaagctcggtcatggcaggactggggaagagcgcacttccggccgggtcctgtatggcggcggagaaaaggatgtacttgccgtcgggcgtgaatgcggaagggatttctcctgccgagttggtggtcaggcgttgtgccgcaccgccatcggacggcattacgaatacgtcgaaatttccttgcctgtcgctggcaaacgctatctgtttgccgtccggcgaccatacgggagacgattcgtaagactcctgcgtggtgagctgtgtggccgtaccgccttttgcggaaactttgtagatgtctcccttgtaacagaaaacgatttccgtgccgtcgggtgaaatctgtatgtcgcgcatccagagaggagttgcggcataggtggtgagggtagtgaaacccagtgtgagataagcaaaaattttcttcatatcggataggattctattaatattcttggggggggattgaagccctttttcggtgagacagtctttcgcggctatttgatacctcttgctttgtagattatctctttggcattgttgatgtcctggagtttctcttcggcggcgcgtttgatgtcttctcccaatgtggctacccggtcggggtggtgcttcagtaccagtttgcgataggcggcacgcacctcctcatcggtggctgtaggaagaatttccagaactttgtaggcagcttccagggagttgccgcccaggttgagcatggattccacttctttttcggacagtcccatataggttgccacttctttcagcgcttctatctcttcgcggcagacgttgttgtcgctccgggctatgttggcaaggaatcccagcagttgcaggcgttcctcgtatgtgaggttggcggctatctgcctgccgcaatcacggatggtctgtctgaatgcgagaggattctgcatgtccattcgcttgcgttgctcgaagaggttgagcaatatccgttcgccttcgcctactgccgcaacgccgaagttggtccgtaggaaattgcggacatattccatttcactgtgcatgatgcgtccgtctgcccgtatgatgtacgaggccattaccagcatcgaaaaaagaaaactgttccgttgcccggcaaagacatcttcctcagtctgcccgttgccatagtctgtcgtataacttgcagtattgccaccgagctctatcagcgacccgagtgcatatcctgccaatgcgccgagcggtccgcctgccatgaagccgatgataccgccaatccattttcctgctcccataattttgttcttttatctgcaaaaatagcaattcttatccgaataagagaaaggggttaaaaagaaaaacggtcgtcactcgtcacttttagtctctatccctttgtgggagagcgatacagacgtggtgacacggacggcgacaggtgacgaccaaattcggtcgtcacgggaaaaggctctttttatccgtctttcagttcttaatcgtcctataatcagtgtgttattgtttaaaacaagatttcctgcatttggggagattttgttcatatcaggggctaaaaaaggttaaaccgtgactttgcctcccgaatgcgtaagataaatgtgatgttgccttgttgtttttccgctattgcatcttgtataatgttgcaacagcatgtagtattcctcgttttgcagttgcgggctgtagagcccgcagttgcaaaccctgcggttcgcagttggcaaccgcagggcccgcaactggaaaacggggtttttattgtggtacggctacatttatcatgctgcttttcaacaaaaaagaataaggaaagtgctgtttttgtgtgggaaaaacgggttaggcttaggcaaaagagaatggaagaagcggggattttttacgttgagctgttgttgtagatttattttattaaacttgtagcaaagcattgatttttcagaaactacagacattactgcatcaatccaccttcaacaaagaaaacgacttcattcagccgttgtttattttttt

SEQ ID NO: 4122 - DNA, 24238 bp, Unknown
  gut microbiota DNA sequence
gataacaatttgtttgtagacaggcatgagcgaatgcggctgacctatgctcggtcggagttttatattgtgtctgccatatattactattatttgcagcaacggccggaagctttggcatctatcaatgaggtgccggagaatgaggagttggcaacagacacaaatcagttattgtattatcactatataaaagggtcggcttctttgtgcgaaggagaaacgcctgatgagcgtcgtttaagggagtttgatgaactttacactacttggaaattagcttccaggaaagggtatctgtattttgaaggaaacggtatacagggattggctaatttgatggcttctccggataattatgatttttatcaaggacggcggacgcatgcgttgaaacaattcggcgagccggtggattctttattgcctatgcggttgggacaacaggctttggagaaattccggcaatataatgacatttaccaaattgcgggtgcatacgtttctatcgggaaatatttgaatgcgcatggagaatatgagcaggcactcgatactctgaaacgtgccttagagtgtgtaaacgatcatcatcgccgtttttacgattgccacgacagtctggattggttgaaggcttatgaccgtcgtgatacgatatgtgcggagaaatcctggattcggcagaaattaaaaaccgttcccgaatggatttcaaggatacgtgagcagttgagtgtcacctatgccggattggaaatgaaagagtattcggattataacaggaatatatatctggatattctggaagatacccgtcaggataaggaattggaaagtcgttatcaagcattggaaagagaagcgggacagcttaatctgttgcttttctgtgtgattacggggcttattgtagtggtggtgttcttctggttctttaataaacgttctaaacagcgcaacagattgcatctgcaccgtttgcaatctatgctggatatttgtcaggagataactgtatccattcctgctgatgcacagaccgagaaagacatcacggatgcgattctggtggctgtacgtcccaaaatgaaatgcttattcggaacagaagacgtatgtatcaagaatagggaattgatattcgcacggcatatgaggaaagatgaacaggctatggtgcaagtaatcaatccttatatccaatgggcgttagacaacggaatgacttccatttcccttggcgaggaacagcgcagactggagaaacaacgctatattcatgaacggcatattgccggaaacaaacgacagaatctgattaagaaggcttgcctttctattgttgatggtattcatccttacattgaccgtattctgaacgaggtgcataaactgatacgcatgggatatatccatgatgaaattatcaaaaaagaaaagtatcagtatattgatgagcttgttaccaccattaacgagtataatgatattctggctttgtggattaagatgaagcaaggtacactgagtctgagcatcgaagtttttgaactgaatgagctttttgaattgttgaggaaaggaagccgggcttttgaaatgaaacagctggatttggaagtagagcctaccgatgcttgcgtgaaggcagacagggcattgactctctttatgataaatacattggcagaaaatgcacgtaagtacactcccaaggggggtaaggtgagaatctatgcccggcaggagaatgattttgtggaaatatccgttgaggataacggatgcggtctgtctccggaagatgttaaccatatcataggcgagaaggtgtatgattccaaaattatcggcatgaatgatgcacccgaccgggaagcattgcggaaaaataagggcaacggcttcggtttaatgaattgtaagggcattattgagaaatataagaaaacaaatcctgtttttaatgtgtgcctgttcaatgtgaagagtacgttagggcaggggagtcgtttctacttcagactgccggcaggagtacgtaaggttttgaccgcaatactacttgtattctctttaggtatggtttcttgcagcaaggcaactgataacgatgtgccgaaagaaacacttactgactctctgacattggccttgcagacagaatatgaacttttactgaataaggcttccgattatgccaatgaagcctattactgtaatgtagacggtgaatatgcgctggctttgcaatatatagactccgcaatggtttgcctgaatgaacattacgggaagtatgccgaagaaccgcatcgttatatgactttggtcggggatgacatacctgctgagctggactggtggaatgagatgtttaattccgattttcatgtgattctggatattaggaatgaggcggcggttgcatttcttgctttgaaacagtgggatgagtatggctataataatgctgcttataccactttgtacaagttgctgggtgaagaccagtctttggaagatttttgccgcgaactggagcgttctacgaataataagacggtgagtatcttgttggtgattattttattggttacgctatgcttggggtattatgttctgtatttccgcaggagattggtaaaccgttggaacttggagcaagtattggaaatcaacaagcaggtgtttaccgcatctgtaatatctgcatccgaagacaaggagatgctaaaacgtgaagaagatatgttgaaagatattccgcaacaaatcgcagataatgcattcgatgcggttaatgagttgttgagtatagagcggttgagcattgcggtttataacgaggctgcccataggttggagtacgcgtctaatcctttggaaggagtagcagagaacaaacttgtgtgggaagacttgatgcaacgttgttttgaagaacagaagtatctgtcggaaaatggaatgcaggcattgcctctcattgtgaaagccggaaactccactcagtgtataggagtgttgtgtttggtgagaagcaggatgcagcaggaatccgaccgtttattgctggagttgatagcccgttacattgctattgtgatattcaatgcggtagtgaagctggcaatgaaataccgggatattgagacagctcaggatgaagcacgtcgtgcgtcgtgggaggacagtttgctacatgtgcagaatatggtgcttgataactgtttgtctaccatcaaacatgaaacgatttattatccaaatagaataaagcaattgataggcaaacttcgctccggtaagctgtcggaaacagaggagcgggaaacggtagcggctatcagcgaattgatagagtattataaaggggtattctacattttgagccaatgtgcatcccgtcagttggaagaggttactttcaggcgtacggtgattcctgtgcccgagctgttggaagctgcggagaagtatttccgtaaggtgagcaggggagttgcagcttctgttgttttcagtatagaaacagtaagtgaatcggttatcggagatgtaaatcaattgcattttttgttggagaatttgattgatgaagctttgtctgtgccggttgcgggaaaaattcgcctgacttgtgcagtagaagatgattttgtgcgttttctttttacagatatgcggcgggagaaaacaagggaagagttgaatcaactgttttacccgaatctggcatgtatgacggccggtgaaaagggaaagttgtgtggtacggagtacttgttatgcaaacagattattcgcgaccatgacgaatttgccggaagaagaggatgccgcattaatgcagaacctgcagagaaagggggatttgccgtatactttacgctgccccgttatctaaaaagaattcagccgggaagataatggcttttctcggagcaaattagaataagtaaggataaaaagatatgaaatatggaagctaagaagtttaaagtcattattgtagaggacgtaaagctggaattaaaaggaacggaagagatattccgtcacgaaataccggatgcggaagttatcggtaccgccatgacggaacaagaattctggagtttgatggaaaccggtgtgccggaccttgttttactggatttgggtttgggtggctccactactatcggtgtggatatttgccgcaatatatttaagcgctatccggatgtacatgtgttgatattcaccggagagattttaaacgaaaaattatgggtggatgtccttgaagcgggagctgatggtattattctgaagactggagaattgttgaccaagacagacgtacaagctgttatggacgggaaaaaacttgttttcaattatcccatattggaaaagattgtagaacgttttaaaacttccgtccggaatgatacgaaacggcaggaagctgttatcagttatgacatagacgaatatgacgaacgttttctccgtcatcttgctttggggtacacaaaggaaatgattgccaacctgaaaggaatgccgtttggcgtgaaatctttggagaaacggcagaatgatttgatagggcgcctttttggagagtgcgaacgagtgggagtaaatgctacgcgccttgtggtgcgtgcactggaactgcgtattcttgatattgacaatctggaagcggacgaggaataattccgaataccgagtaattatgaggaataaatggcgaatgccccatcccgcaacgatgttcttcctgctgacactgggagttatctttctgtcgtggatatttgatgtctacggattgagtgtgcgtctgcctcatacaggcgaagagatacgtgtacagagtttattgagcccggaaggcattcgatggctgctgcgtcatgtagtaacgaattttacgggttttgccccgttggggctggttatcgtggcgatgttcgggataggggttgcacaacattccgggtttatagatgcgtgtatacgcaaaggcatacgcggacgggtacgtaatccgtggcgtatcatactcagtgttattgttctgggattactgtccaatgtagtgggtgatgccggatacatcatattgctgcctatcgctgcaacgttattccattcggtaggattacatcccataggcggaatcatagcagcttatgtatcggtgtcgtgcggttatagtgccaatatacttttaagcacactcgatcctatgcttgctgccacaacacaggaggctgccgatatgacggatgtgttgggcggacggatcggacctctgtgcaattattatttcttttgtgtatccactttcttattggtattcattatttaccatataacttgtagaaaactattgccgggattaggagaatacaatgggagtaataccttctgcggttataagcaactgtctcgaaaggagcagagagctttgtggggagctgtcattgtcggcttgctctatgcggcgtttgttctatgggctacattctcttcatggggtatattgagaggtgttaatggcggattgacccgttcgccgtttattattggtattctgttcttgttatctttggggataggtttaatgggaatggtgtatggattcgtttccggacgttatcgtacggacagtgatgtgatagaggggctgacccaaccgatgaggttattgggtgtttatttcgtaatcgctttttttgcttcccagatgtttgcttgttttgagtattcccatttggataaatgtatcgcaataatgggagcgaatgtgctttcccccgttcgttcggatagtttgtggatattgatattatttatcttgtttactgctcttattaacctcattatggtttcttccacatcgaagtgggcgtttatgtcgttcattttcgttccggtattggcgggtatggggatttctccggatatggcactgtgtgcatatcgtatcggtgacagtgcaacgaatgcgattactccttttatgttttatatgccgcttgttctgacgtatatgcagcaatatgataagcagtctacctatggttcgttgcttaaatatacgtggaggtattcattggttattcttattgcctggactgctttgtttgtgctttggtatctctgtaaactaccgctgggattataatgtacaactatcataaaaaagaaaatgctaacaagttataaataaaacctattagcatctttctttgtgattccgttgcgattcgaacgcaagacccacgccttagaagggcgttgctctatccagctgagctacggaaccatccttaattgcggtgcaaaggtacgtttttttatgaaaactacaaattttacacccaaaatatttattatttatattaaaataataggcctatatatgaaaagtagatagttgttctattgaaatacaatgctttagatagcataacatttttattttaaaagagaactaaatcaacccacatttcaaaagaatctgtataaattcaaaatcttatcagctaaatctcaataaaactttgcttttacaaaaattctcctcggctgatattacttatagtatattataattggtaataagtatcgttagccataatgattgcatcttctaaagtaccgccattttgttctacaaatacgataatggcatctataaactcgttgaaagaagcaacattttcacctgctattttttcattataatcttcctcggtgaagtctaaactttctattaactcagttttcatatctactcaatgattattatagtatcattattaatgcctttttttgcaaaaataatatatcgccatgacttcttagctattatttgcaaataatatttaccattacaatatattataacaggcatatttgttatcgggattttacctctgatagctgcaatatgaatatgattcaactcgttacagcgtattcaattcattattaataattgtctatgtttttctaaatcttttttatcaaaccgataccaacgattagataagtttttttattttggtatttcttctctcttcataaaagacaattctaataatattttcaaccaaattaataattaacttctattttcaaacaggatatacacattactaaacgacactcagtgataagcttattatatttgtagcactaaaccaaatacttaatatgatgatattcaaaagccatttttacatttatgctttcttatcctctatcattatgttgattggatgtgcagataatgacatgcccataaaagataaagaagaaaaaccacctatcacagatgaagaaaacccgcctctgccgccaaatgaaaatacagaagtagccctattcaatattcttaatctaaactatcccggattggctactgttaaagcgctacatgaagctggtgatgatactactgctttaaaagaactgttagcttactacagaaacagaaaaaacataaagaatcccaatgtcacatcagaccctcccagtgatgtagagcgtggttatgcagactatgccatagatgaatatcgtttctatgtaaacgataattatttggaagataagattttgaagaagccttattcactacaaaacagtgataaaacaataaattggaaatttacacctaaaggtgcagataatgaatatcaaaagcaattacatcgccacaattggatgccgcttcaaggaaaatcctatcaagagtctcatgatgagaaatatatgctttcatggaaagaagtgtataccgattggattgccaagcaccctctacccgaaggtagccctgacaagttcaaatggtatcaacttcaagtatccacacgtattatgggacaaacggagttattcgaatattttaaaagttctcctaactttacatcggaatggctttcttttttcttgatacattttgcggagcatgccgattatttatctcaataccaatatgccggtggaaataatatcttgttaagccaagctgtagcattagtgtttgcaggaactttatttccagagctgaagaatgcctcgcaatggcaaaaaacaggttgtgatatcattaatgaccaaacttcaaagttatttttggatgatggtatgacaaatgatttgtctttgcattatcatataggtatattagatggactatacgatctcaaacggctgctccttcagaatgaagttccggagaatttgctgtcgccaaatctaaatgaggtacttttaaaagccgccaaagtagtgatgcatttcacctaccccagttattttacaaaaaacagcaaagattgtactcctgctttcaatgattcatgggttaaaacccgaagcgtgctaaataaaaactttaagaaatatatggaaatgtttcctaaagattccgagtttgaatatatgttcacgtatggtaaaagtggcacttgtccgagtacacaaataaaaacattcccttcttctggcttttatgtactacgtagtggttgggacccgcaatctacagtactgattcacagtaataatgtttctttaaaattgggagactcaagccataaccaacttgataacggtacatttgagttatatcgtaacggacgtaacttctttcccgattccggtgtttgtgcatatatggcagaggataatgagaaggttatggaactacgcagatggtttcgtcagaccaaagcacataacacaatggttttaggcaaaaccgcagatcatgaagaaaccggaacggaaaatatcaataaagccgccggtactttattattattcgaggaaaaagatgagtatcaacttattgtgacagaaaatcaaggatatagcaacttcaagcatcgtcgatccatcttctacgtcaaacagccacaggatttttttgtgctggtagatgaaggattcgggactgctactggatatgcaaaattatatttccatctttgtgatggaaagtctgttgataatgttcttctggataaggaagaatttggtgcgcataccacctttgatgatagcaataacctgttaattcgtacattcggagaggcgagcaggaatcttatctttaaagagtttgatggtcggatatcctaccaaacagacaggaaatatgaacacagaaagtcctatgcagttgtcatgcggaaaccggacaataatcccgtacgatatattacagtattatatcccgtagactcagccacaggtcctgtaattaagggacagtttgtcaatacaggtaatgaagataaggtatctgtcaatgttacaattaacaagaaactatacaatttaagctatagccttaataaaagaaggtaatcttgtttaaatcttataactgagataattatagcctctctacttcataatcgggtcagcccaaaattttatccctctttgtttacgtaaaataacacttgttactactctcgtaaaaaactcaaaaaaggtaaaaaggttttgcttctacgctttaggcaactaactttgaaatatcaatattaaaataataaaagcatatgaaaaaattaatcttatctcttgcactttgttgtgcagctactaatttctttgcgcagaatgctgatccggcacaattggttaacgaaggtaaagctgcacttgaatctaaaaattatcaggttgcatttacaaaattcagcacctatctgacacaaaccaacaatcaagattcggtaattgcttttaattgtggcgtttgcgctgataaaattaagaaaccggctgaagctttgaaatattttgatatagctgtacagaaaaagtataacttggcaaatgcttatataggcaaggcaggtgcattgaaagatttgaagaaaaatgatgaatatgttgccactttgaaagaaggtctggaagctgtacccggtaataagacattaactaagttgtatgccacatattatgtgaatcaaggtattttagcacagagagctaagaaaaatagtgcagcagaagatgcttttaaacaagctcttgagattcagccgaataatgttaatgctctcaatagtttaggtacattactttacagtcagggtgctactacattgaaaactgacgctgaaaaggcaaaagtagaatttaaagaagcaaaagaatatttggaaaaacttattcctctgctttctccgagtaaaccggctcagaaaaagatgatagacaatgccaatacaatgttgaattttataaatactcaattataaaattcatatataatacaaaagagaggcagacctaaaggatctgcctctttttttagttctcatggttatattttctgctttaattttatttgcctctcttcaataccattgccgtacgtgccggaatataaagtttaagccactcttttttctcttttttatataaagggtctgaaagagtaaaatgcttcactgtatcatcagtcagtccatggccgccataatcaggattatctgtatttaaaatgacttcgtacttaccggcaggaactaaaaatccatagtcagtgaaagactgtttggggttgaagttgaatacaaatatcaaatccttacgcatatacgccaatatctgatcaccgtcattatgccagatttcctgaattggtgtagtttggaagttttttacgcttttaataacttccaacatggcgcaatcaaaatcgcccaaataatgatatgccagattcttattatctaccagattccattgacgacgggcatatttgcacgaccagccattgccttcacgggggaagtctatccattcgggatgaccgaattcattacccatgaaattaagataaccgccattgatagtcgatgctgtgagtaaacgtatcattttgtgcaaagcaataccgcgatgtaccgtataattttcatcgcctttttgcatatgccaatacatatcggcatctatcaaacggaaaacaatggttttgtcgcctactaacgcctggtcatgactttctgcataagatattgttttttcgtcctggcgacgattggttacttcccagaacatgctggacggtttccaatcttcatctatcttttccttgatagtcttaatccaataatcgggaatattcatagccatgcgataatcaaagccatagccgccatcttcaaatttggctgccagaccgggcatccccgatacttcttccgcaatggtgattgctttgggattaacttgatgaatcaagcggttggcaagtgtcagataacagatcgcattatcatcttggtgaccgttgaagtaatccccataattacagaatgcttcgcctaagccgtgactgtaatacaacatagaagtcacgccgtcaaaacggaaaccgtcgaagtgatattcttccatccaatacttgcagttggatagtaagaaatggattacttcattctttccataatcaaagcaaagcgaatcccatgccgggtgttcacgacgggcacccggatagaaatattgattcggatcaccagcaaagttacccaagccttcaacctcgttcttcactgcatgagaatgaacaatatccatgataacggcaatacccatgctgtgggcagtgtcaattaattccttcagctcttccggagtaccgaaacgggaagaagccgcaaagaaactggaaacatgatagccgaaacttccataatacggatgttcctggattgccataatctgaatacaattatatccgtctttggctatgcgcggaagaatcttttcctgaaactctctgtaactgcctactttttcctcctcttgtgccataccgatatggcattcataaatcagcagcgggtctgtagcagctttgaaagtttttttcttcatcttgtacggtttctccggagaccatacctgcgcactgaatattttggtttgctcatcttggacaacccggttggtccatgccgggatacgttcgccgcaaccgccgtcccaatgtaccattaacttatacaagtcaccgtgtttcatggcatcagccgggagctttatttcccaattaccgtttgcttttcgtttcagactgtattttttctcttccttccaatcattgaatgtaccaatcaggaaaatctgggtggcattgggagcccattcgcggaaaacccagccgttatcagtacggtgcaaaccaaaataaaggtagccggatgcaaaatccgacaatgtctgtttccctttattggttaactctgcctctttttcagaggcatgtttatggcggccgtttatggcatctgcatatggttccagccaaggatcgttcttaatcaaattcagtgtttccatagaggattgtttttgggtatttgtattatgctttaactttcacaataacttttttcacgccgtccggagtgattccgggagcatgtccgtcttgtgggaagaaaatggcaaacatacccggttttacttcgatatagctttctgccagaccggtaaagaaagtaatatccttttccgcgttataaggagcatcttccggcacacaatcttttgctgcggtataacccattatttcagtacccgacagaggtatttggatatcaataaagtctttgtgcgtttcaagtttggcatcttcctttgttttaggtttggtttgcgctacgtttacaagcaaatccttacctttaagctcggtttttcccacttccaaagcgtttaaatcgtgtgatttcaaaaactcaatagcctgtgcgaataaaggattcagcgaagcatatttctctatgttttcaagtctgtctactaccataattcaattgtttttaaattagtttttaaatttattcaaagtcgtctatcgtgtaatttacaaagtcggaaaaacgtttcagttgcctgaaaatatcatctgtacgttccagaaaatcaggagctaaaaagaaactgtcaggctgatgacaggaaactgtatattctttacattgcagatatttcaaatacggatagtctttagagaaaccttttggagctgtttttaggaaattctcgccgacaacgggaaaatattgtttaaaagccgggtcttcgacaattcctcgaaactcatccatgttatcataaaccgcttgtctcaaggctttcagcaggggagagggcgggcaataactgccacctgccaaaaggcagttgcccggttgtaaatgaacatagtatccgcaatggtctgatttctttcctttggcattgatatagccgccaaaatgatttttataaggcgttttatcttcagaaaaccgtgtgtctcggtagatacggtatgtacagtctctggcttcaatgccgcgaatgctttcgtcaaacaatgagatacgggagataattactgtcagcaagttctcaaactcgttccgggcattttcatactgctcccgatgggcgttgaaccattcacgattgttgttggcggatagttctttcagaaattgaaatataacagggatgttcatatcgtatatatccttatttctgccaaatttacggataatatttctaacatgctacaaataggcataaaaaaagcatcggcttgggtaaaccgatgctccttacacatttatcaatcaaacagacgcttctgttttttgatgtacttacttatcacaagcaggtacgtctcctttaattaatcttatatctaatactatgaaaaacacatctatataacgttacactttcagattttgttcataagggtaaggataactttagtatttgttatatctttgtcggaaaaataaataaaagatggaagagtataaatacgatgaagaaagtgttaatgcactggttaagtgggctgaaacggcaacatttcctgaacaggtcatgttaagcgatgctgaaaatatatttgatgtaaaaaggtatgtgcgggctaatttgagcgatatagccgcccattaccctgacgaattctataatccggctattacccgtttatatagattaaaagataaaatggaaggtaaagataatgcagagtgattgggtcaccctgcattatctttttcatagctttattttgagaatcttgccactgtatccttctacagatatttctgtcgccttataaggcaataagcttatattttcttctttaccggtcaataaatctacggctcggtattgttccatttgcggtatttgcagaaaatcgaaagcgtgggaaggaatattgattgcaaggtctgccgatatatggtcgaagttcacgacaaacagcaataaatcccgtccgtacttgcgcaagaatgtatattgtttatgttcgttgaagcgccaaccattgatgttggcatacatcaggtcaaagaaatctccttgcgaaatcgctttttcttcattgcacaatgttaatatacgttgatagatgccatacaaatgcttctgattgtccgtcagcatcttcccgtcaaattttccgccgttgcgccagcggcgtatggtgtccacgctccaatagtcaaagatagtggtacgtccgtctctgccgctgaatccttcgctgtccatccccaactcgccgaattcctgtccgaaataaatcatcatgggattcacattcatacaagccgatacgatgagggcgggaatggctttacgcggattgcttgcaaagaaatcggaagcgatacgctgttcatcgtggttttccagaaaattcagcattcgcttttctatcccgcccaggctttgccatgcccgtgtaatggcggtagcggattcgttgccgcaaactattgcacgaagtgtgtcatacaatcccactttatcatagagataatcaaattttccacgaaacagataattaccgtattctttcggattatacacttcggcaataaagagtagggcagggtatttggctttcacttgcggaatagcccattcccaaaactcgacaggaaccatttccgccatatcgcaacggaaaccgtcgatatgcttctccgcccaaaacatcagaatgtccagcattttattccatgtatcgggaatggggttgaaatggcaggtaccgccattctggtaatccacgccataattcagtttgaccgtctcataccagtcgttgatattgggatatgcgtcaaagcggttatttccggtagctttggccgggaactctttataaggttcggcagcagcgcctttcatatcaaattgtccatgcagttccgattgcggaatataatagaagttgttataagggctgaacgcatagtccgtatcgtcatttgctcccagttgagaagtcccgtccggctgcatatccgaatgatactgacgcgctacgtggttgggaacgaagtcgatgataaccttcaacccgctgcgatgagtgcgttgcaccagattttcaaattctctcatgcgttcgggaacgtctttcgccaaatctgggtctacatcataatagtcttttattgcgtatggcgaaccggctttgccttttacgatagccggatgatcggggcggatgttatagcgacgataatccgtttgcgttgcatgttcaataatgccggtataccaaatatgggtagcccccagctttttgatttctcctaatgccttggcggtaaaatccgccatcttgccacatccgttttcggtaatactgccgttattgatgcagtggttattgttatttccgaataatcgggtaaacacttgataaataatcagtttttcgtcgctcatttctttttatttagagaatggttatttttattctttccatatagtgcctttttctatttgcaggcgttccagtatatcattagtggcattatatccttgcataaatatctcctctgccttttccagttccctgttgctgtaaccgtccaggttgtaaggctctatcaacaggtcggctttttcccgttcgggaaatgaattggaacggaacatgaagttgtacgaacgtaaggcgacgcttacaatattcattttgtacttaggcgccattaatgggctgacattgattgccacaactttctcgcatacccgccggatggtagatacgggcaggttcatcagcagtccgccgtctacgtagtacgtctcgtctatttttacaggtgcgaatagtacaggcatacagcaggatgcggctacgcgttctgcaatatctcctttatgaaaatgtgcaaggcgcccgtggtccaaatccgtggcggtgataatcagcggtagctgcaattcttccagtttcttcgctttcaggttgcttttcaggaagtctttgaattcgctaagttcaaacaagcccactttgggaattaccagtttcgttaaatcctggaatttatgtccggcaaaataatccagaactttatgaggttcgttaccgtccgcatagaaaacacctgccagtgcacctgcgctgacaccggaaatgatattgggcttgatatcgtgctccaataaggcctgcatggctcctaaatgggcaaaacctttaatgaaaccgccgctcaaggcatagccgatagagtatttattagagaaccaattgttcgttgctccttccatgttgttgaaatctactattttttgttcggtacgaaattagttattttatcgtagtaagaaaggaaaatagcagaaaaatgttcatttattataatatccacggaaatttgaaacacgtttcatcaaacagcgcataatcggccgtaccgtttactgcaaaggttttgatgctgcgtgcctctttcagcagttcgcgtgccaactttatggtagctcctgtttttatacggtcgtccaccagcaagatgctttttcccctgaagttaaaatcgacaggagccagcagttgcggagcatcgtacttaggatgctgatattcgtccctcaaattgatgcgcagcagatgcacttctttttgtaaacgctgattgatgatacctgccggaacgatgccgccattggcaatggctacaatcatatcaaaatcatcgtgaaactcaattgtacggaagcgttccagcacttcttccattgtttttgccataagagtaatgcagtttatatttttatcaactcgtaatccattgttcccaagcctattttttcggcgtgacgcaatccggcaagccagtccgtatcaggatgtatcatgtggaatttgtcgcagccgcacaagtcttcgtgttcgtgctttttggcaagcacattatcgctgtgcagtacgggagcctgaatcaccaggtctgcacacgccttatccagcgctacggggtctgccgatgccagcatgccgaggtcgggaatgatggcggcatcattatggttccagcagtcgcactccggcgatacgttcataatgaaactgatatggaagtgcggtttgtctttcagcacggcaacggaatattcagcaatcttgtagttcagccgttcggacgtatcccagtcgctcactacggcggcgtcatgctggcacaaagctacgcattgtccgcatcccacacatttggtatagtctatttccgctttgcgttcggtattcagatgaatggcatcgtgggcgcagtgttttacgcagatattgcatccgatacaattttcggtggcaactttgggctgtgaagaggcatgcagttccagtttaccgcctacgctggcgcatcccatcccgagatttttcagagcgccgccaaatccagcctgttcatggcctttaaaatggttcatgctgatgattatgtccgcatcggcaatggcagtacctatcttgggagcagggcagtattctccgtctatcggtatttctctgtagtctgtcccttttagtccgtcggcaataatcacctggcattgggcggatataggattgaagccgttctccatggcgctctgcaaatggtctaccgcattggagcgacgtccggaatacaacgtattgcaatccgtcagaaaaggcttggctcctaaactgcgaagcagatttgccatgcgggcagcataattagggcggatatacgccagattgcccggttcgccgaaatgtatcttgatagcggtaaaactgtcttttaaaggaagctgtccgatgcctgcacgtttaagcagacgttccatcttatctaaaagattagaggtgggagaggtacgtaggtctgaaaaatatactttggctttttccatgatagatagctgtgtgttatgattgtttctgcaaaaataatagataatattaaataatggcaggtctatgcaacaaaaaaagcagcggagtggataccgctgcttcaactttgttttcaagaaaaggcaatttgttgtctctatgacaatcagcctaacgggttttcttcttcgccgccgttgccggaaccgccactgccattgttcccgctactgctgctgccgtccgtataatcggtgtctacaggtacagaacgggtaacactcatttcattcagcatgcggttgaatatctttcccggtgtaaacacgatacgttttgaaaggatattgcttgccttaacggcatcttccgtatccgcacttttggttttaattgtaggccggaacaatccgaactcacccatttgtatggtcttgccgtcgtcgatatcttccgccatcatatctaccaaaccgcttaccaccaaatccaccactttgcggtgaatgccgcacaaacgactgaccttttcacacattttgtcgaagttcattttacccgaaccgacagatttcgctacatacttttctgtgttcgtcttgtcaaagccgaatactcttttggttactacatactttaaagccataattgttaaagtttaaaaggttaaaaaaataaggtttactaatgccatttatttttaatgactatgcaaagatacaacgggcgtccgctgccgcagtccccttttaaaccctttagaaatgtttttccaataataaattgctattgtagctgaaaagccgtatggccgtttttttatttcaggtttttccggaagaaatcctccagcttatcaaaaggaatcaggccggtacggtcgtaaaggtccacgtgtcctgcaccgggtacgatgtatagttctttcggttcggcagcacgggcatatgcatcttcgctgaactcacgagagtgtgccgtatcgccagtgataaaaagcagtgcacggggagaaatcgtttcgatgtcattaaaaggatagaagttcatgaacttcacgttgctggtcagtgtagggtgggtggtagtttcgggagatgcacctttcggggtgtattcgccacgttcggtacgatagaaatcataaaattcttgttgtatgggattggatgcatccggacgttcgtgcatcgtgccacctgtgtatttcacttcgcctccctgaaattccacgtagcgctgttcggctgcttcagaaagaatctgtttgcgctgttccggcataagtgcttttttcagtccgttgcgggcggcactccccatgtcgtacatgcttaccgtagcgacagctttcaaacggggatctgtcttggctgcactgacggcaaaacttccgctgccgcaaatgccgatagccccgatacgttcacggtcgacaaaagttcttgttcccagaaaatcaacagcggcgctgaacgtttccgcatacatgtcgggagaaaccgcattacgtacttctccaccgctttctccccaataagtaaggtctatggaaagggttacgaacccccgttccgccattttcgtagcatagaggttagcactttgctctttcaccgcacccattgggtgaacaacgatgatagcgggatattttacatctgctttcatatcttggggaagaaagagcgcagcgccgattttcattttataaagattttggaaagagacggattctgtacgtattgccggactcttatagaagttatcggcatctttttgggcataactctttgtagcattggcgagaaagagaaaaattgcggttaaaatgattgtacgtttcatggtcctgcgcataaatttattgcacgtagtatcggagttttcgttacggtacgtcccggatgataaaatcagaacatttttcatttttaatacggtttgattggattagacattcttttcggatacaaaggtaggaaggtaagaggtagcttccggtagatgaattacggataaaataaactctattacagatttatatgtcggtaatagagtttatatttggcacaaatgcctaaaatggttacatttgtaatgtcctcgttttaataggacggaaataataatatgtggttggatttttatatgttcctaacccttgcgtcaggcattgctttggctgttttgggatggcagttatgcagcattcatattcctcatagggaagatacgcaccgactgcggacggcacgtgccattcttgccgcatcttatttcattcttgctattcctgctttttgcgaactgtttaatggtggagaagccgaccgtaaaatcattgcagtctttacgatagcggtggccgcttaccaatcgttactgtttaccgtcacactgctgacatttattcaaccgctgtatgttacctgccacagagtacggatacaagcaggaatcgtaacggttgcagttgccttatttctgtttatggctttgacaagtgaggaatgctgggtgttttttgttgcattggctgtatatgcagtgcagttagtctgttatacattgttatttcgccgaaagtatgccgagtgccttcgattgttggaagaatattacgatgaagaccagcatgcacggctgcgttggacgaaattcggcttttatgctgcgctctcggttggtatagccgcttctctgtccgtgtggctgccaccggttgcttataatatttttactgtcggttacattttgttttacgggtggtttgccggtcgtttttgtaattatgtggtaaaaatcaattattatctgccggccgtaacgcagggacaggaaccgattcgtctgcaagcggtagatatggctgcctgtggattgtccgaaccggaactggcaacggagaaagagcatctgcggcttgcactcgaacgttgggttgccgaacggcgttttacccgtcctgaagaaggcagggaacaaattgcgcgggaattggggacgacaaaagagtttctttgctggtatttcaagaatgagatagggcgggacttccgtccgtggcgtgtcggcttacgtatcgaatatgccaaacaattgctggccgaagaactcggcatctccatgaacgaccttgcacgcaaggtaggatttgccactaaaagcaatttttacggatattttaaaaagctcacgggtgaaaccccggtcgagtatcagcggcggattgtgtcacaatgctgactttgcaaagtgaataagcatacgctgtaaaaacactaaacgttttttttgagtagtaaagcaggcagtctgtttcgtgtaaaaatgaaacagaccggtctattttgtgccgtagtatcaaatagaccacatgcactcttgtcctcacagttgctataatgtaaatttacagcatcgttagataacgggatatcaataatttatactgtaaagaacctatgaaagtaaaaaaaatgattctgttcctgtcggtggcaatgctgttggcaggatgcgacaaagacaatgctccggtggctgtatcggaagttacgctgtcccggacggcattgacaatgaccgtcggtgatacggaaaaacttacagctaccgtactgccggagcatgccgggtatgacggccttgtatggagcagcaacaacacgtccgttgcattagtcgatgtggaagggcttgtaacggctgtctctgccggaaatgccactattaccgcaactgtgggtggcaaacaggcaacctgcgaaatgacggtagcggatgccgtgccggaaggtttcaccgtcaccacctacgaagctctgctcgaagcactacggacaggcgttgcctcggccgatgtcccgacactcattatgctgggtagtgacattacgataccggcaggcggtgaccacaccagtccacccataaacggcagtggttacttcaagatagacggcggcggccacaccctcacctgggaaggggaagacaacgacaacttccacttcctcggcaatgccgaccccgacgccgatgccgtttatatcgaactcaccaatatcaatctggaccaacaaggtatgaactccgcggtagctgtttacaacggcaggattacgctgggcaaagacgtggcattgaacgggcaatatgataacatgattctggcttacggcgagaaagcggcattggaactgggggacggctgcgaattggcttacacgacagaccgttcgtactgtgtaagcgtctggagtggcgccaccctcgtgctgaacgggggaaagaccgctgccggggcttacataaacctaagctgctattttgacccggccgcctcccattcccttatctccgttccaaaagccctcacgggtgatgtgcaactccttctcgctacgaccggtgtaacctccatagcccaaggtgccggcggttaccaactgacgcaggcggactgcgaccatctgaaagtgaatccggagtcaatggtcagcctctatggagagccgcttcagaagtacgacgacaacttcgagctttacctcgacccggcggcggaacatcaaatcgagctgcgcctgaaaaatttcacaccacccgcttccggtaatatcgacatgacctccatgactgccgatgaagcacagacaaccattcttgccgccctcgccacaggcttcaccgaactcaagctgacgggcgaactttccaagataggaatgggcggtaattggggtacatttatcaataataaaaaaatcacgaaatgcgacctcaccggagtgacgggctggggtagaacgccaacactgcccgaactcgcctttatgaattgcactgccttgcaggaggtgacgctgcccgatgacgtgcgggtaatcggaagtagtgcttttttcggttgcgctgcgctgactacggtgaatctttcgcaggttacctggattaatctaaacgcattttatgaatgtacttcattggagatgcttattttggataatgtgacagagataggtcgggaggttttctacggatgcacaagtctcaaaacgctcaaaataccgaagtgtacccggttcggcaattatattgtaacgggctgtaaagctctcacccggatagaagccacggcaaccggggatttcttggatataattgggaatagcagtatagagaactacgccgtttttcacaacagagatactcattccggagagaacgcattcgctcccgccaggtgcgaccttgtgctgaacaccgacaagcaagaggacggtactgccgtcccaaaagtttccggcaataacagatggactttggcggccaatgccagtcctatgatgtggaaaaacattactttccggcaatagaagatttagctatcaattttatcatattatttcttaaattgaatttatttatttaggcacaatctcatgtagataaagaattcaaacaaagcattgctatgcagaaaagtaaaacgattatacagtcaatacactcctataaacgaatgtattttgaattttactacaatttttgaaaatttattaataaattgtttcataatttattaataggcgttttaagactataaatgagattatggaaatataagtacaaaaaaaacggcaaatcactgtgtgaaatgccgtttttttatgtcgttttaggagcttaatcggggtatgggtcacccaaattctcgaatataagcatttgctgcttcggcgaaagccagcggtgattgtaaggaagatagccggtttctgccaacaatgttgccaattttgtacatcttttgatgctgcgttgcagacatcgcactgcatttttgggagtagcgcaaccggggaaatacatttgcgccaattcagaaaaggaagaagtagattttgccatttgctaagttttaggttgtagatactaattgaaaagtgcgccaatattccagtt

SEQ ID NO: 4123 - DNA, 7075 bp, Unknown
  gut microbiota DNA sequence
cgataaggaagccgcggaagcctgcagcgcgcagccggcaaatggtttcgggatgtgaaattccgctttccgaaacaagtagcggcaggctttggctgtcggaagaatccagggctgtggccggtatctgccggagtttttcggttatatggaaagagtttttcacatcggtgacgaatgtgccgagattacggttgttgacgcctaccatatccacatccgcgtttacataagcgagttcggaaaaagtgtggatttcgagtaacacttccaatcccagggcatgtgcccgggcagtgagggtggcacattcttcttgtgtcaggcaagcggcgataagcaatactgcatcagctcctacgatacgtgcctggagcagttggtattcgtcgatgatgaaatcctttcgcaagataggaatgccgatcagtgggcgtgccatgcgtatatcctgcagcgaaccgccaaagaatttttcgtccgtaaggatagagactgcggaagcaccggctgtttcgtatgcagcgggtatttcttcggcacgggcagtctcgtgtatccatcctttcgaaggagaacggcgtttgaattcggcaatgattcccgtgggggaagaagcaagcgcctgtttcatgctgcggacaggtatggcgacggaagttccggcagtggcgtctttctgcatcatggcggcaacctcttcttgcaacctttcgagggagacggcttgcttttgcagttctatttcaattcgtttatgagcgatgatttccgataaaatatctttcatggctgttttagtgaagagttacgggatatgcggctataaataccttttcgcacctcatcccttactggttaatttctataaactttttcaatgttttcagcgcccgtccgctttccagcgattcgcgggctatggcaatacactcttcaatctccttttccggttccatgacctgaatggcaaaggcggcattgacaatgacacattgagtttgggcggcttctgcgcggttgttcaggatattgtcgaagatacgtgccgcatcttccttgcaggctccgccggaaagttcttcgggacgtactgcgctgaaaccgagagcttgtgggcgatagatgcgttcataatgacgtgtcatcactttgaattcatcggtcagtgagatttcatcgtaattgtccagactgttgactacggcaaagtcgatgccgagtctgtagaaaacgttcgtatagagacgcatttgtgcgaggtcggctacgcccaatagctgataggcgggctgacacgggtttaccagcggtcccagcaagttgaacagtgtgcgtactcccaaggctttgcggacaggacctacgaatttcatggctggattgaacagttgggcgtgcaggtaggctatgttacactcttccatgcttcgcttcaatatgtcgggattgttggtgaagcgcacgccatgctgttctattacgttgcttgctccactgacggaagtagcgccgtagttgccatgtttggctactttataacctgctcccgccacaacgaaactggcgcaggtggagatgttgaaggtgttcttcccgtcaccgcctgtacctacgatatcaatggggcggtaaggcgcaaagtctatcggaattcgtgtctccataagtgcttcgcgaaagcctgccagctcgtctactgtgatgctgcgcatctgaaaaaccgtgagcagtgcggcaatctgtgcttcgggatacatctcccggctgatgttaagcaggatttgtttgctttcttctacagtgagttcttcatggttgaagagccgggttaatattgttttcatctgattaagtttgtggtttaaaaataggttattcttccagccagttcttcataatctgcttcccgtccggggtaagcacggattccggatgaaactgtatgcctcggacatcatattcccgatgtttcaacgccataatctgcccttcgggactgacagctgtaacggcaagcgtttcgggcagtttttcagtatctactacccaggagtgatagcgtcctacggctatttcttcgggtaatccccggaaaatgtaatccggttctgtcagccgtataatggtctgtacaccatgaaacactgtgctgaggttgactaacttcccaccgaatgcctgtccgatggcttgttctcccaggcatacgcccagtattggtttcttgcctgcgtaggtgcgtattacatccagcagtaatcctgcttcttcgggcacaccgggacccggtgaaaggatgattttatcatattgttccaattcttctatgctgaattggtcattgcgcagtacatctaccgctacaccgagttctttcaccaagtgcgcaaggttataggtgaaggagtcataattgtctatgattactaccattgttattaactgtttgattaatttacttttgatactcttgttgatttatacaattagccgattttctgttttacagggaattttccgccatggtaattgccttcttcaatgctcccagtttgttgttcacctcttgcagctcgtattcggcattacttttggctacaatgccgccgcctgcctgaaaccataacatcccgttgcggctgacgaatgtacggatggtaatagcctggttcaggctgccgttcaggccgatgaatccgatacagccaccgtatgcgccacggttatgcggctccagttcgctgataagctgcatggcgcgaactttcggtgcgccgctcaaggttccggccgggaaggtatcgataaatgtcctgatagagtctgtatcactgttcagcgtaccgctgacgcggctcacgaggtgaatgacgtgactgtaatattgcatctctttgtaaaagtccacttttacgtcatggcagttgcggctgaggtcattgcgggcaaggtctaccagcatcacgtgctctgcattttccttgggatcgtcttgcaggtaccgggcatttgcagcatcctgttccggatttccggtacgtttggcagtgccggcgatgggatctatataggcatggcggccttcaatgcggcagtgcgtttcgggagaagaaccgaagatacggaagccgccgaaatcaaagtaaaacagatatggagatgggttgatgctgcgcaaagcacggtaaagcttgaagtcgtcgcctacgaaacgttgttcgaaacggcgggagaggactatttggaaaacatctccccgcatgcagtgggctattcctcggcggatattggctttgtgttcctcatcggtcagtgaagaagtggtttcgccaacagcacggaagtcataggctgtgtagttgcggttgtgaatggctttctgcaccttgtccagttcgctcttctcatcgggagcgagcatttccagtaacagcatttcatttttgaagtcattaaagacgataagatacttatataatatgtatagtatatccggtgcatcgttggtggcttcgcgactgtcttttacggcgatgttctcaaaatagcgtacagcattgaaagatgtgtaaccgtacagaccgcaatagtcgctgtattctccttccacgtgaaagcggttgaggaaatcgcgtaacgcattttccgcatggtattcttcggtaacgggatgttcctcacgtgtgccgtcgggcagacagaatacggcaacagcgtggtctatactgacgcttgctaccggacaaagtccgatgaatgagcggttgttttcgctgccatgatagtcggaactctccatgagtgcgctttgaggaaaaatgtcgcgcaccttcagatacgtgcttacgggtgtatgtaagtcgccgagcatcgtgcggctcactgtctgataatcatacttcatattttgtattttattctttatacatcaaatacgtttctacatccttatccccccgtcccgaaacggtcagtactaccacatcatcggttttgaagttcagcttcttcaatgcaccgagggcgtgggcgctttccaatgcggggatgatgccttcgagcttagtcagttcgtaggcggcgcggatggcctcgtcgtcatttacggagagaacgatggcgcgcttttgtgcggcaaggttggcatgcatggggccgatgcccggataatccagtccggcggagatggagtaaggctcttcaatctgcccatcctcgttttggataacgtaggtgcgtgctccatggataatgcccaatttgcctaaggcaatggtagcggcagtcattcctgtttctatccctttgcctccggcttcggcaaggacaatctgtacctggcggtcgtccacatagtggtaaatggttccggcagcattgcttccaccgcctatgcaggctatgagatagtccggagactcgcgtccttctttttccatgagctgttttttgatttcctcgctgataacagattgcaggcgtgccaccatatcggggtaggggtgcggacctacggtggagccgatgatgtagtaggtgtcggcggggtggcagcaccagtcgcgtatggcttcgttggtggcatcctttaaggtcatgtttccgctggtcacgggcactacggttgcacccagcatcttcatcttctctacgttgacgtgctggcgttccacatcggtcttgcccatatatacaatgcactccatattcatcaatgcacatacggtggcggtggcaacgccgtgctgtccggcacctgtttcggctatgatgcggcgtttgcccatacggcgtgccagcagaatctgcccgatggtattgttgattttgtgtgcgccggtatgattcaggtcttcccgtttcaggtaaatccggcaaccgtacttttccgacagacgccgtgcctggtagagcggtgagggacgtcctacgtagtcgcgcagcaaccggtcgtattcctgcttgaaatctttactttgcaggactgcgagataggttttctgcaattcctctacacacctgtggagtatttcgggaacgtatgctccgccgaattctccgtaataaccatctttgtcaactaagaaactaaccatatattgttttattatttaattgttggctgccagttaccggttgcgaactgttagctatatacatcgtttaaataaaagagccccgtcgcttggtgcgacagggctctttttatatctatattgtacatatatacatacgagcactgctcccttacgactgccggagttgtaacggatgccaccaccaatatgtatttacgaacattgttttcattatcttttttatttttgaccgaggcaaatataagcacattgttttaataatcaaagcaaatctttcttttttttcttatgagaacttttttcttaaagttttgttgtttatggcggatactattatttactataaaaaaagaaaggaacggactatgaaacggaaacatctgattactataggtgtgattattgccattgttttattattgtattggctttttatagccgaagacttgaatgcctggctcaatgtaaattgatttttcagtattatcatgcgaggttgttcggataaataatgtatcttcgcaaaaaatcaaaaactcatgaaaggattaagttattcgtttttgcgcgctgtgtgtgcgctggtaatcggtttggtgctggtgatgtttcccaatcaggccggtgattattttgtgataacgattggcgtcattttccttgtgccttcgcttattagtattataggatattatgctcaaaatgcagaagtgcgccgccgtttccctatcgaggggataggaagtctgttatttggactatggctggttattatgccgggcttttttgccgatttgctgacgttcgtgctgggctttatcctcgtgatgggtggtgtgcagcagatagcctcgctgtcggctgcccgcagatggacgcctgtgccgggcggattctacgttgttccggtggctatattgctggccgggctggttgcgctgttcaatcctacgggcgtgcgttctacggcgtttatcattatcggaatcaccagtctggtctatgcggtttcggaattgataaactggttcaaatttacccgtcttcgtcctaaagcacctgttaccggcagcaagagtgatgatgacatcgaagatgcaaagataatagaatgatgtatatgttttagacaatatactctctgttacataaaacgcagcaaagcatctattccctgatgaaagatgctttgttgcgttttgtatgacaataccgggtagcttgtcactctgaaatgtttttagaaattttccgtaagtattcctctatttcttgagctgtaacatctttcaacaatacagttttatttttattcaatagatataaggtcgggatagcttttaagtcgtaaaggctttttagttcgattgcttgttctttgtcgtaagcattaatccattctgcaggaaaatcggagaggtgtctccgccattcttctaaatcaatatcggggtaaatggaaaggactttcatctggttctgtacgatagcttggcagatggaagggctttgtttcaatgtttctatcgtttcgctacaggcatgacagccgggattattgatgaataatagggtatagggagcctttatgctatacaaattgccttgtctgccattggcaagcgtatagacaaagtccaatgctttagttcctattctatttttttgtgccagctcgcgtcgggctttgggacgtattttttctgtattatccataacaggagattgcaacatggcatctaaaacagatatgtatagttcttcattacgcatcggtgagttgggatcgtacaggtacttgtctgcaagagaagtcagatatgtatagcactttttctctttttcagcttgtgtaaataaagttttcaaagcaatatccctcgtttgagcaggtaccagttgtaatatatcaataaaattcacccaagcctgctccgtcacttcggggtgatgtatgtagttggtatcggcaa

SEQ ID NO: 4124 - DNA, 18730 bp, Unknown
  gut microbiota DNA sequence
tccactacttctaagaaagggcaagaaaatgaagcagacagcatcctattacaagaagagttgtatccagacagtatttttaaatctaaaccgattccaacggaagaagaacaagaacaatcatcggaaacaacctcctttgtcctgcaacctgttccgcgtgatattcctacgggagaagccgtcagccctacttcactttccatgcagacagaatacgattattatccactgtcaactacagaagtgaaactaaccgttaccaattattcccaacaagagtatatgtgtggaaacgattacagccttacctattacaataatgataaacgacaatgggaaacattgccaaccgacccgattattgaagatatagcttggatattagaccctgaatatccttcaggagaacagacaatcaagctttatacttccaaagttcctaatcgtgctggcaaatatcgtatctacaaaactttcaacagaaacgcccaagttgcttatgcagagtttgaattagttgatgaagccggagccaaacggctgagaaaacagatggatgccgcctcttggaatggcaagacaatttcatcacagaatatttatggctctggtatgcgcggtgattcaatctttgtggatctgattaataattccattcattttcaaaaattattcagaaaggagatgcttaactattctgccattaactatggagcagtacgcaaaccttccccctttacacaaagagcatataccgacacactgcaaataagcatgaaaaccgagaagcctgtttacccgattggaacagaaagtgtaaatgtaatactaaccaacaagaacttgagccaacaaaatttattctttggcgaatattattttgtagcacgcaaacagggagaacaatggataccattacatgacaacagtttggtgcacgacattggcattatattgaaacctgacggtgattaccatttcaaagccaaactctatccattgttcaatgacaatacttccggtcaatatcgggtttacaaggaagtggaatttaacggtataaataagaagtggtatatggcagcagaattcaagattgaataaaaataatagcataaaaccattactgtttttcagacagattaatatccttacaagtatctgtcacgcctatatacctgttataagaaaacaaaagccatacacaataacagataaaacgaagtataacctattagttctcagcatgaaacttttagtttcgctaaaggaaacaaaaaatcccaactggcaaaacatctattttcctttcactatctttatattaagtatagaatgcggctcagcacagtcaagtttgaaaactgtgttttcacttgcctctgctctcgcctttcactatctttgccgcatgaaaacggaattaaaggaaaacggagggctcccggcacatatactctggacgcttgctatcgtggcaggtgtctctgtagccaatctgtactataaccaacccttgctgaacgtaatacgccacgagttgggcgtgtccgagttcaaaaccaaccttatcgccatgataacgcaagtgggctatgctatcggtttgctgttcatcgtgccattgggcgacctctaccggcggaaaaagattatcctgacaaactttaccttgttgatattctcgctcatcgccataggtgcggcccccgacatctacatcatatggggagcttcgctcatcaccggaatctgctccatgataccgcagatcttcgtgccgatagcttcccagttttcccgtccggagaataaaggacgcaacgtaggcatcgtcatatccggtctgctcaccggcatactcgcctcgcgcgtcgtcagcgggtttgtcggcgaagtgctgggttggcgcgaaatgtacttcattgcggcaggcatgatgatgctgtgcgccattgccgtgctgaaaatactgccggacatacagcctacattccagggaaagtacggcgatttgatgaaatccctgttctcccttatcaaagactatccgtctttgcgcatctactccatacgcgcaggcattgcattcggctctttcctcgcgatgtggtcgtgcctcgcattcaaaatgggacaagccccgttctatgccgacagtgatgttatcggcattttgggactgtgcggaatagcaggtgcatctaccgcatccctcgtagggaaatatgtgaaaaaagtaggaatacgcaacttcaacttcatcggttgcggtctgattctactggcatgggcatcgctctacttctgcggcaacacctataccggcatcatcgccggcgtgctactgatagatatcggcatgcagtgcatccagctcagtaaccaaacgagcattttcgatatatgcccttcggcatccaaccgggtaaacactattttcatgacaacctatttcaccggcggttcattggggaccttcctcgccggcagttgctggcagatctggggctgggcaggagtagcaggcataggcacggtgctgaccctgctgtctcttctgattaccatctgccacaaagagcaacagcatgccctattcccttgatattttttcatggaaaacacaaaaagaaatttcaaattgctttgattttctccataattattatatatttgtcgaatacagatttaattaataaacatttatctaaaatcatctaattatggaaacacacaagaaaatcacagtgacaggggttctttccgaaggtatcggcttaggcattaaaaatgcagtatccatgttgggagctactgttctctggctgctcaccatttggattccttacctgaatgtaggcacaaccatcgctatgaacaccattcccattgaattgagcaaaggaaaggttatttcccccttattcatcttcgacgggaaataccgtaagtacatgggggaatatttcaccttgataggtttgatgtaccttgccattattcccgccttgtttttcatgattataccggggatcatcatatccataggctggtcgctcgcaatttacatcttactcgataaaggcgtggctccgggcgaagccatgattcgaagcaacaaagccacttacggttacaaatggactatcttcggcgtatcattcctgttgggactggctttctatgtccttatgatgattatcttcaacatagcaagcggcggatttgcaatgctccttctcttcatcatcgccattgtatacactgtggcagcacttggatgtaccgctgtcatttaccgcaacctgacggcagaagcacagccggaagcaacggaaactgcggcagaagtataaacagctattgaaaaacacacccaaaagcccctttcgcttttaagagggtatgtcaaaactaaaattcgcttacgattttttaggcacggaattacacagaattcacggaaacacaaattacacggaaaacacagattttctttattcttttttcgtgaaatccgtgtaattccgtacctaaaagaaatcattaaatgtattttgacaccctcatacggaacagcgaaaggggctattgtctgtcgatatttcctcttcttatctcgatacccgtcccgatgtatttccattcatcaggctttccacctcatccaccgtcaccagattgaagtctccataaacggtattttttaatgcggaagcggcaagagcaaaatccaatgccttccggtcatcatccggataagtgatcagaccgtatatcataccacccacaaaagcatcaccagcgcctacacggtctgtttcatgttcaatatcataaatgcctgtatgcttcaaagtgccatcggaataaagaacagcagcaagcacgttatgattggatgttatggaattacgcaattccagaaacactttttgacaacgcgggacaagtcgctccacctcttgtccgaacttctcgaaagatggcaaatcagactcaaaagaaacatcggcggtatcaacagctctaaatcctacgggctgtatgccgagaatctcctgatactcaggttctgcgccgaaaatgacatcgctgtactgcaccaacggctgcatcacttcggcagcagtacaaccgtagttccaaagtttcttgcggaaattcaaatcacacgagatggtaagccccatacggtcggctatttcaagcgcttcccggcaagcgtcggctccctcttgcgaaagggcggcagcaatgcccgaccaatgaaaccagcctgcatcggcaaaaatggtttcccaatcgatcatacccggacgaagcgtggcgaaagaagaaccctcgcggtcgtacaccacattggagtttcggaaagctgcgccgcattccagataatacaatcccaaacgtttaccgccaaatacaataccgtccgtccccagcccattggcacgaagcgaattgatacatgcacgcgacacggcattatcgggcagacgggtaacaaattccgtaggaatgccgaagtgcgccaaagacactgccacattagcctcactgccaccatatgtagcaataaattcattagtctgcgaaaagcggcggaaaccgggcgtagtaagccgtagcataacttcaccgaaagtaacgactttcttatcggtggaaagggatttctttttcataagtcttatatattcaaaagcatcaatgggaagtcaaatatactatcaaaattccaagtaaacgcaaagaattgataatatttattggcagaaatggaaaatagaaaggtattaggcagttttgttgtatttttgtcacgtcatatttacagtaagattatcgcatgagtacaacaaagaaaattccttcccctcttgtatcctttctccccatcgtcctcttaataggaatgctgtttgccaccatccgcactttcggcagtgacgctttgagcggcggaagccagatatccctgctcaccaccacagccgtttgcgtctttataggcgtagctttctacctgattccctggagagattacgaaatagccattaccaacaatgtggcgggagtgacttccgccattatcatactgctgattatcggtgcgctgagcggcgcatggatgattagcggagtagtccctactctcatatactacggaatgcagattatacatccggactttttcctcacctctacctgcgttatctgcgcattggtgtccatcatgacgggaagttcgtggaccaccatcgccactatcggcatcgccctcctgggaataggcaagacgcaagggtttgaagagggctggattgcaggtgccattatttcgggagcgtatttcggcgataaagtatcgccgctgtcggatacaacggtacttgccgcatccgtcacggacactccgctgttccgccatatccgctacatgatgattaccaccattccgtcgctcgtcattacgctggttatctttacggtaatgggatttgcctgcgaaaccagcggtacagagcagatagccgagtttaccgcatcgctgaatgccagattccacattacaccgtggctgctgattgttccggtggttacgggaatattgattgcacgcaaagtaccctctatcatcaccctgtttctatccacacttctggctgcaactttcgctattatatttcagcccgaactgctgcacgagatttccggaaacaatgatttgtttgaagggacaatgatgagcctgtacggcagtaccagcctgcaaagtgacagtgccatgctgactgagctgattgccacacggggcatggcaggaatgatgaacacgatatggctcattatctgcgccatgtgtttcggtggagcaatgacggcaagcggtatgctgggaagcatcacttccgtattcgtccggttcatgaagaatacggtcagtgtggtagcatccaccgtcggttcgggaatatttctcaatcttgccacagccgaccaatacatcagcatcatccttaccggaaacatgttcagcaacatttacgagaagaaaggatacgaaagccgcctactgagccgcaccacggaagatgccgttaccgtaacctctgccctcatcccgtggaacacgtgcggaatgactcaggccaccattctgagcgtacccacactaacctatcttccttattgtttctttaacctcatcagcccgctgatgagcatactcgttgcggcaatcggatataagatagtgagaaggaaataacttcatagccccgccgccaactccttaaatctcataaaattaaaaaagagagtgaacaatcgcggatgggcattgttcttgcaataaacttataacgaacaatataatttaaacctaaacaaaaattaagtatgaaaaagtttattgcattagcagcattagtattgacgagcatggtgacaaccaccgtgtatgcacaagagagtaacgcacaacgccgtgcagaccgcaaagcccaaagagacgcagagcgcgcacgcctgaaagcggaacagcaggcagccgacgcggtctcctacgatgatgccgtagcagcgctgaaagcacagaagtttgtattggaagccaatcaggtaatgttccgcaacgggcagacggctttcgtcacttccaacacaaacttcgtattggtaaatcaggcacgcggtacggtacaggtggctttcaacacggtttatcccggtcctaacggtatcggcggcgtaacagtggacgggacggtatcggacatgaaaatgtctaccgacaaacgcggcaacatcaactgcaatttcagcatccagggtatcggcatctccgcacagatattccttacgctgaccaacggcggtaataatgcaaccgttaccatcagcccgaacttcaactccaatactatgactttaagtggcagcctgctgccgttgaaccaatcgaatatctttaagggacgttcctggtaggcctattacaatatatatatttccaactccgctgcaagtcgcttaaaaagtgtacatttgcagcggagttttatatattatattcatcatgagagaatttatcatcgcggacaatcaagatataaccaaagcaggcatgatgtttctgttgagcaaacagaaagacaccgccttgctgctggaagccgacaataaagcggagcttatacaacagctacggttacatcccgaagcggtggttatattggactatacactgtttgactttaccggcgccgatgaactgattgtattgcacgaacgcttcaaaacagcggactggttactgttttccgacgaactgagcgtcggctttctgcgacaagtattgttcagcagcatggcattcggagtagtgctgaaggacaattccaaagaagagatactcacagcactgcaatgcgctttacgtaaggaacgctttatatgtaatcacgtcagcaacttattactctcgggaaataaccagtcggctgctccccaccccactctgcaaaacgctctgctgacgcctgccgaaagaagtattctgaaagagattgcattaggaaaaacgaccaaagaaatagcagccgaaagaaacctcagtttccataccgtgaacagccaccggaaaaatatcttcagaaaactgaatgtgaacaatgcccacgaagctacgaaatatgctatgaaagcgggtattgtggatttggtggagtactatatctgatttccccgcttccgatgcaaagcttggcagcctcatcatatacaacgccaaactgaccgggagctatgccctgcaacttctcatctgaaacaatacgatagcctgtttcgtcctgccacagcctgccgccgataaatccgggagcatggcgtatcttgaacgtaaccggaatctcatctttaatgccttcccacggattttccgtaataaaatgaaaatcctgcatactgaactcatgtccgtattgcagttccgtatcatatccgtgcgacacataaattacattctcgtccgtatctttacgaaccacaaaccaaggtccgccactcaagcccaagcctttacgctgaccgatagtatgaaaccaataaccgcgatgcgtacccagtatctttcccgtttccaactcaacaatccggccttccttttctccgaggaaacgacggacaaagtcattataattaatccgtcccaagaaacagattccttgactgtctcgtcttcgggcactgggcaactgagctttcaaagcaatatcgcgcacttcctgtttcatcagtccgcccaacgggaacatcagtttggacacttgcaggtagtctatctgcgcaagaaagtccgtctggtcttttacggggtcgagggctgttcccagccaggtctttccattctgcagaacggtagtagcataatgtccggttgccgtaaagtcgaagtgcctgccgacctgctgttcaaagcaaccgaatttaatcagcttgttgcacatcacatccggattcggagtgaacccgcggctaactttttcaatagcataagcggctacattatcccagtactcccgatgtaaatcgacaacttccagcgaaagaccgtaacggcgcgctacggcagaagccatctccaggtcttcctctgccgaacagtccatatactcggcatcatcctttcctatctttatataaaacagagagggacggtgaccttgctcacaaaggagatgtacgacaaccgaactgtcaacacccccggataataaaacggcaatattcatattaataatgtatctaacatttcatccgacgaacaaatggtttcatcggatgaaatgctcttttgttccggacttaaattttctccaacgcttgggacaaatcatccaacaagtcatctatatgctccgtccctactgaaaggcgtaccgttcccggcttgatgccctgctctgccaattcctgttcattcaattgcgaatgggtggtagtagcgggatgtatgacaagcgactttacatctgccacatttgccaataatgagaatatctgcaagttgtcaataaatgtctgagcttccttctctccaccccttacctcaaaggtaaagatggaacctgctcctttcgggaaatacttccggtataacgcatggttcggatgatttggtaaagacgggtggttcacagccgccactttaggatgattcttcaaaaactccaccactctcagcgcattctccacatggcgttccacacgcaaagagagtgtttccaaaccctgcaaaagaacaaaggcattgaaaggactgatggcagctccggtatcgcgcaacaaaacggcacggatacggacagcatatgcagccgcacctgccgcatcggtaaagcgcacgccatgatagctcggatcgggttcggtcagttgcggaaatttaccggaagccacccaatcgaacttgccgccatctacaataacaccgcctaaagaagtaccatgcccgccaataaattttgtggcggaatgtatcacaatatcagcaccatgttcgatagggcgaatcagataaggagtaccgaaggtgttgtcgataatcaaagggattttatgacgatgagcgatttcggcaacagcaccaatatcaataacattggagttaggatttcccaatgtctcgataaacacggcctttgtattctcctgaatagctttctcgaagttggataaatcgctcggatcaacaaaggtggtcgtgacaccgtaagccggtaatgtatgcgccagtagattgtatgttccgccataaatggttttggcggctacgatgtggtcacctgcacgcgtaatattctcgaaagcataggtcacagccgctgcaccggaagcaaccgccagccctgcaacaccgccttcaagggcggcaacacgttgctcgaatactccttgtgtgggattcgtcagtctgccgtagatgttccccggctcttgcaacgcaaagcgggcggctgcatgtgccgagttgcggaatacatacgaagtagtctgataaataggtacggcacgcgcatctgtagcggggtcgggctgttcttgtcctgcatgaagttgcagtgtctcaaaatgtaaattctttgtgtccattgtcagttgtatttatgagaggatagaagcctgtttccaatcctccccgatttatactcggatgttgcaaagatagagagataaaaccaagcaagctatgacatacaatagggaattttataccatatttgtggtagatacaagaagtattcgctatttttgcggacgaaaaccaaatgatatagagactgatgaagataaggaagctgttatattttcccttactgggactccttgcactgacaagcctgttttcctgcagagaagaccgttggaaagaatactatccgctgacagggcgcgacctgtggatggacagcctgatgcgggaagtctacttatggtacgaggatattccggctgccaacagtctgaactattttcaggctccggacgctttcttaaaaagtatcttatcaaaaaacgataaaggtttttccaccgtcgattcaataatggatacgccgttaccaagttatggttttgactacacattatataaagtggctaccagcgacacaacctatactgccctcgtatcatacgtggcaaagaactctcccgccaaggatgccggactggaacgcggcaactggataatgcttgtcgacggcgactccatcaccaaaaagacggaagaaaggcttatagatggcggtgcacgaacattgcgcatcggaaagtatgtgatagtaaaagaggagaacaacggcggcacagagggggatacggaaaacggagagaacgaagaagaagataaagaggtaggaatcatacaggaaacaggagatgttgcactcccggcagtccgtccggtaacggagagcgccatctatgacacaaattttatacaactggaaggcactgattacaagatagcctatctggcatacaactctttcactgccggcactgcggaacagagtgagaagtacaacaatgagttacgtgctttctcccaagaatgcaagcaacgcggcattaataatcttgtactcgacttccgctataattccggtggagaaatggaatgcgtgcaacttctcgcagatatccttgtacctgccgataaattggaaagcccttttgctttcttgcaatataatgataagcaaagcgcccaaaaccgtgacctgatattggactcccaactcttgcaaggcggagtcaatctgaatctgcccatcgtttatatcatcacaagcggaaccactgccggtgcagcggaaatgcttattaactgcctgaaaccctatatgaaggtagtactcatcggacagacaaccaaaggagaatacgtggctacggaaactttcatcaatcccaaatacccctgggcggtacgtccggtcgtatgcgaagtattcaactccaacggagaagcggactatagcgcaggctttaagccggatatcgctatcaacgaaacatcctacctgcaatactatctgcccttaggcgagcctgacgaaattttgctccatacagccctgcaagtcatagctggaattgtcgaattgccgaccccaaaaacaggcactgccatagtccggagtttcaccactcaaaagaacctgcgcaaggggttgattgtcaaatagcagaaacaatgaattaaacaacggaaataatgagaaaaatagtctttgcattgtcggttgtactcacagtaatgacagcttgtgaagacaataatgactctaccatcaacggaaaccgctctgccgtacccttttcccaaattcaactatcggaaaaaagtgcctatgaagcgggagtacctacagtaaccaccactcaaacctactcatacagtcagggacaattgaccggattcactatcgtacaaagttattcggttcaaggcgaacctatgtgcattgaaaacgcagcatcagtaacttatagtgaacatcaggctgtagtaacggataatttcggcaatgtgtcagtctataccctggacgacaaaggatacgccacctcatgtacacgacaggaaaacggtacggtccgcacctatactttctcgtatttcaccgctccggaaggtaaatattacctgaaaaacataaccgaaagcatcaatgacggcgtatacgcatccatcgacatagactacggcaactatcaggcattgcgcatcctacaaaagacagatacttacgaacaggcatatacggctaccaccccggcaaatgacggaataaataatcagtcaggagttccttgcctgtttcttgccgaattatatccgctttcgctacatacagccgctctatacgggaaattcctgggagagccgtttcctattttaatagaccggattatccccgatggaaataaagaggtcaccaattatatcttctcttttgacaaacgcaatctcatgacttcctgcaaagaggtcataaacagttacggcacggattatacccgtaccgtaagctatgtgattgagtaatcatctgctaaagaatttgcagaaaaacagaatgtgataatctatggaattattccaatacgtaccggtatgaccgccgggacgtgttataaaatcgtggtctatcttgcactccagcaaccttttgtgcagattcctgttcacatcaaggaagaaatcgctttcaccgcaatcgacaatcagagccaaatcaccgttcttcagtttatcaacctgattgattaccgtatgactatcccataccgcttcattggcggcaagctcgcccaactgcttcttcatttcccagttatcaggaaacggacggatatccactccgccactcatacttcccgccgcaccgaatatgtcgctgtggcggatggcattccacaacgcaccgtgtccacccatactcaaaccgctgatggcacgcgcactcttcttgggaatcgtagcataatgctcatccgtatacttcaccagttccgaagagatgaaagtttcataacgataagcggaattccggggactgtcccaataccaactgttcttaccatcgggacatgcgaatattacgcctttttcatcggcaatccgaggcagctccggcttgacacccatccacgtacgtgcgttgcctccataaccgtgcaacagatagattaccggacaagcttgcggatttccggcaacggccttatccggaaggatataaaccacctttacctccctgttcatcgaaggactttttacaaacacagtgtctacacgtgcggcatgtacacttaaagccagcacttgcaataagaatacgaacagataaagtttgtttttcatgctattttgtttaatcttcttaaggaacggcaatattaataataaatatccaaaaaacattatctttgtacacaaacaatttgtaatccaaacatggaatttatcattattctatttctacttatcctgaatggcatctttgccatgtacgaaattgcattagtatcttcaagtaaagcacgcttagagactcttgtaagtaaaggaaacaaaagtgcaaaaggggttttgaaacaactggaagagcccgaaaaatttctatctaccattcaaatcggcattacgctgattggtatcatatcaggtgcatatggcggcgtagccatagccgatgatgtaactccgctatttgccatgattcccggcctggaattgtatgccaaagacctggcaatggttactacagtagccgttatcacctatttgtcgctcattatcggagagctggttccaaaatcaatggcactgaacaatccggaacgctatgccaccctgctcagtccttttatgattatcctgacaaaagtatcctatccgtttgtctgcctcctcagtgcttcaaccaaactgacaaacaagcttatcggcatgaaagacggggaagaacggcagatgacacaggaagaactgaaaatgattttgcatcaaagttccgagcagggcgttatcgacaaagaagagactgaaatgctgcgtgatgttttccgcttctcggacaaacgtgccaacgacctgatgacgcaccgccgcgatgtaatcgtattgcacccctccgacacgcaagaagaagtgcttcggattatccaggaagagcacttcagcaaatatctgttggtggaaaacggcaaggacgaaatcataggtgttgtttctgtaaaagatattatcttgatgttgggtggtgagcaaccgttcaatcttcgcacaattgcacgtccgcccttgtttattcccgaaagtttgtatgccaaaaaggttttagagctatttaagaagaacaaaaacaagttcggagttgttgtagacgagtatggcaatacagaaggcattatcactctgcacgatttgacggaaagtatcttcggtgatattctggaagagaacgaaacggaagaagaggaaatagtgaccagagccgacggttccatgctggtagaagcttcgatgaatatagatgactttatggaagcaatggggatattgaattatgatgacctgaaggaagaggactttaccactttaagcggactcgccatgttccttataggacgcatcccgaaagccggtgacattttcagctacagaaacctggagtttgaaataatggatatggaccgcggcagagtagacaaactgctcgttattaaacggaatgatgaagaataacgccaccggcgtctctttatattaatttaaaccattaaagcaatgaaaaaagtaatgatgattgcagcgattgccgctgcattggtatcctgccaatcaaaaggaaatcaaaacaacaacaccatggacgaaggcgtaatgactgttgccggcaacgattcttccgctgtagccgtttatgaaggcatacttccagctgccgatggtccgggtatccagtatgtgctgagtgtagacagtgtaggtcctaacggtgaaagcggttatacattggtcacaacttatctggatgcggaaggacagggaaaaaacacctccttcacctccaaaggaaaacgtcaggttattcagaaagacgtcaacaataataagaaaaccgcctataagctgactcccgacaacggtgactctcccgtgtatttcgtggttgtaaacgatactacattaagactggtaaacgatagcctgcaagaggctgtaagcgatttgaattatgatatcgtacaggtaaagtaaaacagttgccactgaatataacaaaggaagttaacttcatgccacgcatgatattaacttcctttctttatgatataaacttattacggttatcttcttaactcattatatcaaccaagctaacagaatactccgcaactattttccaacttatttcttcggagaagagtatcttgcattcagaccgtccaaaatttcacgggtaatgttataaatgctgtcggcatacaacagattgtcaaaaccggtattgctgataatcatactgtaacccttagtcttgttatactccttcaggaaagcattgatagaatcacgcaactgcaagctgttcttttcgttctcgctcatcagttcagcctgcaacttattacctaagttctgcaaatcctgttccaatttggcaatacggttatactcctgctgggcgcgttcctgcgtcagataagcgttgttctgaacttttgtctggaattcctgtttctgacgatcgaggtctttggctttctggttcaaagtcaaacgtacattttcgctcttcttcaccattgcctcatttaaatcgacacagtagttatattttgccaaaagcgtatctatttctacataagcaattttcattccggacagtccggctgcctgtgctgatgcattagtcgtctgattatccgctttaccggcgcattgagaaaataaaacgattagtgcaagagctgccaaaccgtttacgaggtagtttaatctcttcataatttgtaaaaatattgtttttagtttatttagttcatactatcgtttaaggctttctccagttcatcgatagagaagcggcttttcttctgtgcttccctgtcttgcgactgcacgcatccgattcctctatcacgcatcgccttattaccgctgacatgtccgttaggaaacttaccgcctttcacaaaaaagaccttcacgcccaataaaacaatgcaaatagcaactattaacaaagttatcaataatgtaccaagcatttccattaaatttgttgcacaaaacagaatatcgtccgataaaaagcatttggaatttgtttttacttttatcagcactgttttgtgggtgcaaatatagggctttggttggactaagcacccttttttactctaaaaaaagagaaagggaaataaaatagccaattaatttaaccatatttagcaataagaggttaatttgtacaagatttgaatttcagaaacagaagatcaggatacgcttcacttgtgtcctggctgctataaactattaagatatggaaaaaaaagatttgaaaccggctggcgtattccactatttcgaggaaatctgccaggtaccgcgcccttccaaaaaggaagaaaagattatcgcttttctaaaagcattcggagaaaaacataagttggaaacaaaggtggacgaagccggaaacgtactgattaaaaagcctgccactccgggcatggaaaaccgaaagaccgttgtgctacagtcgcatgtagacatggtatgcgagaagaataatgatgtgaagcatgacttcctcaccgaccctatcgagaccgagatagacggggaatggctgaaagccaaaggtacgacgctgggagcggacaacggtatcggtgtagccaccgaacttgccatccttgccgatgacagtatcgaacacggacctgtcgaatgcctgttcaccgtagacgaggaaaccggactgaccggtgcctttgccttacaggaaggtttcatgagcggtgacatcctgctgaatctcgattctgaagatgagggagaattgttcatcggctgtgcgggcggcatagactccgtagccgaattcacctataaagaggtggatgtacctgccggatatttctgctgcaaggtacaggtaaaaggacttaaaggcggacattccggcggcgatatccatttaggactcggtaacgccaacaaattattgaaccgcttcctgagccagactttcaagaagtacgatatgtatctctgcgaaatcgacggcggcaacctgcgcaatgccattgcacgagaagcacatgccgttatagccatccccgaagccgacaagcatgcgctgcgtaccgacttgaatgtattcgccgcccaggcggaagccgaatatgctgtagcagaccccgatttgcagtttaccctcgaatcggaaaatccccgtgccaaagctatcgacaaagacactgccaaacgtctgttacaggctctttacgcagctccacacggagtatatgccatgagccaggatattccgggtcttgtggaaacctccaccaatctggcatccgtaaagatgaaacccggtaacatcatccgtatcgagacaagccagcgcagttctatcgagtcttccaaacaagacatcgcgactatggtacgtaccgtattcgaaatggcaggagccagcgtatctttcggcgacggctatccgggctggaaacccaatccgcactcggaaatcctggaaattgcggcggaatcatataagcgtctgtttggtgtggatgccaaaataaaggctatccatgccggactggagtgcgggttattcctcgacaaatatccctctttggatatgatttccttcgggcctaccctgcagggagtacactctcccgatgaacggatgcttatccccactgtacaaaagttctgggatcacctgcttgatatattgaagcatatccctgccaggaattgatgagcttacataaatggagatataaagaaagaatgcggagcaaaagaggacatgctccgcttctttttatcccgctatccgctctgatgcttcttgctttcctgacttccgctccactccacgggcaagagaagaaagatactcttaccttccgcatcatgggttacaacgtagaaaacctgtttgactgccgccatgataccctgaaaaacgaccgtgagtttctgcccgatgccgtccggcgctggaactataccaaatacaaaaagaaactgaatgccattgcacgtgtcatcatcgccgcaggcaaatggacaccacccgcactggttgccctctgtgaagtggagaacgacagtgtgctacgcgaccttacccgctactccgtcctgcgtgaggccggctaccgctatgtaatcactcattctcccgacgaacggggcatcaatgtggcgctgctctatcaaagaggcatcttcaaattactttccaaccgaagctatccggtaatgaaacctcgcagaaacagccgccccacacgcgatattctccacgtcagcggacagcttttaaactccgatactttggacgtattgatttaacacttgcagaacctacatgtttat

SEQ ID NO: 4125 - DNA, 30466 bp, Unknown
  gut microbiota DNA sequence
atgaatccctcaggtttttacgttgacccgtaaaaggcactgcaacgtaaaaaagatggttccgaaaaaagaagcggatgaaatgcatgggcataaaaaaaggagtaccgctgtactccaacctttgttaaccttaaatctaatactatgaaaaacacgttgcaaagatacggatatttgataaatctgcaaattatccaagaaaaaaagcatgttttataacatttattataagattgaacttctttttcggacttgtttaaattttgttcggtattcttctcagagctgttttgcagttgtctgaggagtataacgggctatgtgacgaataaaaacaagagaataagccggaaagagactcggaagaagcctgaataaaattcttttttagcttgtaaatgtcaggggaaattgtgaatatttgtattataaaaatcataactctgctaagagcggtatatattaactgaattatcggcatataatatgacaaataaacaaatgaacccggagagcattgacagaatagaacatagtacttatacgcctctggaaaagaaatatctgaaagtgcagtttgtcaaagtggcattggtttatctcggtcttatggctgtttcgctttttcttctttgtgcagaggggtttgcttaccggtatgccgctactatcattgttgaatgcggtttgcttgtagcatccgttgttaatttgctgattcttcccaaggcatacaactataaaggattcgttattcgtgagcacgatataacctttcgctccgggattatctttccttcggttattaccgttcctttctgtaaaattcagcaggtgagtgtttgtcagaatcctgttacacgtctgtttggactgtattccgttgacttggtaaacggagcccaattgttggctacaatcagaattcccggactgacggaagagagagcagataaagtgaaggcgcttgtcatagaaagtataaaaaatgaaaacaaatgatttctctgcgccgaggcgaatgagcaaaagcgcgttcgtaatattccttgtcaacaacctatggctttatgcgaagtattttctttttatagtcattcttgaattgtttaattcggaaaagaaattatcttttattgaagcggctttggattttttggttgttttggcaatctgtctgaccttggcagcagtcattgcttttatcaattattattccaaaaagtattatgtggagaatggaaatctgattttcattcacggtttggtacgtaaggaaattaccagtatatctttgacgaaaattcattctttgcgtactaagcagggattgatttatcgtttgctggatatgaagggagtatcatttgatacgcttgcatcgcaatcggaagaaatagaaatgattcttgacaatgaagattgggaagcattgctcagccggatagaaactttggatagtcagacacagatacaggcatccgaagcagataagattgaagagaaaaccgatggatacactaccaagttgagcgttggtaatttgaatctgattaaaggagcactttgtcaaaaccaccttcggggcatggttgtatttggaagtattttagttactttatatgaccagattatatcggtcaatgaaaatgctgtggaatatttttatggttacatggctacacatgccgatttcttacggctttcattatcaagttgtatcactgttgccgctatcttgtatatagttacattgctactatggttgggtaaagtctttttgcgctatttcaatatggatatacgtatagaccgggaacagctgttctttgagagcggactgatttcgcgtaatagcagccggttctcatacgataagatttgtactgtttatatcaagcggaatatcatagaaaaatggttggcttgcagcactgttatgctgaaacaggcattgaatgccactgacaggaatagaggagcggatgtcagaatttatggttcagactctgctacaacttttctggactggtggttgggaaaggattatgcatcttcgcaacctatcgtttctgctcaatccggatacggcttattaggctataccatccggttcgatctgttggtttcgcttgcagccggtatagccttatgctattttcaatattacggttggctttggctcccggtcgtttatatgctgatatccctgataaaagggatttttgccgtacgtcggagttctatcactttaaaagaggattatgtggaaatcaattcaggaaagtttgcagaagtgaaaaactatttcaaatattcgaacatggaagtggttcgcatgacagctactccttttactcctttttatcacagagtaaatcttgtcatttctaccaatggttcctcctttaccataagaagcctgaaagaacaagaagctaaggaaatctatgaattgctgctgtataattgctatatcaaatgaggctgatggaggcttgctgtttattccatcggcggaattatctgtgcacatatattaattccgccgttttttctctatctcttttttaggaatttcagcctttggcttcctgatacataaagcgtttgatactcttcttggcggtcttttcaaactcctcgaagtgtatttttactttggtaatctggcaatatgccggcagaagcaggttcagttcgttccggttggcttccattgccttttctatatcggtttgttgcaggccgtgggcaaaggcatcgtcgaagtcgggataaatcagggctacgagtttgtcatgctgcaatacaatcaacgattccgagacgtaaggcatgttattcagtttgctttctatctcttcgggataaatgttctgtccgctggaagtgagaagcatattcttgctgcgcccgcgtacggtgacgtagccgtcggcatccattgtggcgaggtcgcctgtgtgcagccagccgttgacatctatgatttgggaagtggcttcggcattcttgtaatagcccagcataaggttgcttccccggcagatgatttcgcccgctacatgctgaggatcgggagaatctatctttacttccatgcgggtagtggcctttccgcacgaagcgagcttcagggtttcccagcggctagagcagatgataggaccgcattccgtcatgccgtaggcaatggtgtaggggaagcctatctgtttaaggaagcgttccacgtcggcgttgaaaggtgcgccgccgatgatgatttcatcgaaattgccgccgaagacatccatagcctttttgcgcatgtccgcttttatcttatcgttgacgataggcatccgtaacagcagcttgcctatcttgttgtctatgagtggcaggatgtttttcttgataatcttctctacgatgagcggcacgcaggatatgacgcgcggcttgatttcggagaatgactgcgcgataatctttggcgacggcatgcgggtgaggaaataaaggtgtgcgcctgccgagaaaccgtaaagaaaatcgtagaccatgccgaaaacatgccccagagggagcatggatacgatatggtcgccgggacgtacgggcagcatttcgtggcaataggctatattggaccataagctgcggtagggcagcatcacgcctttggaatagccggtagtgccggacgtataattgataaccgccaactcttcgggcgactgttctttgcggtagcagatatgttcgggacggaagttcttaggatagcgcgtgccgtagatggcgttgcggtgttcgaaagcttccatgagccgttcgtcccggcagacaactggagtaaaatccgtcagcaagacaactcccatgagcaacggcatggcttcttcgttcaagttctcccaagcccggtcgccgacaaaaaggagtttggcttcggagtggttgacgatattatgtatgttgtctgctttgaattcgtgaagaataggaacgattacagcaccataagtcactgttgccagaaagcaaaccgcccaatgggcgctgttacgaccgcatacggctattttatcaccgggctggatgccggcgctttccaatacgatatgaaatttagcgatcttgcgggcaacatctttatattgtagggttattccttgatagtctgtcagagcgtttctgtcccagttttgtatgatgctttgttcgatatagtcgatgaacagttgttcttgttccatgcgtatatttgcacactttagttaaaactgcgcaaatatagggcttatagtgatgcaatgcaagtggtttaaagtttttttcatgagggtatgtcaaatttaaaattcgcttactatttgtttttttaggcatgggattacataggtttcacggaaaaagaataaagaaaatctgtgttttccgtataattccgtgcctaaaaaacaaatagtgcattttctccctcttatttcctattctttggtcttttcagaaataagcagcagcttgtctcccacatgaagtttcagagtgccgttgggtatcaggtattcgttgtcgcgcttcactatcataacgagagttccctggggcaggttcatgtctttgagggtatcgcctttcgcgtcgagcatctcccgggtgacggttacatcgcgcaggtcggagtcgatatcttcgggcagttccactccgaagtcgttacctgtcttttccatcggggtggaaagccccatgatgcgtgctactttagagacggtagtaccttggatgacgagtgagaggatggtgatgaagaacacgatgttgaagattacatctgctcccggcacacctgccactaccggataggtggcgaagataatgggaaccgcgcctcgcaaccctacccaggacacaaacattttggacttcatattgatacgtttcccgaacgggagcaggcagaggaacacgctgagcggacgtcctatgacaatcatgaatacaccgatgagcaatgccacgactgccacttccagcatttcgtgcgggttcaccagcagaccgagacagaggaacatgataatctggaaaagccatgtcagtccatccataaacgtgtaaatctctttgcggtgcatgattttgttgttacccaccatcatgccggcaatgtagacggcgaggtatccgttgcccttcatcagatcggtaatggagaaggtaaagaatacgaacgacaacagcagaatggggtagagcgactggttgtctatattcagcctgttgagcataaggatggccagcttgcccagcagatagccggcagcagcacctaccacaaattgtatcacgaaagagaaagctatctgcgaagcacccatacccgaggactggatgagctggataagtacgacagtcagcatataggccatcgggtcgttgcttccgctttccaactccagcatgggacgcagattgtgcttcaggttcatcttctgcgagcgcaggatggcgaataccgatgccgagtccgtagacgacatggtggaagccagcagcagggaggtgatgagcggcaggtggatattggtccagctcatgcccgacagccaccatataaacagtccggtaaacagtgccgtcagcagcacaccgaaagtagacagtacaataccgggggagaggataggcttgatttcggtgaacttggtatccattccgcccgaaaacaggataatgctcaaagccaccataccgatgaactgcgcttctttggcgttgtggaattgcaatccgagtccgtcgctgccgaaaagcatgcccaccacaagaaaaagtaacaaggcgggaactccgaaacggtaaccggttttgcctacgatgatgctgacaaaaagtaaaatagaacctacaagtaaaatgttttcagctgtaaatagcataaatagtgtgttatgagttttattagaaaatgctttttgtacctttgtgtacaaagatattcattcttgacaacaaaaccaaaacttaattggttcaattaaatttcaatacaaaagttgtctcctttccggctatcagagagaggcttccgccggataagcgcatgatttgccgggagatgctcagtccgatgccgcttccgttttctttggtggtgaagaaaggaatgaaaatatgcccggcaatgtccggggggatggcagggccgttgttggatatttctatcagtacggcttcggcttcgttgcagtaggcgcgtatgttgatatgtttttccgtagtcgctgcgtttgtttccgctgttgtttccgcatttgtccccgttgctgccgtagcacccgtttcaaaagcctgtatggcatttttcagtaagtttatgatgacttgcgaaatgagattttcgtcggcatagagtatcaaatcgtcgggaacgatggaaacattgaacgtaaccggggtgtcgggatattgatggcgcgccagttccgccatacggttgatgaagcctttgaggtagaacagggacggttcgggagtggggatgcgcgtaaacctgcggtaggattctacgaaagcgagcaaccctttgcctgtggcactgattgtttgcagaccgtgccgcatctcttctttcgatatccgggctccggtcagtttcagcagggtgtcgctcagggaagtgatgggggttacggcgttcatgatttcatgggtcagcacgcgtgtaaggcgtatccaagagtctatctccttttcgtccagttcgttgttgatgtcgttcagggcgaggatgcgcaggtgctcttggcgtacggtgatgtcgctgacgcggacagataggtttacggttccgcgttcgttgccgaatgccgcctggaacttgtcgccgggacggcaggcggtgagcgtatccgtcagatgggcgtccacgcgcgacagttggcggacgtgcgtaaatacttccagtccgagcaggcgcagggcttcgttgttcttttgatagacggctccgttgtcgttcagcacgatgataccggtgtttacacagtcgaggataagctcgtagtacttctcccgttgggcggtttcactctttacattatgcaggatacgggctacgcggttcagcgaacggtttacgaggcggttgtcttcggttccgtccgtttcggagaagtggatggcggtatcgttgttttcgatggcatcgagcatgaaaagaactttacgggtgtggcggcggtacaaccgttgctgccagtatactgccaaaggaagaagcacggtgaacaggacagcccagagcagagggtcgccccagccatgcgcacccggctgtttcagaaagaacagcgtccacattatgccggcagccgcggctgtgagcaggctgacgacagtccggaaaacgtaatattggctgatatccttaggtttttcaaagcccatacttcttcattttattgtaaagcgtctgccgggtaattcccagttgcgaggccaccgccgagagattgccgccgcacttgtccagcgtgcggcgtatcatttgcttttccatgtcttcaagagtggatgcggcaggcatttccggggcttcgttcctgcgttgcaactggaacaatccggcagagaggaatgcaccgtcgcagatgataacggctttctcgatggcatgttccagttcgcggatgttgccggaccaggggtgcagcatcagcttctcccgcgccgcattgtccagacgcaaggccggcttcccgtattgcttgcagaaacgtgtgatgaaacgctctgccagtgggatgatatcttcctgccgttcacgcagcgcaggaatttcaagatggatggtgttgatgcggtagagcaggtcttcacggaattctcctttgtccgccatttcggacaggttgcggttggtggcgcagataaggcggatatctacgggaacaggcgtattgctgcccacccgcacgatgctgcgacgctggatggcggtcagcagtttggcttgcaggtgataggggagattgcctatttcatcgaggaagagcgtgctgtggtcggcaacctcgaactttccgggacggtcggtatgggcatcggtgaacgccccctttacatggccgaaaagctcgctttcaaaaaggctttcggtaatggcgcccatgtccacgcttatcatttccttgcggtggcgtgcggagagggcatgtatctcgcgggcaagcatctctttacccgtgccgttctcgccggtgatgaggatgttggcatcggtggccgctaccttttctaccagcatgcgaagctgctgcatgacggggctttctccccagtacatggaagaagcggtgcttgcaggcgtggttgccgttttcttcccggatgcaggggcgttttgtgcggcattcagcagggtttccactaactttccgttatcccagggcttgacgataaaatccgttgctccttcctttatcccccgtacggcaaggtctatgtcggcataggcggtgaacagcactacggggagcgccggatattgtttctttatttcgtgcagccaataaagcccctcgtttccggtattgatgccggatgtgaaattcatatcgagaagcactgcctgccaggtgtcttcgcgtaaggtggcgggaagggtaaccggtgaagaaaggacggttattttatcaaaataaggcttcaacagcaattgcaatgcggtgagtacgccgcgattgtcatcaacgataagaatgtttccggatttcttcatggcagaacgatgtcttgttatatttgtgagggcaaatatattctattttcccgagaaagaagggaaaggagaggaataattcggggactttttcattgggctttgctgcccggcaagacacatggatgttttttataaggagcggaagtaacaaaagcagtagcagaagaggggctgcgctacgttccgcctcagggtacatgccgtaccacgacaaggtaggtgtcataccacggtgtggtatacgttgtaccacggcatggtagatgctgtaccaccgcagggtacatgccgtaccatagcgaggtacttcttgtaccaccgtgggatacatttcgtaccactgcaagatacagccggcaaccttgcggtaactgtaatttcacttgaaagacatgtcttacagcaactgtagcttcactccgaaggacaagctcaggtaatccttcggcttcaggtacttgttggtgaatgcacttacgatgtacaggtcgcaggtactgatttcgtagaacagcgtaatggcttttgccgtaaatctgcggcgcgggtcgatatcatacgtaatgcgttgtccgaggaaagcgtggatgcgtactttggacgagaaaccgtagtagcctttcggataacgatccggttcgttcacccagaattcatcgccgaacacggtgttgaagtacataccgcaggtaaggggttctgccgagaaccggctttctttgatttgcaggctccaggggatgtagttctgcttcaaggtaaatgtcagtttggtgcagtcggactgatatttgggcaggacacccagaaaaacatccgtttcccattggttgcgcttgccgtaatcccagcccgtgcccagcgagaggagtcccatattgccggcaaactgtatcttggtgtgtgtcggaatcaaagcttcccaccgtttgcggtagcggtgcacgcgccggtcgtaacggctgtggcgtgtacggccggtaacgacggtgtcgggtttgcgttgcaggtaaacggtatcgtgctttacgataatcaccgtatcccgttcctgtgcggaaagcgggctgcaccacagcaacagcaggcagatggcggcgagtgccggcagattagaaatagaccacttcgcgctcatatccttcgggtgttatggtgaatacatagtagttgcggttcttcatgcagtcgctcatgtagtacatgatgccgtcctcaaagaggttttcctcgaagacgtggtgctcgtgggcggcagtgcagaactgtatgccgggaaattcggttacgtagcggtgaaagacgcgtgccacgttattattgaactggtcggcatagggacgtacgtgcatggacacaacggttttgtcgaattcgtccttgcggtcggtaagctctttttcgaggaacgtgaagtcgggaatggggcgggagtagtcaaactccatggcgttggtgttgaggcatacgaacttcacccgtccggcaatgaatgagaagttagggtcgccgaatacggcgcggtatgtttcttctcccgtgccgaggcagtcatggttgcctatcagggctacgtagggcacacggagcttgttcatgatgtcgcgctgccacagaaactcgtccgtcacgccgaagtcgctcatgtcaccgccgtggataacgaagtcgatgtcatcgcgcttgtttatctctcccacgaagtccagcgtttcgtcgtaccagcgttgcgagtcgcccatggtcacgaacttaatcgttgtcttgtccttgcatttctgctctatctccgcaatattatgggcgtttacatcggtctcaccgttgatgcgtacatcatacggatgatagtctatcatgtcgcaactgcccataagcaggcagaggaatgacaggagtaaaggtttatatggctttatcataataactctatatagtctatatctatgaaagttgaattatctgtcagtatatatctatggaaactgagggcaaaggtaaagttttcattcgatagaaaagttgtcctattttccgtttttctgttctgtaagtgatgatttggctaatcaggccaggggttgcaaagaataaatgtctgtttatctgatttgtaggcaggaattaagcagatagtatttgattattcggcaggctgtgtctaattattggacgggtggtgtctaatttttagacacctgtatatggaacatttatgcgggatttcctgataatcaaaatcataactcctttggcacgctttctgcattattataggcaggaaaacatggcggcaagccatgttttccgatactgtaggtttacgaattataaattagtatacgatgaaacaaatctattatgtcattcaaaccctgcttcggggacgcggctcgaatatcatcaagataatctccttgggattaagcctgacgatgagtatcctgctgttctcccgcgtggcgtacgagcagagtttcgacacctgctacaaagactacgacaatctctaccaaatctggtcggtatttaccgttaagggcgagaagtacccgccgcaggagcagaattgcggccctgtggcgggcgccatactggagaactttcccgaacaggtggaagctgctaccagcacctgccattggatgaatgccccgttatacaatgaaaacgcccgttttgacgaaaggaagatagtggcggattcactctttttcaagacaatgggtatcgaagtgctgagcggtaatccggtgaaagaccttcagcagcccaatgtgattttcctaagcgaccgctttgccgggagaatattcggcggagagaatccggtgggaaagaccgtcaactacaatcacgagaaagactttacggtgaaaggtacttatgaggcattgcccgaaaatgcaaccgtccatcctgaagccgttatctctatgcccaccttgtggaacgacggagtcggcaactactcatggcgcgggggagacagttatcccgaatacatccgtttccgtcccggtgcggacaaatcggtggtgaatgcgcgtatagacgctatgatagagaaatatcgcccggaagaggataaaaagaagtatggttatacggcgtttgtaaagcctatccgtgacacctaccgcaattacgaaagcgtagagcggatgcgtaatatcatgacagtcctcggccttgccattcttttcattgcggcgctgaactacgtgctgatttccatttcctcacttacataccgtgccaaagcggtaggcgtgcataaatgcaacggggcaagcggcggcaagatattcggcatgttccttttggaaacgggcattatcattgcggcggcattgctcctgatggctttggtgctgctgaatttccgggagttctttgaagataccgctgcggcgaaactttctttgctgcttgctccggaacgtatctgggttccgctgacggtggtcggcatactgtttttggtgggcggaatattgccgggacgtttgtttgcccgtattcccgtatcccaagtgttccgccgctataccgaagggaagaaaggctggaagcgtccgctgcttttcatccagtttgcaggcgtggcattcatttgcggacttatgtgcgtggtgatggtgcagtatcaatatgtgctgaacaaggatatggggtataatccgcagcggatggcgtttgccaatgcctattggaacgaggataaagagagtgatgccgctctccggttctttaaagggcttccttatgtagaggcggtgaccagcgccaacaatacgcctgtcagcggatatagcggctctatgattcgtgacgcatcgggcaatgtgcttttttccacacgtgcctgtttctatatgcgggaggactatccggcaatgatgggcatggcgttcaaggcggggcgtatggcacgtacgaaagatgagataatcgtaaatgaaacatttgcggacatgatgcattggggaaatgatgccgtggggcgtaccgtcgatgtagacaatgctgcacagatgaaagtggcgggggtgctgaaagatttccagataggggattttacagaagccaagatgccttttgtcgcccgctataatcaacatttcacggggacggtacatgtccgtttgaaagaaccttttgtacagaacctgcggcaactgaacaaggatgcagccgatgccttcggcaatcagaccatcgacttcgtcagctatgaaaagcagattaccgattcctacaacagtgtccgcgtgttccgcaatgccacactgatggcggccgtaacgatgttcttcgtcatgctgatggggctgataggatatactgccgatgaagtacgccgtcgcggcaaggagattgccatccgcaaggtcaacggtgcggaagcgtcctctatcctggaattgctttccaaagacgtgcttgtcgtagcattgccggcagttgttctcggaacccttgcatcgtggtatatcaacggtatctggatggagcagtttgccgagcaggttcctctcggttgggttgtatatctgctggtggtaatcgccaatctggcggtaatcgtaggctgcgtcctttggaagtcctggcggatagccaacgagaaccctgtgaacagtatcaagagtgaataaaaaagcatataacatagaaaaacaaaacaatatgattaagataaacgacatcagtaaagtattccgtacctcggaagtggagacggtagcgttgaaccatgtaaacctcgaagtgaaagaaggggaatttgtagccatcatgggcccgtccggttgcggcaagtctaccttattgaatatactcggtctgctggacaatcctacggaaggcagttataaattgctcgggcaggaagtggcggacctgaaagagaaagaacgtacccgcgtgcgcaaaggcaagttaggattcgtgttccagagcttcaacctgatagatgagctgaacgtttacgaaaatgtagaactgcctcttacctatttgggcgtgaaagcgggtgaacgcaagcgcatggtagatgatatcctgaaacggatgaacatcagtcaccgtgccaagcactttccgcaacagctttccggcggtcagcagcagcgtgtagccattgcccgcgccgtggtgacgaacccgaaactgattcttgccgatgagcctaccggtaatctggactccaagaacggtgcggaagtgatgaacctgctgacggaactgaaccgggaaggcactaccattgtcatggtgacgcactcccggcacgatgcctcgtttgcacaccgcacggtacacttgttcgacggtagcgtggtggcgagcgtagcctcgaacgatttataaggattaagactggagaggagacaacctcttcagtttctttacatatatccacaaggcaatgaccgccgtaacgaatgcaaagaagtccgatacgggcatacacgtccagataccgtccagccccatgtagcgtggcaggataatcagtcccggcagcaggtacaacaactgccgggtaagggacaggaatatgctgattttcgccttgccgatgctttggaagaagttgccgataacgatttgcgcacctaccagcgggaacatggctatgccgatacgcactcctctggaagccatgtcaatcagttgcccgtcactggtaaagacagccgatacggcatgcggaaacagttcgcagatgataaagcccgtactggtgatgcacacgcccgtaaggatgctcaggcgcagcgtagcctttacgcggtcgtacttctgtgctccgaaattgtagcccacgataggctgcatgcccatggtcagtcccagtacaatcattacgtacagcaccagcagccggttcatgatgccgtaagcgccgatagccatatcgccgccgtaacgttgcaggctgttgttgacgatgatgacgatgacgcatgccgttacattcatcaagaacggagacatccctatggagaaaatgctgctgataatacgctttttcatcttccagaaacccggttgcaagcgtacgatgcttgtcttttgcaggaagtggctcaccacccatatcatgccgataaattgcgaaatgaccgttgccgttgccgcgccgcggataccccagtcgaagtggaagatgaagacaggggcgagaataatgttgcacaccaccgtaaccatcgaagtcagcatcgctttcttgggataccccgtggcacgcatgatgttgttcaaccctatcattgtatatgtcaccggcgtacccaacaggattatctgcataaagttccgtgcatacggcagcgtttcgttgctggcaccgaaaaagcgcaggatttcgtccaggaagataaaggagatgccgccgaacaggaatgcgttgacaaggcacagcatcagggtgtggttcagcacttctgtggctccgtccgtatctttctgccccagacgtatggatgatatggtggagccgcctgccgagactaccgtacagaaagcgaccaccaggttcatcagcggaaaagtgatggcaagcccggcaatacccatggcgcctacgccatgaccgatgaatatactgtcgatgatattatataacgaagtaattgtcataccgataatggcagggatggaatattgcacaagcagtttgcctattcgttcggttcccaaaatatgcggatcgttcattggatatacgtcaattaagtgtttgcaaagatagtgaaagcttcctgtcttatcaaaagataatgaatatttgctcagttcgatgattattcagacctttgcgcccgaatattatatttgtttttttaatatggatacaacaaaaacaacggccgtcctgttcgatttcgacggagtggtaatggataccgaaacgcagtattccgtcttttggcataaagcgggggtggactatctgggcatggacgatttggagagccgcataaaggggcagaccatgacctacatctacgacactttctttgccggaaagacaaaggaacagcaggaaatcaccgccgccctcaacgcttttgagcgggacatggcgtatgattacatccccggtgtgctcgatttcattgccgacctgcgccgtaaccacgtgaaaatggcggttgtcaccagttccaacgaccggaaaatggctgccgtctaccgtgcccgccccgaggtaaggacaatgttcgaccggattcttaccgcagagatgttttcccgttcaaagccggctcccgactgcttcctgctcggtatggaagtattcgacacaactcccgacaccacctatgtattcgaggactcctttaacggactgaaagcgggcatggcatccgaagccaccgtgataggactggcaacgaccaactcccgtgaggccgtcgctccgttatgtcattgtgtattggatgattttacgggattcacttacgataaaatgcttcaagtgcacaagtaatgggaaaaagcgctaactttgcgcgctattttaattgataactcattaacacattcattaagattatggctggatatatttcagacgacactcgtaaagtaactacgcatcgccttgttgagatgaaacagagaggcgaaaaaatatcgatgctgacctcgtacgactataccatggcacagatcgttgacggcgcaggtatggacgtcatcctggtgggcgactccgcttccaacgtaatggcgggcaacgtgactacactgcccataaccctcgaccagatgatttatcatgccaagtccgtcgtgcgcggcgtaaagcgcgcaatggtagtggtggatatgcctttcggttcttatcagggaaacgaaatggaaggtcttgcatctgccatccgcatcatgaaggagagccatgccgatgccctgaagctggaaggcggggaagaaatcatcggtacggtaaaacgcattctcagcgcaggtattcctattatgggacacctcggactgatgcctcagtctatcaacaagtacggaacatacacggtacgcgccaaggacgatgccgaagcggagaaactggtacgcgacgcccacctgctggaagaagccggatgctttgcccttgtactggagaagattcccgctgcgttggcagagcgtgtggcaggcgagctgactattcccgtcatcggcatcggcgccggtagcggcgtggacggccaggtgctggtagtgcaggatatgctgggcatgaacaacggtttccgcccccgtttcctgcgccgttatgccgacctgcatactgtaatgaccgatgctatcagccattacatttccgatgtgaagaacttagacttcccgaatgagaaagaacagtactgacatgcttatgacgctgaacttctggcggatgtgcacagctaatctgctgctgttcgcatccgtctacatgctctttcccgtactttcgttcgtaatgccggagcagttgggagtgtccgtttcccggacaggcgacatgtttctggcattcattgcggcgatgtttgcggcaggcccgtttcatgcctatctgtgcgatgagtataagcggaagaacgtattgctttcttctgctttcgtcatgctggctgcaatggcagggtatgcctttgccgacagctatctcaagctgatgctgcttgcttcggtacagggcgtatgcttcggattggcaacgacggcgggcattacggtggctatcgacattaccacatctacaaggcgcagtgccggcaatatgatttatgcgtggtctgcccggctgggtatgttggcaggggcgtgcgcaggcttcctgctgtacgacctttacggtttccgcacggttgtttatgcagccgttgccgtgggagttctcggcatgtatttcgcatcgagggtatatgtggctttccgtgcgcctatcgggatgaggctgtgcagcctggaccgcttcctgctgccgcgtgcatgggttcctgcactgaatatgctgctgatagctttcgtgccgggcgtattgctgccactgctctgtataggcgactacatcgcattcctgacattggcggcgttggtgtttctgacgctgccgtttacaaggatgttcgtaaaactgtctcatcactgccagcggggaacgggcaacacgacttgccacctggttatggaaaccggacttttggcgggtctggcaacggcttgccgcctggcagatgcgttcctgctttaccacgccgccggtgtagccgccatacttgctttgttcttcttcgtcctgctgacgtatccctactataaaaggaaaagggtaagataacgtctgcctttaaagatacggtataaagattatcaatcctataattgccgccgcaacagcgcacaccagcactgctccggcggcaatgtcttttacctgccccgcaacggggtgccgttcgggagataccaggtccaccagcctttcgatagcggtgttgaacagctcggcggcaatcaccacaccgaaacagaggataacgaccgtccattccgtgcgtgtaatgcctaaaacaaatcccgcaagggttactgccgtcatggcaatcagatgaaaactcaggttctgctccttgcctacgcagctccggatgccctgccaggcataaccgaaactgcggagctgttttttgaaatcgtatcgcatagttgataaattgagtctttagaattaaaacattgagaaataagggcggggaagacgcagcgttggacttgggaaacgtagagttctactttaggattgtaaagtagaactttagcgtcgctaagtagcactttagaaacgtagtgtagcactttacggtccgcaatgttgaacttgggatttaccccgtcagttgcgcgatacctgctttactccctttaccgtccttagcttcttgatgagcgcttccagtcttccggtgtcgcctaccatgatggtaagcgttccagagaataatccgtcgtgcgaatctatgccgatgctccgcagcgtaatgccggtctctttggagatgatggaagtgatattggtaacgatgcctatgtcgtcgtgtcccaccacacgcagcgtaatggggtattgcgtgccttgcgacttgcctgcccagcgtgcctttacgatgcggtatccgaagcgttcgcgcaagtcgcttgcattcggacagtcgcagcggtgtatcttgatgccgccgcttacggttacgaaaccgaatacctcatctccgtagataggattgcagcagcgtgccagcttgaagtccagccctttcaggttctggtcgatgacgagcacgtcctctttggcggtggtctcttcgggcagggcggcagcctgcaggttatagccttcggcgctgcggtacacgatgtcgtcgtgcgtgtcgttctcccgtttctggagttcgaggtacttgtcgatgatgccgttcacgtcgagcgtttcatcggcaatgctctggtagaagtccgtcaccaccttgaagccgagccgtttgatgaggcgcatcatcgtaccctcgtcatactctattttccggttcttgaacttacgttccaatgtctccttggcaaaggcatgctggcgagcagccatttccttgagcgcctgccgtatcttggtgcgtgccttggaagtggtgacgatgttcagccagtcctgcttgggcgtctgtgtattggacgtcatgatttccacctggtcgccgctgttcagtatctgcttcaactgtgcgttcttgccgtttaccttggctcctatacatttgcagcccagcttgctgtggatgtggaaggcgaagtcgagcacggtggaacccttgcccagtttgaacaagtctcccttgggggtaaagacgaacacttcgtcttcgtataaatccagcttgaactggtccatggtctccagtccgctgctgtcggaattctccagcgcttcacgtacggaagtcagccattcgtccagtccgctttcgcctttcacgcccttgtaccgccagtgggcggcaagcccccgttcggctatctcgtccatgcgttcggtgcgtatctgcacttccacccatttgccttcaggccccatgacggtgatgtgcagcgattcgtagccgttgctcttgggcacggacagccagtcgcgcagacgcttcgggttgggctggtacatatccgttacaatggaatatgcctgccagcactccagcttctccttttccacttgggagtccagaattacacggatggcaaagaggtcgtacacaccctcgaaaggacacttctgcttcttcatcttctggtagatggagtggatggatttggtgcgccccttgatgtgaaagtgcagtcccgcctcttccagcttcttctgtaccggagcgatgaaagcggctatatacttgtcacgcgatgccttggtttcgttcagtttctccttgatgtggtagtagacttccttctccgtgtacttcagcgaaaggtcttccagttccgacttcagtttgtacagacccagcttatgggcgaggggagcgtacagataggcggcttcattggccacctgcctgcgtgcttcgtcgttctcgcactcctttatctggcgcatgatgttcacgcggtcggcaatcatgatgaggataacgcgcatgtcctctgcaaaggacagcagcaggttgcggaagttctccgactcgatggtggggcttttggcgtaaagttcgtttacccgtatcagtccgcgtatgatgcccgccacatcctcgccgtagttccgttccacttcttcggcggtacaggtgccgcagcgcacggagtcgtggagcatcagtcccaggatggatgcccgcctcatgcctatctcttccgccacgataacggcggtctgcatatcctttataatcgggttcagcccgaagatatcccgctgtatgcggttgttctgtatagagtttacaagatgtgttttcagctttctgcaatcgcccttgcggagcgtctctccggaaagctgcaataattttcggtagagcacgaagagcaaacgcttctcttcggctgtgaaaaattcacctgtttccataattgtccgtattttctgctgtaaaggtagtttttttcttccttttcatgacggtgcttgtgctttttttgtatttttgggcatcaattaattaatttagatattatgataacactccaagacaaagaactacttgccaagaaaggcatatcggaagaacagatagccgaacagctggcctgcttcgaaaagggatttccatatttaaagttgtctgccgctgcttccgtggagcagggtatactggctccggatgccgatgagcagaaaaaatatctgaatgcgtgggaagcatatactcagacagacaaaacagtggtgaaatttgttccggcatcgggcgcggcaagccgtatgtttaagaatttatttgaattcctcggagcggaatacgatgctccgcagtcggactttgagaaaacattcttcgggaaaatcgggaagttcgctttctatgacgacctgaatgccgcttgcctgaaaacaaccggcaaggatattcccgccctgattgccgccggcaattacaaggcggtggttgccgccctgctcgaatcggcaggattgaattacggcgcccttccgaaaggattgctgaagtttcataaatacgaggacggcagccgtaccccgctcgaagaacatctggtggaaggtgcgctttatgctgccaacaagagcggtaaggtaaacgtgcactttaccgtatctcccgaacaccgtgcgctgttcaaggcattggtagacgagaaagccgcggcttatgccagaaagtacggcgtggattacaacatcagcttctccgagcagaaaccgagcaccgataccgttgccgccgatatggagaacaagcctttccgcgataacggcaagcttctgttccgtccgggcggtcacggtgcattgatagagaacctgaacgacctcgatgccgatgttatcttcattaagaacatcgacaacgtagtgcccgataaactgaaaggcgataccgtattatataagaagctgattgccggtgtgctcatcaccttgcagcagcaggcttttgcctatctgcaactgctggacagcggcaagtacacgcacgagcaggttctcgacatcctgcagtttgtacagaagaagctgttctgcaagaaccccgaaacgaagaacctggaagatgccgaactggtgatttacctgaaagagaagctgaaccgtccgatgcgtgtctgcggcatggtgaagaacgtaggcgagccgggtggtggtccgttccttgcttacaacagcgatggtacgatttccctgcaaatcctcgaaagttctcagattgacatgaacgaccctgagaagaaagatatgtttgaaaaaggtacgcacttcaatccggtggacctggtatgtgcagtgcgcgactataagggccataagttcgatttggtgaagtatgtggacaaggctacgggcttcatctcctataagtcgaagaacggcaaagacctgaaagctctggaacttcccggattgtggaacggtgccatgagcgactggaatacggtctttgtagaagtacctctgactacattcaatccggtaaagacggtgaatgacctgttgagagaacagcaccagtgatgataactgcaagttgacggtttacggtttactatttccgcagtgcggtggcggtaggccgtaaatcgtcagttttatgcctgaacatccaataataaacaacaaattgccaattatagaaaacaataataataggtagtaaataaattagtaaccgatgaaaaagattttactgttaggttccggtgaactgggtaaagagtttgtaatttcagctcaacgtaaagggcaatatatcatagcctgcgactcttacgccggagcacccgccatgcaggtggcggacgagtgcgaagtgttcagcatgctggacggggaagcattggaacgtgtggtgcgtaaacaccggccggacattatagtacccgaaatagaggctatccgtacggaacgcctgtacgatttcgagaaagaaggtattcaggttgtgcccagcgcgcgtgcggtcaactttacaatgaaccgtaaggctatccgcgaccttgctgccaaggaactgggactgaaaacagccagatacttctatgccaaatccctggatgagctgaaggctgctgccgaaaaaatcggtttcccctgtgtggtaaagccgctgatgtcctcttccggtaaggggcagtcgctcgtaaagagtgccgacgaactggagcatgcctgggagtacggctgcaacggaagccgtggcgacatcaaggagcttatcattgaggagtttatcaagttcgatagtgaaatcaccttgctgacggttacccaaaagaatggccctaccttgttctgcccgcctatcggacatgtgcagaaaggcggcgactatcgcgagagctttcagcctgcccatatcgaccctgctcatttaaaggaagcgcaggatatggcggagaaagtgacccgtgccctgaccggcgccggtttgtggggagtggaattcttcctgagccacgagaacggcgtttacttctccgaactctctccgcgtccgcacgatacgggtatggtgacactggcaggaacacagaacctgaacgaatttgaattgcattgccgcgccgtactcggtttgcccattccgggtatcaagcaggagcggataggggcgagtgccgttattctttcgcccattgccagtcaggagcgtcccaactaccgcggcatggaagaggtgaccaaagaagaagatacttacttgcgtatcttcggcaagcctaccacccgcgtcaatcgccgtatgggtgttgtattgtgctatgccccgttggacagcgacctcgatgcgctgcgcgataaagccaaacggatagccgcgaaagtagaagtgtactgagtttaagtataaaatataaagtatgaggtataaccgtgctccatccgcatggttatacctcatacttttatgcttaattaaagagtcccgggtaaatctctccgcccagttcactcacattcagttgccgttgcagctttccgtccggtgcatagaacagttggaattcttcaccggagttgtagccttccacttcgataacgattaccgcaggacgtttgggaaacgtgactatccttacatccctcaatctcatggaagccataatgctttccataaatgcttccgcaacgggagcgggaactttctccagcgactccacatcattctccatcattacccattgggcattttcatcgaaccacacatctgtttccctgccgtcaataacgaattctgctacgtaacatcctgccatctgttcccactgggcatttgcaacatacgggtacatcttttcgaaagcagcctgtatgcttgtgggaactcctttggcaacggtggaaacggaaataaacagtagcatgcctgctaccaaacaaaatctgaatcttttcatcctgaaattaagtatgaagtataaaatatagggtataacaatgtcccgtccgcatggttcattcctcatactttatatttcatacttttaaacggtcagtttccctttatatacgaatgctttttcaccgaagtctacatccggcaatacggcatccgccgcaaacagtccgtacaccgatgaacccgaaccgctcatcgaagcatagacagcaccttgccggtacatttcttccttgattgccccgatagcgggaaactgcgggaacacgctctcttcgaagtcattcaccatatactctttccatgcttcaacgggcaactgcaccgtttccttcagtgaccgttccggacggtgcggctttatttgtgagaaagcatcccgtgtggaaacgaatatatccggttttaccaaccaaagctgataccctttcagcgacaaggatacaggcgagaacacatttccgatgccttccgcataggtaggagcattccggatgaagaaagcgcaatccgctcccaggcgggcggcatactcttccagagtcccggtactcagtccaaggccgaacttctcattcagcattttcagcataaatgcagcatctgccgagccgccacccaatccggcccccgatgggatatgcttgaacagatgaatatccaccggcggcaggtcgaacaatccgtccagcagcttatacgctttcaccacgaggttgttttccgcttctcccgctatttccatacctgcctgatgcaggcagtattttccgtcaccctcgcgcagcgggtttatttccagcgcatcttccacgggaatagggtagaagatggtctccaggttatggtaaccgtccggtcgtttttctgtaatattcagtcccaggtttattttagcattcggaaaagtaagcattgttaaattgagaattaagaattgaaaattaaaaaataaaaacgggcctgtcaaagcaggcttcggagacaaagttaatgaattctgttcatagtagattgaaaacttaacaacgatttgttgattgctatcaataaaatcatttatctttgctttcccttttgaaaggcggactatttatttcttaatttttaaatttcaattcttaattcataaagtggcagaacaaagacgaacaacccgcaccccgaagtcgaaatcaccccagccggtcaacgattacgggcgtatccagccgcaggcgccggaactggaagaagccgttttgggtgcattgatgatcgagaaagacgcttattcgctggtgagcgaaattctccgtcccgaatctttttacgaacaccggcatcagctgatatactccgctatcacagaccttgccgtcaatcagaaaccggtggacattctcaccgtgaaggagcagcttgccaagcgcggagatttggaagaggtgggcggcccgttctacatcacccagctcagcagcaaggtggcatcctctgcgcatatcgagtatcacgcccgtatcattgcccaaaaggcgttggcgcgtgagctgataactttcaccagtaacatacagtccaaagcgttcgacgagacgctcgatgtggacgacctgatgcaggaagccgaaggcaagctcttcgagatttcgcagcagaacatgaagaaggactatacgcaaatcaatccggtcattgccgaagcgtacgaccttattcagaaagccgccgcccgtaccgacggtttgagcggtcttgagagcggatttacgaaactggacaagatgacttccggctggcagaactccgacctcattatcatagccgcccgtcctgccatgggtaagacggcgttcgtactctccatggcgaagaacattgccgtgaacttccgcaatcccgttgccttgttctcccttgaaatgagtaacgtacagttggtgaaccgtcttatctccaacgtgtgcgagataccgagcgagaaaatcaaaagcggacagcttgccgattacgaatggcagcagttggactataagctgcgcgacctgctggatgcgcctctgtacgtggatgatactccctcgctttccgtattcgaacttcgtaccaaggcccgccgtctggttcgcgagcatggggtgaaggtaattattatcgactacctgcaattgatgaatgccagcggcatgtcgttcggcagccgtcaggaagaggtgagtacgatttcgcgttcgttgaaggggttggccaaggaactgaacattcccattatcgccctgtctcagttgaaccgtggtgtagagaaccgtgagggggaagagggcaagcgtccgcagttgagcgaccttcgcgagtccggagccatcgagcaggatgccgatatggtgtgcttcatccaccgtcccgaatattacaagatttatacttccgccgacggcacagacctgcgcggcatggcggaaattatcatagccaagcaccgtaacggtgccgtgggcgatgtgcgcctgcgctttatcggccagtacacccgcttccagaatccggaagacgatatggttattccgccgcctaccgagggtatgggaggagccacgttcggttcgcgtatgaatgcgcccattggcagtccctctacaccaccgcctccgtctgcctccgactatatgcctcaaacggacaatccgtttggcggggtgggattggacgggcctgtaccgttttaatggcattgggcagcttacatgaaaaaatgtctgttatatatatgtattagttttactgttacgattatatcggctttggatatgtaggtctatataaaatagtcttccccgcacttcacagtgcagggaagacacagcaaacaaacaaaacatttccgatttgaataggggatattcttatcggatggttttgtctatggtttaatcttggacacaacgtattgtaaatgcgtgattccttgcatttacggatgctggtggagtatagccaacagcgaaacctaaataatacgatgatgtatttccgctatatacactactgctccaataataacctcctgcaccggtacgatactgttttttgtcagcagcatgccagtaaccggaggcaggaaaacgagttacaccgtcagtgaaagtataagttttgtaaccgtttatagtactggttccataaatgttggtagaaaggtctccccaatttccatttgttgtatatttgtcaatatctccaaactctttgtaagtaggcatacgccaactgcctgtaacagcaccagtcttgcttaaatatcggcaaatatcacctttataggcttgataaaattcatcagtattgagagcattatcattcaagtaggtattgtttgggtcaatactgttacttaaaacttcattgtaaaagcaataaatagagttaaagtcgtatgatttgcaatcccaagtactattttggggagaggtaggattatatatcggaatataatatgcacttggagcagagtttcccgaagatggtatacctattagtgacccccaacggaagtgtacaccttgttttaaatcggaatcattggatatagcagtatcaaatgtaagtttgctgccgtcccaataaatattgcttcctgcccagataatgctactttttttgtatgtaacccgtgtgtcggtagttgtgggtttgagtgtaatattataagtatagttacagttacgtttgatattgaaatttgttgtagtggtagctccaagatatatttcccaggacagaaatttatatccggtggctttgccgtaaattacaacataggttgcagaatccggtgcgtttgcttttattttttctttttgctgggttattgtggtatttattcctgcccgattttcgaacatgtagaatattgtatttatgtttgtaggggagttcggggaaatacttccactgtctgtccaatccgtcggttgggaagggatagccgcatcttttgcccgggttgtttgtgtatcggttggttcggattcagtgtctaacgggtgtaatacatagtacgttttatttgggatgccataaatgcggtaactgtcaatgttgattccgtaaccttgatctatatttacatttagtgtgatttttgcagctattcgttttactgttatatccggaagcgaattgtttccagtagctatatttatgtggctttggcttcctgtcataggcaatacattgttttttgtcagactgttccaatcatagagagagtaagtcttgtttttcagattgttttcccaatgaatgtcatagctgttgaagagttccggagttcctgtatttgcaatagcataaatggtacaatcagtagcgctgtgggtatttattgtaactgtattgttcgtggtatatttttgtccaatcaaatttccattgctgtcatatataagtatatgtaagtccttgatgagattctcttccactcgtgtcgttgcgtctgtttgttgttcactttttacatgcaggtatattatggcagatgcttcttttgcatctttgatacaggcatcttgttggcaagaagtgcatattactgcttgtatcaacaaaacagttgttagtgataatgctgtaagtacttttaaacgaaaagaggtggagatgctcatattgctatataatttactcagatgacttaatcatttacaattctgtatcttgatgaatattctcccaaggcagtacatccattgttatcaaaggaggagtataatgaaagtctatattgatatctgtttgtttaccggcaggtgcatgtaatttcttgaagctgttgtcttgtgttatagtgtatattatttcatgttcccggtatatgtctatttctatgtattcctcttgtgcggtaggaaatattcggaaaggaagtgtatatacatctccttgtttgtctgtgtatgatacgggtttatatcctgcacttttaccggtaatctttcctgtaaaattcacttctgttcctgtgcctctgacgatgagcgtatacggtttcccattatatgggcaatgttttgtcagataattggtacgtatattcaggcttgctgacatacgttccataaccagtgttagatattctacctgtctgcttcttgtagttgcattgttcacttcctttttgcaatagaaaatatcagtaatgggcaaatgacttccttctgtatcttctctgagtcggaaacgtgcttcttcgatagtagtgcctatgggaatatcgggagcaattaaggtatctttctttatatttccccataccacgagggtaagcctttcgtttttatcatctctgaaaatcagatcagatgaaatatctgtgggtattttccttataaatcctttctcgttgaatagatagacttccactttttgcaaggcgtctgttgcagtgaggtcgtttccctcggagtctacagcttgcatatcgagcacatattgtatgcagtctccggtgtcttcccgcacgcatgatgtgtacagaaaggtgagactaacatacaatatcgtgaataggaatatgcgggcaggcttcatggcggttgttctgaacttttgaatatttggtaattattcgaatgtcacgtcctgcgtgatgttcagtgcccagtcggctacactcactgtcagttcgagtgaagtagggtttatctctccggtggggtcatcggttcctatattcttgatagttgccttgatggcataggtcgtgttgcgggcaatgtttgaagtacccgtgcccgaagctccggtgatatttgttccggtctggctcttgttgacgattatcggataatagatggtggttcctgcatcacttgcacttttcttgaacgttccttccagtaccaatgccgtacgggtggcctcttcgttggggagtatatagaaccagtagtcggttttatgctcgatacctacgcttaccgggggagtgaccgaatttgccagataagctacagttccgctggagccggtgtagtttccggtcagataatccggtgtg

SEQ ID NO: 4126 - DNA, 138892 bp, Unknown
  gut microbiota DNA sequence
atggtaagccggcaggcgctacaggatgcaggccccatgaccgaaatatatttccttttttacgaagagctggactggtctgcacagcttaggaaagccggttaccgcctatggtacgaacctgctgccatagtctaccacaaagagagcatgacggcgaagcgaggcagtccgatgcgggagttctacctgtcgcgcgcccgcgtgctcttcgcccgccggaatctgcaaggcatcaggaaatacctgtcttgcacctacctctgcatcctcgccgctcctaaaaaagcggccgtatatctgctgcacggacaaggcacacttgccaaggcaacgctatgcggcacttatcggggaatgttcgttcagtaccgataaaagtttatccccattaaactcatagtttattaggaataaacttccggttcaataggaataaactttcagtttaatggggataaattataataaactccacatgtatgcattctatttacgccgcaaacgcttcaccagcgaacgcatccctgccgaacagcaatagaagctgctgcacaatatcagcagaaataccagagaggagaccagcgcatatacaatccacatgccatatccccgggacggctccgccaacggaaggaaacaaagtaccgcatccgtcagcccccatgcaagaacggcaagcagcagataccggaatatatttttccaatatgacttcacggacattttaaacccctctttgtaaaggaagtaaggcttccagatactgataacggttatcgaactggctatatctcccagcaatactcccggaagtccccacaaatagccgcctgccaatgccaccgctactgttatcgccagtgtggcaaccggcgcccatgtgtcgtgaaacagtccgtaaccgaaaatgaactggtcgttcgtacccctgaactgactgataaagaagttggtaagaatcacaatcaagacggaacggggcaatatgtactcctcgcccagccacaccgtaatgaacgggtccatcagatgatacaacgcgaacgtcagaaacgaggctatcaaaaagcgcaatgagctcaactcccaaaatacctgctggatacgcttcatatccccctcggctatcagactgcccacccctgcgccggtactgcccagaaagttatcgaccaactgattcagcttggtgagcagcagcatatagttgccgtaatacgccaccagtttcaatgaagtaaatgcgtagaccagaaaaggcaaaagctgcgttctgcccattcccgccagcttatgtacaaacatctgacgggctttacgcacaataatcctattctccggatatttcagtctgccttccgacacactgcacttcagccacggatatacccggtttatcttccagttcagtatgaacgaatacaaaatgccgaatgtcagttcaatggctatccacagataaagactgcccacgtagcataccaatgctatttgcaggagaattttgatgatattggccgtttgaaaataaacggtgactacatagttgcgctggtcggcgcccagcagggtttgccggtaattaacaaaataactgatgagagcggaagtcaaaaatgcaaaataagcaaaatagattactccgaggcgaatgccggcatcggcgaatatatagggcaggaagcaggccaaaagcagtcccgcacccaaaatcagcagtcctacgttacgatagagataagccagtaccgagacaatctcctttatcctgtcccgatttccgtcgaaaatcggtttgtaaagcacatagccgatggaagctccgatgcccagctccgccagattgagaaagccaagcaggttctgcatcgtactcgtcagcccgacaaagtccgcccccagtttctcaagaaatatcttcctagagaaaaaggagatgaaaagggtgacaaggtaaaagaatacattgacacgcgcattcagatagcttttatggaggcgggattctgacattgtaaaacattatttataaaaccttggttatggaagtacaatgaaacttacttttcaacagttctgcaaaagtcctgtatatgtttttccaactttcaaaccgaagataaatacacaaagctctacaatatcctttactgccgaagtgcttgcggcaatccgtcacacgggaataactgtaaagtaccttatcgctacgccctatatccagcaaaaagcggttgtaacggcaagcaacctttacacgggcaagaagagtgtctgaccgcactccatactgcaatgaatcttttctgactgtgacacaataaacatacccggaacatgccgctactttacgggcatggtaatccacataagcggcaaacatggcatcgttggcggcaaccgtttcatcaaagcaaatacggtatctgcgcaccaattctgcggaaaccatcttagcccagggtacgtcgttacggtatttcagaatttcaaggtccatgtcctccgctattttcccattatggacctggcgtgacggaaccggagccagtgtatccgaatcgactgtttccgcacggaacgtaatcaagtcatagtccgtattccggtaagtatccaatacgttcaggaagccgggcagaaagaaatcatcggcatccgcaaataccagccatctgcctttggctctggcaagtccgcaattacgggcataaccggctcctctgccctctttggtaaagagaatctccacatccgccctgtcactgcccggaaaatgagcaaagtccacaacatccggggaactgtcatcatctgccacgataatctgcacatcgtccctgggcggaatggaatcgagacaccgttgcaacaggcaaggtatgtccttatggggaataatgattgaatatagaatttccatttcttcttatcgtaaaatgaaaccagacctgccctatgccttttcggaataaccgaatacgtacctgaacaggcaactgcaaagtatggacatatagagattataacaaaagcagaaaccatgcaacaggaactgcctgccccacttgtccgctttatatccgggatgataaaactctttcataaaagagcgctgttccgctgccaaccggcgcaaatgttgtgtccgtaatgagaaaggaactttcccggcagagcgatagtcggcaatcaatgcacgctggaaaaacagcacgacaaaggagaaagctgttctcatatccgccacattcaagtctaactttccggcaagccgtacagtaatcgatttatataatttgaaagttgcatactccgatgcaaaatcattcagacgctttgtcaaagaaccgggtacgtcgcaatagacataatctacatggctgcctacaaccacctgccggcaatgaaacaaatattgaaaattgaatatcgtatcttcaccgaaagaaatctctgctggaaagcgtaaccccaaccgctcaatgagaacccggctgaaaagtttggcaaccggtccccgcatatcccgcatctcatcattgagaaacagctccctgacatctctaccggtatagaccgacggaataaaagaggttgtatattgcctgtctgcctgctccgacacaattgtaaatccctgtacaacaatggagtccagattcaaaggcctttcctcatagagatgtttcagatagtccgtacctacataatcgtccgaatcgacaaaaacgatatactctcctttcgcttcatccagccccttgttgcgggccgtactgacacctgcattcgtttgatgcagcacacggatgcggcagtctctttcagcccagtcatggcatatcttgccgctgttgtcaggactgccgtcatctattaacaacaattcaaaagctgtaaaagactgggcaagcagacttgcgatacaacgggaaaggtatttttctgccttatagaccggtattattacagatatgacacattgttccatcatctttccgctccaaacatatacctgaacttaattccccacaggcagcgcatccacgcatcaaaagcaaccgcaccgacattgaccagcaaaaaccttgagaacttatccgccttataccggggagagaaacattcttctatccacctcctgtgggatgaaagtaactgacgcaaaaaaacaatccgctcttttcggctataatgattctctttcttatagattgccaacaggattttatgaaaaaacaccgttaatgaatcccataccccgaccaaagaggaatcctccaaccgataggtttccttatatcggcatactctttccagatagttggaaaaagcggcgtattcgctgcggaaatcttttatgcaagtggataatgtagccatagaatatcccaccctatatatataggtggaagtatcgcagataagcagataatccgaataaggaagatagtcgagcataaagagcatatcttccaatcccgacacagcaggaacaaaccggagaccgtgttcctttatcagcctgttgtcatacagctttgcccaggcatacattacgtactttccaaccagctctgcaagcacacgcgaacagtccatcggcaagatggtttgttgcggaacatgaacggtatgcaaagaaccgtcgggaaacagtttatcgaacccgcaaattaccgttcctctttgagacttatcggcaggcaatgatgcgtaaagctcctgcaaataggtggaagtgacgtaatcgtccgaatcgacaaatgcaatataagtccccgatgcgtgctccagccctttgttccgggcgcaactcaaccctgcattctcctgatggaaaactcttactctcttatccttacccgcatattcatcacagatttccccgcaacggtccgggctgccgtcatctaccaacagcaactcgaaatcagtaaacgtttgcgataaaatgctgcttatacattcggccaagtattgctcgacgttatatacaggcactatcactgatatttcggggatgttccgttccatggcataatttttcaatcgactccgtgcgtggtatgaataaaccgcctgttcgcttccttcagccggaacaggttcaaaagcatcagcaggaaagagtaaggaacccaacaaaccgctttcagcaaacgccatttccaatatttgcggggaatggcgagagccagcgccaacagcaacagtatgaatatcccccaccatttacaggccgacggagacgcgaacagggaatgtgcgagggaaattatgaacacaaagcccagcagcaacactctggaaagagagatttgctgataaagcttatcgcagaagtcccacttcccgctgcgaatggcaggtagcaggtgattggcaaactcaaagaaactgtaatactgggcggacagccaacggcgacgctgcttgtaaaagctgttcgctttctgtatcttctcgtccctgacgatagtatcgagcagataatgaatgtgtatgcccttataaagaagcttcatttccagcacgcggtcaaaaccgcccacagaagtgttatccatcatcgcatcgtaaaacaagggatattcaaaggccatccccgaacctatcagagccgccgacattcccaaattgacatgtcccaaacggaatatggaattgtttatctcctcgctgattgcatccagataggccataccggtattcagattcttggccacgcgatgtgtctgtaccacccggacgccggacacggagaaagcatcgttcagctcggacaggtaggaaggagcaataatgttatccgcatctattaccaatgctatgtcgtaagcggctttgtccaaatatccgagggctgcttgcagggatttggtattggtgctcttctcaaaatcgacttgaagcagctttatgggaagtgaagacaaaaccgcattggtttcgggttgcatgtggtccgaaataaccacaatatcatatctgtcatccggataatcctgcgccagacaggcatgcacggtaggcaatataaccgcatcttcgcgataagcggcaatgaacacagcaaaccgcttgcttgtccgggccggtgcggtaacgaacggtttgtaccggcacagcgatgccagactgcacaccagcagatatgccacatttatcgcgaataaaatgtatagcaaccaatcaagagtatataacaagtgttccaaaatccatgcaatttaagcctgttgttctatgttccggaaagcctgcctgccggacattcgttacaaagatacaaaaaacgggaagagtttggacagaatatacaaaaaagtgagcataaaatacagaaataaaaaaacgagcaagctcttccgaacccctcgcctcgtgtaagaaaagcccaaaggcttttctttttttacttgcatcaaatttttgttacctgaaaatcaatctttctttttacctctaaaaaacaaacttcaattacctattaaataacacttaatgtttaacttttacctttttctaattacctactttaatctaaaacttttacctatgaattaattcaatctttttacctcttaactaattacctatactgaaaactttatctttttattcttttataagagcaatttcccaactgcattgcaaaggtaatacttttttccgtgtgcgcaaacaggaggggaaagaagtgtgtgttttataacattgttttagagattaagcgtctcttttacacttgtaaacagttaaaatgctaccaatgtgacacactatccgccgaaagcattacaccgggtataaaaaaaacaaaccaccgaagtgccgtagcacctcgatagttgtcccctttaaacacctttaaacaaaatgaaatataataattactttcttgcttctgcaatgtaagccaaagcttccttacatttctccgtaacgtaagtccagtcctcggcagcaaccttatcgctcgggaagagcttggaacccatacctacgcagaatacgccggctttaatccaagaagtcaggttttcctgtgtcggttccacaccgccggtaaccatcagcttagaccacggcatcggagccaacagaccttttacaagtttagtgcctagtacatcacccgggaatatcttgcaaaggtcgcaacctacttcctgtgcgaaaccaacttctgaaacgcttccgcatcccggagtgtaagctaccaaacggcggttgcaaatcttagcgatttcggggttgaacaacgggcctacaatgaagtttgcacccaattgcaggtacagtgccgcagtagcagggtctacgatagaacctacacccatagccatttcagggcattcttttgctgcgaacttcacaacttctgcaaatacttcgtgagcaaagtcaccgcggttggtaaactcgaatgcacgaacaccaccatcgtaacaagctttcactactttctttgccacttctgcatctttgtggtagaatacaggaaccataccggttgaaccaattttgttcaatacggctattttatcaaattttgccattgtattaatcagtaatttaatgtatggaaataactctttttctgttctttcagacacggattagtagcgtgttctttgcgtgattattacaccggaatccgtggaatccgtgcctgaaaaaaatcattagcgttgtacacgaccgcttgcgtcaccgcctgccagcgcttctacctcctcaactgaaacgaggttgaagtcaccgttgatagtgtgcttcaaagcggaagcagccactgcgaattcgagggcagcgccctggttgggcttagtcagcaaaccgtggatgataccgcctgagaaagagtcaccgccacctacacggtcgatgatcggattgatatcgtaacgttttgattcgtagaattcctcaccgttgtaaatcattgctttccaaccgttgtgcgttgccgagaatgattcacgcaatgtagaaataacgtatttgaaaccgaattccttagccatagccttgaagatacctttgtagccttctgcatctgtcttaccgccttctacatcggcatcgggtttgaaaccgaggcagagttcagcatcttcttcgttaccgatgcaaacgtctacgtattgcatcaacggtttcatgatggactgagctttttcctttgtccaaagtttcttacggaagttaaggtctaccgataccgtaacgccgtgacgcttggcagcttcgcaagccagacgggtaagttcggcagccttgtcggagatagcgggagtgatacctgaccagtggaaccagtctgcaccttccatgatagcgtcgaaatcgaaatccgctgcatcggcttcagcaattgcagaatgggcacggtcgtaaatcaccttgctgggacgcatagatgcaccggtttccagataatagatacctacgcggtcgccaccacgtgcgatgaagtctgtctttacaccatatttgcgcaaagcgttcactgccgactgaccgatttcgtgtttcggcaattttgttacaaagtaagcatcatgaccgtagttggcacagctgacagcaacgttagcctcaccgccgccatatactacatcaaaagaatcggactgtacgaaacgagtgttgcccggagtggacagtctcaacataatctcacctaatgtaacgactttctttcccataattctatgtttttattaaatactatgattaaattgtttctttcaaattatcacatcagctcctattaaaaagctaaacacctgataccatgcagagtaaactaaaagacagcttgttcttcatagctttcgtgtgcgggcacaaagatacaacaattttcgtaattacaaaaattgttatatatttgtatcgaaaatatttagattattattgtgcacgggcacaaaaaaccatgagtaaaaccatgaatacgccggaaagaataagaatcaaagacatcgccaagatggccgatgtgtcggtaggaaccgtagaccgcgtcatccacggacgtagcggagtgtcggaagccagccgcaaacgcgtggaagaaattctggagaaactgaactaccagcccaatatgtacgccagcgcattggcttccaacaagaagtacgcctttgcctgcctgctaccccagcacgaaaccggagaatattggaccgaagtggaaagcggcatacacgaagcactgaccacctactcggatttcaacatcaccgtgaagctgaggtactacgacccgtacgattaccgctccttcgcccgggaagcccgcagtatcgtggaaatgacgcccgacggtgtgttgtttgcccccactgccccgcagtacaccactccctttaccgatgaacttgaaaagctggatataccttatatatatatagactcgaatatcaaggaagctcccgccctctctttcttcggacagaattcacaccaaagcgggtattttgccgcacgtatgctgatgctgcttgccggtgaggatgcacaggaaatcgttatcttccgcaagataaacgaaggcattgtaggttcgaaccaacaggaacggcgggaaatcggtttccgagaatatatgcgcgagcatcatcccggctgtcgcatctgggaactggacttgcacgccaaacgcgacggtgaagatgcacagatgctggatgatttcttccgcgtccatcccaccgtaaagaacggcatcacattcaactccaaagcatacatcatcggagagtacctgcaaagacaccggaaaacggatttcaaccttatggggtacgacctgctgaaacgcaatgtggactgcctgaaagaaggaagcattttcttccttatcgcccaacagcctaccctgcagggcttcgacggcatcaaagcgctgtgcgaccacctgattctgaaaaaagaaatcgcaagggagaacttcatgccgattgacttgctgacaaaagaaaatatagaattctattataacagataagagtgccgggcaatcaggcaatggaactgtaatacgacactatcgaacgaaaccaattaaaacatagtatatggaaacaaagtacctgaaaatcaactcggctgacaacgttgcagtggctatcacagcacttccggccggtgaaaaactcatagtagacggcaaggaaatcatcctgaacgaggatattcccgccggacataaattcgcgctgaaagattttgcggaaggcgagaatgtaattaaatacggttatcccataggacacgcccgcaccgcacggaaacaaggcgactggatgaacgaaaacaacattagaaccaatcttgccggactgctggaatatacgtacaaccccaccgaagtgaaactggacattccgcacaaggacctgacatttaaaggataccgccgcaaaaacggcgatgtgggagtacgcaacgaaatatggattatccccacggtgggttgcgtaaacggtattgtcaaccaactggcagaaggcctgcgccgcgagacagacggcaaaggcgtggatgcaatcatggcattcccgcacaactacggctgttcgcaactgggcgacgaccacgaaaacaccaagaaaatactgcgcgacatggtgctgcaccccaatgcaggtgccgtacttgtggtaggtttgggatgcgaaaacaaccagccggatgtattccgcgagtttttgggtgaatacgattccgaccgtgtaaagttcatggtgacgcaaaaagtgggcgacgaatacgaagaaggcatgaaactgctgcgcgaactctacgcgaaagccagcaaggacgaacgtgtggacgtgcctctgagcgaactgcgtgtaggtttgaaatgcggcggttccgacggattctctggcattacggctaatccgctgctgggcatgttctccgacttcctcattgcacaaggtggtacgagtgtattgacggaagtgcccgaaatgttcggtgcggaaacaatcctgatgaaccgttgccgcaacaaagaactgtttgaagaaaccgtaaagctgattaacgacttcaaggaatacttcctctcgcatggcgaaccggtaggtgagaatccgtcgccgggcaacaaggcaggtggtatctccacactggaagacaaggctttgggatgcacccaaaagtgcggcaagagctatgtggaaggtgtacttccttatggcgaacgcctgaaagtaaaaggcctgaacctgctttccgctccgggaaacgacctggttgccgccaccgccctggcttcgtgcggatgccacatggtattgtttacaacaggccgcggaacgccgttcggaacatacgtaccaaccatgaagatttccaccaactccaccctcgccaagaacaaaccgggctggattgacttcaacgccggcgttatccttgaaaacgaaccgatggaaaagacttgcgaacgtttcgtcgactacattatccgcgtagcaagcggcgagtttgtgaacaatgaaaagaaaggttataaagaaatcgccattttcaagacaggggtgacactgtaacggcaagtgctcatagcccgagtgcacggaattaccgtctgatgttgacgggtattccacaataattcggacagaagaacaaaagaataaaaataggtagtgttaccagaaaaataaaatttttccttttttgttcttttgttcttctgtccgaatatttagatatgcaccagaattccatccgttttttgtatctttgcagccgatttactcaaaacaatcgttcttataaactcatgatagaaagtatgtccgcagatacaaatacctctcccaagcaaaagggcggctggtggtcgctgagtccgttggctgtatttctttgtttatacctcatcacatcactgcttataaacgatttctataaagtgccgataacggtagcatttctgctgtcgtcctgctatgccattgccattacgcggggactgaagctggaacaacgcatttatcagttctccgtcggggccggtaacaagaacatattgctgatgatatggatatttgtccttgccggagcgtttgcacaaagcgccaaacagatgggagctatcgacgccactgtaaacctgaccctgcatatcctgccggacaacctgctgctggcgggtattttcatcgctgcctgtttcatctccctatccatcggtacaagcgtgggaacaatcgttgccctgactccggtagcggtgggactggcagagaaaaccggtatcgacctgccttatatgacagccattgtagtgggcggttcgttcttcggagacaatctttccttcatatcagacaccaccattgcatccaccaaaacgcaggattgtgtgatgagggacaagttcaaaataaatttcatgattgtagtgccggctgcactggttgtactgggcatctatgtaattcagggactttccttatccgccgttccgcagatatacgagattgaatggataaaggtaatcccctaccttatcgtactgggtacggcaataaccggagtcaatgtgatggtggttttgctacttggcatcgtctctacgggaatcatcggcatttgcacggcaacgggcgtcttcggcgtcactcctgccgaaaacatgaatgcaagcaccgctttcttcgattggttcggcgctatgggaacgggtatcaccggtatgggcgaacttatcatcatcaccctgctggcaggcggaatgctggaaacaatccgctacaacggcggtatcgactttgtcatcacccgcctcacccgccacgtcacaggcaagcggggtgcggaattcagtatagccgcactggtgagtgtagccaatctttgcaccgccaacaacaccattgccatcatcaccaccggtcccatcgccaaagacatagctaaacgctttcacctggaccgccggaaaacagcaagcatactggatacattttcctgtctcattcagggcattatcccttacggcgcacaaatgctgatagccgcaggactggcgggcatctcgccgctcagcatcataggcaatctgtactacccgttctgcatgggagcctgcgccatactcgccatactaataaggtatccgggaagatactcatagttcttcccggacaccggctgtattccgaacaccaattagtttataaaactattgtaacggctgattacgtcattatattcggatactaaatcattataaccatcctcggtgaactttccgtcgcgcagttgcttgcggagttctcccaggaacttgtccacatacttcagcaaattatcgtaattcgacatctcactctggaaatccgctttcttctccaacttcgaagctgcctctttcttggcgttgacagcatcgtaagcagcctgcaaatcttccttcttggcttcgggcgaatagagttccaaagtcttctctatctcaaaaatcaaagcctttccggcaaggatatggtccttcagcggattatccatcagtgtggcctcttcggctttatcggcatagggagtaagcagggcatagatttgggaacgaagtccgggaatctgttctgccaactctttctcttccttacagatttcattacctttggcatagttgtcgtccttatagtcttcggccttgatgtaggcgcggtaagtatcataattggcatacagacgcttggacacatcgaagaaacgacggtagtacatcttcagactgtcggcagccgaggacgggaagcaatcgccggggttcaataaagcagtcgtgtctgttgcggaaaccggcgtgcggataacaacgggcgctacaagagtcttaccgtttttctgcatataatcgataatcttggagatctctcccatgtccaccattttcttggtgatgtcgatgcttgtgttgtaataggatattacctcgtttgcttcttccaatccataatccatggaagcggcatcctttcccttgccgccgcaggaagcgagtaaaagcagggaaacaactgaaattgctgtaattttcttcattgttacaaatctgtttttagtgttagtattaaaagttttcgtctgccggcaaagacaacataggtctgtttgttcctgatatgttatcgtttgtcggataaggcaaaattacgtggaaacaatgaaatcgggaaaaatgagagggggacaaataagaggataatacctatagggttaatttgttgaaaaagtgaaatttaagcagattacagccgggcacggcagggagacattttaaagaacaggacacaattacatccgtctttcacacagaagcgcatttatggcacgataatgaaaatatcaggcaaactctttgtcaatcaaaagaaaaagcgtatctttgcgcccgctgttacgagatagcagcataattcaaatcattaactaaaaacatttatttaaatggcaacaaaaatcagattgcagagacatggacgtaaaagctatgctttctactctatcgtaattgcagacgtaagagcaccacgtgatggtaaatttattgagaagattggtacttacaaccctaacaccaatcctgccacagtagatttgaagttcgaccgcgcacttgactgggtattgaaaggtgcacaacctaccgacactgttcgcaacatcctctctcgcgaaggcgtttacatgaagaaacaccttcttggcggtgtagcaaaaggcgcattcggcgaagcagaagcagaagctaaattcgaagcttggaagaacaacaaacaaagcggtttggctgctctgaaagctaaggaagaagaagctaagaaagctgaagccaaagcacgtctggaagctgaaaagaaaataaatgaagtgaaagctaaggcactggccgaaaagaaagctgctgaagaagctgctaaggctgccgctgaagcacctgcagaagaagcaaccgaagctccggctgaagaagctcccgcagcagaggctgctgctgaataaaaagcagagctatccttgtaaaaaagggacaaaaaacataaaatcctcatcggttatgccggtgaggattttttattattatctttgctgcaacaatttatttattaaatgaacaaagcaatgaaaaaattaacttacctgctcgctgccgctgccgtattcgcagcttgtaacagcggaaacaaaggttacaccgtaaccggaacagtagaaggcgctgccgatggcgataccgtttatctgcaaaccgcagaaggccgccagctcgtaaaactcgattctgcagtcatcaccaacggaaccttcaccttcaaaggaacgcaggacagtgctgtgaaccgctatatcacgtgccagccctccgggaaagaaagtgtgctgatggacttcttcctcgaaaacggagcaatcaacatcaaactgacttccggcgaaggcgactctgccaccggtacagccaacaatgatatttaccaacgcatccgggacaagcaaaacgaactgaaccaacagatgaacgccatctaccagtccatgtccgacacagccctgacagacgaacagcgcgaagccaaagccaagcagatgaatgatctggaagagcaatatatcgccactgccaaagagggaatcaaacaaaacatcaataacgcagtgggagtattcctgctcaagaagaaccattattacatggatgtggaagaactcgatccgctgatgtcgcaaatccccgcagcatacaacaacgacgaaaccatcatccgcatcaaggagaacgtagaaaagatgaaagccactgccgtaggtcagaagtttacggactttgaaatgcagacccccgaaggaaaaacggtaaaactgtccgactatgtgggcaagggcaaaacagtgctcgttgacttctgggcaagctggtgtggcccgtgccgtcgcgaaatgcctaatctggtagaggcatacgccaaatacaagaacaagaatttcgagattgtaggcgtttccttagaccagagcggtgattcctggaaagaggctatcaagaaactgaatatcacctggccgcagatgtccgacctgaaatactggaactgcgaaggcgccaagttgtatgccgtaagcagcattcctcacactgtactgattgacggtgacggaatcatccttgcacgcggcttgcacggagaagaattgcaagaaaaattggctgaggttcttaaataagcaaagaaagccggcagaatataagaccaacggagatgtgtcaaaatacacttgacgatttcttttaggcacggattacacggaaaacacggatttcacagaaaaagaataaagaaaatttgtgagatccgtgttttccgtgtaatccgtgcctaaaagaaacaaatagtaagcggattttagttttgacacacattcgttgattttatagaattggcttgcggccacgcagaccggcagactgaaatacgcaaggtcataataacatgctcagatgaacagcgtgtgcattcagactgagaatatacggtttgccatatccttagccaacctcacagtcttccactgtttcacctcatcctcttccgaaggattgagaaggttatccgcatcgggcagacagagtgtcaaatgcttcatcggtatataattcagcacttcttccatcttggcctgcaattcatccagttcttcctcatcggggtaataagaaagcacgaagccaaacacagcttcccgttcatgcacaaaccacagcagacggctacggtcgcaaattccacaatcgtaattcaagaagtaagcatccgccccgtgcaaccgtatcaacatatccgttgcggcatgaaacgctacaaacaatccttcgggacgctcgcgcagtacccggttgttaagacgggcagcttcatcggtcagcatggatttgactccctcaaactgtacataacggcaacccgcctcatacaacccttccaacaacttcttataagcgacagccaaatcatccaacagtatgttcaaatccggataaaccgacttcaaacaccccgcttccgtttcacgaagaatcctcatcaacattttgccgggcgacggtatatgctgctttggcaatacattttccgcggtattctttagcagaaaaacaaaatcttcaaggatagggtgatgaagcaaaccgattctgccagtcacttccagcttcttttccaatgaagaatcagcattgtttctgcaacggataccttcccagccttccaaaaagtcataactccgaaatccgccatctgtcacaacctctataccttccagcttcaatcgctccattaatttgcatatttccttattttcaatggcacgcaatgccgacaggctgatttgcccgtgctgatatcggtttcttgcatcccgcaacgtaaaaggtacacataatgctcccgcaatatcgaccttaaaaggtggaaacagttttcccatattcacttttcttttaactgataatagttagaaattcaagtctttaccctattcatacaaagaacaaagagaagcaaatataaccaaagtatttaagaaaacaacaaataaaatccctatttctcatctgtcattttgaaatagattgacagatatattatctcataattatcaataagatacaattgtaaaagcatcgaattctataaagttttccattttacaacaaagcatatttgattatcaacacattaaccatttttaatccaacaaaagttttccaaaacagaaaacttacagaaaactatcatacctttgtttcgcaattaactcctatttgtaaaatctaaaaatacaatcaacatgatacaaacggtactcaagcgtgacgggcgcatcgtcggcttcaatgaagagaaaatagtaactgccatccgcaaggccatgctccatacggacaagggagaagacatgcaactgatacgccagatcaccgaccacatctcctttaagggcgatgcccagatgacggtggaagccattcaggacctggtggaaatggaactgatgaagagcagccgtaaagatgtagcacagaaatacattgcctaccgcaaccagcgtagcattgcccgcaaggcgaaaacacgcgatatgtttctggaaatcatcaacatcaaatccaacgacatcacccgcgagaatgccaatatgaacgccgacaccccggcgggcatgatgatgaagtttgccagcgaaaccaccaaacctttcgttgacgactatctactgagcgaagaagtgctggatgccgtcagccaaaactatctgcacatccacgataaggattattaccccaccaaaagcctgacatgcgtacagcacccgctggaccgcatccttacatacggcttctctgccggacacggagagtcgcgccctgcgaaacgcattgagaccgccagcatactgggctgcatctcattggaaaccgcccagaacgaaatgcacggcggacaggcgattcccgcgttcgacttctaccttgctccctacgtgcgcaacagcttcatcgaggaagtaaagaacctggaagagctgaacggtgaggattactcacatctctaccggaaagagctcaccgattacctgcaacagccgctggacggcctcaccggcgagcagcgcatcatccagcatgccgtgaacaagaccgtagcccgcgtgcatcagtccatggaagcgttcatccacaacatgaacacgatacactcgcgcggcggcaaccaggtggtattcagctccatcaactacggtacggatacttccgccgagggacgctgcatcatccgcgaactgctgaaaagcacgtaccagggcgtgggcaacggcgaaacggccatcttccccattcagatatggaaaaagaaacgcggcgtaagctatctgcccgaagaccgcaactacgacctctaccaacttgcctgcaaggtcaccgcacgccgtttcttcccgaacttcctgaacctggacgccaccttcaaccaaagtgacgactggaaagccgacgacccgaaacgctacgagcacgaagtagccaccatgggatgccgtacacgcgtattcgagaaccgtttcggccccaagacatccatcggacgcggcaacctgtctttctccacaatcaacattgtgcgccttgccatagagtgcatgggcattacggataaggaacagcgcatcgcccgtttcttcgccaagctggatgccatgctcgacatcaccgcacgccaactgcatgaacgcatggagttccagaaaacagcgttcgccaagcagttccctctgctgatgtccgctttgtggataggctgcgacaagctcaaaccgaacgacgacatctcgtccgtaatcaatcagggtacgctgggcatcgggttcatcggtctggcggaatgtcttgtggcgcttttgggcaagcatcacggagagtcggaagaggctcaggaactgggactcagaatcgtgacttacatgcgcgaccgtgccaaccagttctccgaccaataccagcataattacagcgtactggccacgcctgccgaagggctgtcgggcaagttcacacgtgtagaccgcaagaagttcggctgcctgccgggcattacggaccgtgattattacaccaactccaaccacgtgcccgtgtactacaagtgcagcgcccgccataaagccgaaatcgaggccccctaccacgacctgacccgtggcggacacatcttctacgtagaaattgacggcgacgccacccacaaccccgaagtcattatgcgtgtggtggacatgatggaccggtacaacatcggttacggctcggtaaatcacaaccgcaaccgctgcctggactgcggatacgaaaactctaccgtcaacctggaagcctgtcccaagtgcggcagcacccacatcgacaagctacagcgcatcaccggctatctggtaggtactaccgaccgctggaatcaagccaagctcgccgagctgaacgacagagtaatccatgaaaattaaaagttgaatagtgctttccattcttgatataatagaagatactacggtggacggtccgggattccgtaccgccatctacgcagccggatgtcccaacggatgtccgggctgtcataatccggaatcgtgggacatcaaccgcggacgctggatgagcaccgatgaaatactgcaaaaggtgcttgccgacagctttgccgatgtgacattcagcggtggcgaccctatgtaccagcccgaaggcttcaccgaactggcacatgccatcaagcggcagagccggaagaacatctggtgctatacggggtatacatttgaaacgttactgcacaatccccgccaggcaaaactgttggagtacatcgacgtgctggtggacggcaaattcaaagaagagctgcgtgacgaagacctctacttccgtggcagcagcaaccaacggctgatagacgtacaagcgtcgctgaaagcccaaaaagcggtggattacgtttacaacccgaagttataactcctttcactgtattatatctttctctatatagacataaacctatacctccattgggtacaatgaatatcaccgtgggataccgacaataccaacggttggtattcatcgtaccctatgttggtagccgttgtaccaaacgttggtatccgacgtaccaaacattggtacttcccataccagcctttggtactttccgtaccccatagaggtatccgccgttctccccctataaaccataaaggattgcttacgccggcaaaaaggaagcaagcgtttctccaaccgccctgcctacttttctttatatattttcagccatataaaattctttctcgtttttatttcctacatttgccaccgtcaaaagaatctataacaaaataccgaacccgtgaaacgcaatcaatcccctgcacagacgatacgcttccgccgctggagtcggaagtcgtatgccgcattcgccagcataggcagatgcgtcacaatcggttgtctgcgcaagaacgtggccgacagttcgctacggaagcaggacacggttcggactatcccctattctattcacaccatgactatcgacgaactgaaagcccgggtgctggcaggcatagacatatcgcccgaccaagccgcctggctggcgaataccgccgaccgtgaagcgctttacgccgctgcacacgagattaccgtacaatgctcgcagcatgagtttgacatgtgctccatcatcaacgccaagtcgggacgctgccccgaaaactgcaaatggtgcgcacaatcttcccactatcacacccaagccgacgtttacaacctactctccgctgaagaatgcctcgaacaggcacaatacaatgaacggcaggatgtcaaccgcttctccctcgttacgagcggacggaaaccctctcccaaacaattggaacaactctgtaacacagtgcgctacatgcgccgccactcatccatacaattatgcgcatctttaggcctgctggccgaagaagagctgcgcgccctgcacaatgccggcgtcacccgctaccactgcaacctggaaacagccccctctttcttccccaccctgtgcagcacgcacacgcaggaagacaagctgcgcaccttgcaggcagcccgcaacgcaggcatggacatttgcagcggcggcatcatcggcatgggcgagacgatggaacagcgcattgagtttgctttcaccctgaaagagctgggggtacaatccattcccatcaacctgctcagccccattccgggcactccgctggagaaccgcccgccgctgacggaagaagaggtattggtgaccgtcgccctgttccgcttcatcaaccccaccgcctacctgcgctttgccggcggacgctcgcaactgagcaaggatgcggtgaagaagtccttatatataggtatcaactcggctatcgtgggcgacctgctgacgacgctcggctccaaagtttccgatgacaagaaactgatagaagaagccggatacgagttctgcggttcgcaattcgaccgcgagcacctgtggcatccatacacctcgaccacccatccgctgcctgtatataaggtgaagcaggcggacggggcaacgattacgctggaaagcgggcagaccctgatagagggaatgtcctcctggtggtgcgccgtgcacggttacaatcatccggtactgaaccgggcagccacggagcagctcggcaagatgtcgcacgtcatgttcggcggactgacgcacgaccctgccatcgagctgggcaaactgctgttgccgctggttccgtcgtccatgcagaagatattctatgccgactccggctcggtggctgtggaagtggccctgaaaatggccgtacagtactggtatgccaaagggcaaggggcttcgtcgcagagtacctccgtcaagaagcagaacttcgtcaccatccgcagcggctatcacggagatacgtggaatgccatgtcggtgtgcgatccggtgacggggatgcactcgctgttcggctcggcactgcccgtgcggtacttcgttccgcaaccccgctcgcgtttcgacggcgaatggaatccggaagatatccgcccgctacaggaaaccatcgaacagcatgccgacgaactggccgccctgatactggagcccgtggtgcagggtgcaggcggcatgtggttctatcatccgcagtatctgcgcgaagcggcaaagctatgccgcgaacacggtctgctgcttatcttcgatgaaatagcgacgggcttcggacgcaccggaaagctgtttgcctgggaacatgccggagtagaaccagacatcatgtgcataggcaaggcgctgaccggcggctacatgacgctttccgccgtactggccaccaacgaagtagcggacaccatctccaaccacgccccgggtgcattcatgcacgggcccacgtttatgggcaacccgctggcatgcgccgtggcatgtgcatcggtacgcctgctcacgtctcccgaatacaactggcaggagaaggtggcgcgcatcgaagcgcagttgaagcaagagctggaacccgcgcgccaactgccgcaagtggcggatgtgcgcgtactcggagccatcggcgtgatagagaccaaacgtccggtggatatggcatggatgcaacggcgcttcgtcgaggaaggtatctgggtgcgtccgttcggcaagctggtgtatctgatgccgccctttatcatcaaaccggaacagctcggcacattgacgaagggactgattaagattataaaagagataagagattaaggttacaaaagaaataagggaacaataaacttccttatatttcaaaaacaaacatagccaatgagcactatatcgcacatgcagcaagagctgcaacttcttgaagagcacagcaacctgcgccgcctgccccggatggtacacgacggcagggatgtcatcgtggacggcaaacgcatgctgaacctctcgtccaacgactacctggggctggcatccgaccgggccttgcgcgaggaattcctgcgcacgctcacccccgacacgttcctgcccacctcttcttcttcccggttgctgacgggcaacttcaccgtttacgaagagctggaagccgaactggcacgccttttcggcatggaatccgcactggtgttcaacagcgggtatcatgccaacacgggcatcctgcccgccgtaagcgatgcacagacgctgatacttgccgacaagctcgtccatgccagcctgattgacggcatccgcctgtctgccgccaaatgcatccgctaccgccacaacgatttggcacaactggaacggctgctcaaagagcaccactccgcctttcgccaaatcatcatcgtcaccgaaagcatcttcagcatggacggcgatcaagctgacctgcccgccctggcagaactgaaacgccggtacggcaatgtgctgctctacgtggacgaggcccacgctttcggcgtgcgcggcaggcagggactcggttgcgccgaggagtccggctgcaccggagacatcgacttccttgtcggcacgttcggcaaggcggcagcatccgcaggcgcttacatcgtatgccggaaggtgatacgggaatacctcgtcaaccgcatgcgcacacttatcttcaccaccggacttccccccgtaaacatcgcttggacactgtttgtcgtgcgccggctggcagacatgcgggaacggcgcgagcatctggcacacatcagccggacgcttcgcgaagccctgcaggcacaaggatacgcctgccccggcgccagccacatcgtcccgatgattatcgggcagagtgcggataccgtgctgaaagcagaggccttgcaacggcatggcttttacgccctgcccgtgcgcccgcctacagtgccggaaggaacgtcgcgcatccgtttttcgctgacagcggatatcaggcaagaggaaatagaagaactgaagaaaagaacggagaacttgaaataacccgaaaatactttaagcaatgcccgtaacagacggcattggaatattaaccgaaatgcatcttcatacagaagggcatcttcatctaacaaaaaagaacaatgaaacaagtgtacattatcaacgagaaccatccccagttactccttttctttgccggttgggcagcggacgaaactcccttcaagcagtaccgtcccaaaaacatggactacatgatttgctacgactaccgcacgctggacttcgactattccatcttcgaccgctaccggcaagtaaacgtggtagcctggtccatgggtgtgtggatgggctctctcatactgagccaagtctcccgggacaaggtgttcagcctggcgttcaacggaactacataccccatcgacaatctggaaggtatccccgtgaacacctttcaggctactctcgacggacttacccccgcaacgctccagaagttcctgcgccgcatgtgcaaggacagcaacgcctacaaggcattcatggaagtgactccccaacgggacttcgacgaaataaaggaagaactgaggctcattctggagcggtacttcgatatgttcggagacgcaaataacaaaagttacgacgaggaaaaggaagataagtatgaggcaaacatcgaaaagtataactacgaatacaactacgccttcatcggcaagaacgaccggattttcccgcccgaaaacatggagatgaacttttgcgacctgatagactgccatccggtcctgacggacaacgcacactatgacgagtccatgttccgctttctgctgcaagatatgtgggagatgactgccagtgaattcagatatcatgtcaaaaccataaatattgaatgaaacgaaacagaaaatgatttgcagtaccattcaatccatcgacaaagccctcgttgcaagacgctttgcccatgcacggaatacgtacagccgagaagctcttgtgcagcagcaggtggcggagaaaatgctgcgcctgctcacgaaacatgcctgcccgtctgctgcggcacacaacggcgagggcaatacgcgaagtttgtcaggcaacgcctcccccttccgccatatcgtagagttcggatgcggaaccgggtgctactcccgtttgctgctgcacgcattgcaaccggaaactctgctgctcaacgacttgtgtcccgaaatgagggagtgtatctgcgatttgttgccggccggtgaacctctgcctcataaacctctactttacgatgataaagtagaactctacggcgctaaagtgccacttgagaaagctaaagtgccactttacggaaacccgcttatatcccctgccgtcagctttttgccgtgtgatgccgaaactcttgatttcccgcaagggacagacctgataacgtcctgctccaccctgcaatggtttgccgatacggaacggttcttcacccgctgccaccgtttcctatcggacggtggcattctcgcattcagcactttcggcaagaggaatatgcaggagatacataccctgaccggacacggactggagtacttctcgctcgaagaactgaaagccttgctgtcttcccgcttcgagattctttatgccgaagaagagattgtctccctgccattcggcactccgctcgaagtgttgcaacacctcagacaaaccggcgttaccgggacggaaaagagagtctggacgcgcggacgcctgcaaagtttctgcgaggaatatatccggatgtacggcaaggacgaccgtagtgtttcgctgacttatcacccgatttatgtaatagcgagaaaaagaggaaggacaaagtaagaagcataagagatgaagtacaaaatacgaagcataaggtacgaaatgtaaagtataaggtatgaagtatgaggtataagagattttaaaataaaggatgaggaattcggtaaacacataggtgataagaggtatgagcaccgatgtttaatcagttaatttacataaagatataaagaattatgaaaccaaacatttatttcatcagcggcattgatacggatgccggaaaaagctattgcactgcctggtatgccaagcagctatcccggaacggacagcgcatcatcacccagaaattcattcaaaccggcaataccggacactccgaggacatcgacctgcaccgccgcatcatgggcaccggctatctgcctgaggataacgaggggcttacaatgcccgaaatcttctcctatccctgctctccccatcttgcggcacgcatcgacaaccgtcctatcaacttcgacaaaatagagaacgccacgcaggagcttgcccgccgctacgacaccgtactcgtggaaggagccggcggactgatggttcccctgaccggagaatatctcaccatagactacattgccgataagaactatccccttatcttcgtgacatccggcaagctgggcagtatcaatcacaccctgctaagccttgaagccatcgggcaccggggaatcacgctcgacaccgtattgtacaacctttatcccacggtagaggacaagaccatacagaacgatacgatgcaatacatacgggagtatctttccaggcatttccccggaacgaagtttgaggttgtgccggagataaataatctgtatcaaaccatgtaatctgtgacgaatttcgtacctttgcacgttataaaacgtcataggacacatggaagcatttacattcgatacaaccgagcagatattactcgcagcaacgggaactctttttatcatccaagccctttattacctttgcctgtacaaccgcatccacctgcgcagccgtgccgtgaagcgcggcaatgtacacttctcgcaggagctcccgccggtgtcggtcatcatctgcgcacgtgaagaatgcgaaaacctgcggcgtaacctgaaagctgtgctggagcaggattatccgcaatttgaggttatcgtcattaatgacggaaacacggacgaaagcgaagattacctcaccttgctggaagagaaatacccgcacctctaccacagctttgtccccgactcttcccgctacatcagccggaagaagcttgccgccaccctcggcgtgaaagccagcaaatacgactggctcgtctttaccgaagccagctgctgcccgcaaagcaaccaatggctgcggctgctggcacgcaacttcacctcgcgtacgcaagttgttttgggatatagcggctatgaacgcggcaaaggctggctgcacaagcgcgtagctttcgacaatctgttcacttccatgcgctacctcggctttgcgcttgccggaagcccgtatatgggcatcgggcgtaaccttgcctaccgcaaggagttgttttacgaacacaaagggttctctgcacatctcaaccttcagcgcggcgatgacgacctgttcgtcaatcatgtagccactgccgaaaatacccgcgtggaaaccgatgcggatgccaccgtacgcatgcaacccgtattccgcgcaaaagactggcgggaagagaaaatcggttacgcatctaccgcccgcctctatcacggcatgcaacgctggcttgccggactggaaaccactacccgcctcgcgttccatgccgcatggatggctacgctcgcaacagccatactgcatttccactggttggcggcaggcattgcattcctcgtctgtatactccggtttatcctgcaagccatcatcgtcaacaagactgccaaggatttgaacgaccggcgcagatactactggtcgctgcccgtgttcgatgtactccagccgctgcaatctctccgctggaagctctactgtctgtttagaaagaaaagcgaattcctgagaaaataaatgaggaattaccctactcgtagcgcatggaatttgccggatgaatccgtgtaatgaggtaggacggtcctaacagcatagcgattgaagccagcagcgtgccgacattcagcaacaagaaaagccaaagattgaaagatacgggaacggtgtccatataataggtttccgggtcgagacggaacaagccgaaccacttctggataaaatagaaagccagtcctattacattgccccacagcattccttttccgatgaggaataccgccagccaaagaaacagtttgcggatagtgaggttgttcgctcccaaagatttcagaacgccaatcatggaggtgcgctctatgatgattatcagcagtcccgaaaccatggtaaacccggcaacgccaatcatcagaataaggataacccatatattgacatccaagatgccgagccatgcaaaaatctgcgggttcaactgctctacgttgagtacacagtattctgccccgtaaggatcgggatgccggcccacttcatcggctatccggtaggtggtttcttccagtttatcgtagtcgtacagctccagctccactccgctcacctggtcgggatgccacttgttcagacggttcaccaggcacaggtctgtaagcaggaacaggttgtcgtattcggaaaagttggtctggtagatgccgacgattgtcaggcggcgggcacgcacatcgtcctgtatataataggtgtctatcttgtcgccgagcttcagcttcagtttgtcggctatcgcctttgaaatgaccacacggttggtagaagccgagtcgctgaactgcggaaactctccctctatcaggtgacggcggaagaaggaactgccatactccggccctatacctttcaataccatgccctgaaaggcatcggacgtctttatcatacccggcttggtggaatagcgttgcacgtgtttcacaccggaattatccgcaagagcggcaagcatactgtccgtcacggctatggggcgggtttcaaaagaacgcgccgcatccgaattgctaatctggatatgcgagccgaaaccgattatcttatcgcgtacctcgctcttgaaaccgattatcaccgacacggcaataatcatcaccgccaacccgatagcaacaccgatagttgctatcagcacggcaggacgggaaacttgctttccgacatcggaactgcggtaaatacgcagcgctatgaaacgggataaattcatcagtagtattatatatcttctattccgtacgtcccggataggcttcgagcgctttggaaagcacaaacagcgcacggattaaatcttccttcttcaagacgtaagcgatgcgcacttcgttgcggccggaacccggagtggtataaaagccggaagccggagccatgaaaacggtctgcccttcgtactggaattcggaaagacaccatgcgcagaacctgtccgaatcgtctacgggcagcttggccacggtatagaacgctcccatcggaatgggtgaatatacgccggggatacggttcagaccgtcaatcaggcatttacggcgttctacatactcgtcgtaggtatcgcgcagatagtcttcgccggcatccaaagacgcttcggcagcaatctgacctatcaacggcggactcaaacgtgcctggcagaacttcataacggcatcgcgtatctctttgttcttcgttatcagcgcacctatacggataccgcattcggaataacgcttggaaacggaatcaatcaggactacattgttctcgataccttccagatggcaggcggagatgtatggagagcccgtatagatgaactcgcgatacacctcgtcggagaagaggaagaggtcgtacttcttcacaaggtcgcgtatctgattcatttcacggcgggtataaagatagccggtaggattgttggggttacaaatcaggatggcacgcgtacgttcgtttatcagctcctcgaacttctccactttaggcagcgagaatccctcttcgatggtcgttgcaatcgtacgtatcctggctccggcagagatggcaaatgccatgtaattggcataagccggttcgggcacgataatctcgtcacccggattgaggcatgccatgaaagagaacagcaccgcttccgaaccgccggatgtaatgattatgtcatcggcagtgagcttgatgttgtacttatcgtaataccccaccaacttctcgcgatagctgcgataaccggcactgggactgtactccaataccttacggtcaatattacggatggcgtcaatcgcgacttgcggcgtaggcaggtcgggctgtccgatattgagatggaatacatggatgccccgttgcttggctgcatctgccaagggagccagctttctgataggagatgcgggcatctccatcccgcgaatagaaattgttggcatgagtttttatatcattttatcatttaagttgcaaatgtagtgatttatttgataccaaagggaagcaaagacataaaaactttaaaaaccttatctatattaaaaacactatgctatttaaaaagaatcttgtacctttgaaatagtaaacaaatgagcaaccacaaccgttttatcttaaaccaacttttaaaatagtaagtaacgctatggtcatcaacctaataacttttgcttcactgctacataagcaagcatcagtccgcagttcccatgaaataatcctgaacgaactggaaaaatatttcaccgtcaatttcatagattaccaagatatcaacaagctgtctcccgacgatttcagcatcctgttcatcgccaccggcggagtggaacggctggttatccagcatttcgaggctcttccccgccctgccatcatcctggcagacggtatgcagaactcgcttgccgccgccctcgaaatatcttcctggctgcgcagccggggaatgaaaagcgaaatcctgcatggcgaactgtccgaaattatcaaacgcatttttgtactgcacagcaatttcatggcgcaacgcggcctctacggaatgcgtatcggcgtaataggcactccgtcgagctggctcattgccagcaacgtggattatctgcttgccaaacgacgctggggagtggaatacacagacatcgcactggaacgtgtatacgaatattacaaccaaatcacggatgatgaagtaggcgaagcatgtgccggccttgccggaaaagcgcttgcctgccgggaagcgtcgcccgaagatatgataaaggcaatgcgcctgtaccgcgccatccggaagattgtggacgaagaccgtttaagcgcactcaccctgagttgtttccgcctgatagaacagacgggcactaccggctgcctggcgctttccctgctgaatgacgagggcatcattgccggatgcgaaggcgatttgcagtctgtcttcaccatgctcgctgccaaagtgctcacaggcaaacctgctttcatggccaatccttccatgattaatgcacgcaccaacgaaatcatactggcgcattgcaccatcggcatcgcacagacagagcagttcatcatccgcaaccactttgaaacggaaagcggcatcggcatacagggaatactgcctaccggagacgtgacaatcgtgaaatgcggcggagaatgtctggacgaatattacctcggcacgggtacactgaccgaaaacaccaactacatcaatatgtgccgcacgcaggtacgtatcaagatgaacgccccggcggaatatttcctgagaaacccgttgggtaaccatcacatcatgctgcatggcaactacgaactgatgctcgacgagttcctgcaatccaacggatgcaaaaggatagaataaactctaaaaccgaccggcaatcatattacatcatcactcatgcggacttcaaagcgggttcctctgcccggctttgaagtcaccgtaatggttccgtgtatacgttccacaattgtctggcagatactcaaccctaaaccggccccttgcgtaaagctgtccgccttatagaaacgctcgaagatatgcttctggtcttcatcggatatacccgctccggtatcttccacaaagacggttgtatatccggattcatccactctatatcctaaagtgatgctcccttgcacggtaaacttcttggcattgttaatcagattattcaaaacctgcttcaagcgtacggcatcggtagtgatatacttgtcggccccttccggaaaatcggtgcataattccactccctgcggcatgctcagcctctgggagtcgtaaacttcctgcatgataaacgtaagattgtaagaagagaactgaaaatccattgtgcccgattcaatgcgcgagaggtccagaatatcattaatcagagccagcaacaacgtgcagtttatattgatagtctcgacaaactgctgtacttcttccgaagaaaaggcttgcaggtctttcaacaaatcggagaaaccgactatcgcattcaacggagtacgtatctcatggctcatgttggcaaggaacgccgatttcagtctgtcagcctgcaaggcacggtcacgggccgcgataagttcctcttcggtgtctttataacgctggatactctggcatacacccaataccctataaggtatatctaccgtgagcccctcataagcggtactccggaactcccaccactcatatccgccatctgcgttttgcagccggaaactcatgcgcgagttcggctcatgccccagcatgatattgtcgaaatgcctgcatgtgcgggaaaggtcttccggatgaacaatccgatccagttcttctctcgagatatagtccgtattgtcgtagcaattgaaacgttgcagcagtccgtcgggaaaatggaagcatttcaaccgtgtgttgtactgccacggataaatggaactttcctcaatagccatattgaaaaaacgcttctgcatctcttcttcggatatattacggcagacaattgccatacccgtcagtttgtctttcgcaaagataggaaccacctcgcccgaaacagggaaataagtacctttggtattctcctgcatgaatgccttttccggtataatgacaggcttcctatcctgtatcacctgtttcaacagagcctgcaggatattctcgccattcatgtaaatatggagaatggaaccggcaacctgtccttcgtacggacgtgtcgtatacatttctgcaggcaatcccagcatctccactaaagcccggttcacaaaatggattctcaaatccatatcatacgtaaccagtccgtcgcgaatagaacagaatatcttatcgaattcgtcccgctgttccaccaggcggtgttgtatcagcagacgggtctgcgcatgtatccgcttgcgcgattcacgccggttgctccgatagagccagactacaagaaaagccaacgcacccactatcaccgaatagaacagaataaaccaggcctgatagcggtccatcagaggaatgttcaaaacgattccccgtttttcaacactatccacatctacatggaagaagtccaactgtttgtagtcgaacaataacttgccgcccaggtctcctattccgaatgaagcaggcgaccggcccttcagaatacttgccgcctgtatgcccgcagcataagtatctgccgccggttctacatcataaacacataaaacaccgcttgtcattgccaggttttgattggcaaatacaggagctttcaatttcagggaaagaaaaggaatccacttaggggcgataacaatgtacttatgggcatgataatcgtaacaaatagacgttatgagagagttgagggactttctctgcacattcagttccttaaaactgtattcgggatgtttcttatgaaaagactcccaggcttcttctaccgcttccactcccttagcactcaaaaaactgctgtccgacaggcagacaatctccttacgtgcaggaaacaaacgtatggcttcctcaagcaacacattaaaatccgttactgaagtgaagcccgagacattcggcatacggtcgaacaacttcctgtcaggatatttaatgcccgaaacaactaccggtatctgatacggcaaagaatcgccgcagtgagtcaaggtaaagaaagcctcatcgctggacgtcacaatcaaatccgttttccgctgtctggcacgttcgcatatgcggcgcatgatgacacactccgaagcaaacgtccaaaaatcggcattcagatactctataaccacgtttgcttttacaccgccctcttccaagccgtcctgcaaaccggcaataaggttattatgccaggaagagctgtttgtgtatgattgtatgaaaagtacattataattggtttccgcagccgaaagcgtccccgatatcatgcataagaaagctaatgaacatgttaagaaaaagtgttttcccattccgtttgttttgatttgtctgcgtaaacttctttataactacgcaaatatacaagcttatatcgagaatatacatcttttcttaaaaaactttattcatcatgcaatgcttctgccgggtgtactttcatcgctccataagcaggataccagattccggcaacaatcatcagcgccataagcagccatgtcaaggcaagagccggcaggaagcgtccggcatcgaaaggcatcttgcccacatccaccagttcggcataaccgatgttgaaagcgatgacagccgccggtacggccgccagcgtaagcagcaacaccccttcgtacatgagacaggagaaaatcccccggcgcgaactgcccagcgccagcctcagcgcaacctctttacggcgttgctgcgtacggaaccagaacgtgccgataacgcccaagaagatattcaacagcaggaaaccgagcacgcaaagctgcgtcttccattcgttcatgtcttccagctcgcagatttcgcgcaaatggctgaaaggtgtaatgtccagcagatacagattacctacctgataaaggcggtcggcatcattcatcagcttttcggcaaagttcttatcggcatcttcggaaacgcgcaggctgactgtgacataacggggatcgccgaaattccgtaacctcttcgcattgagcggaagggctgcaaaagccccgccccactgcgacggagtatggaaatgcgaccaacgcacgggcgtgcccaccgcaccgatgcgacggcgaacgtccttaccgtagttcaacagcaagacttcccgccctggcaaggacgcactgcctcccaattccggatgtccttcggtgagattggaagataccaccggctcgtcattgcggaatgcagcctctaccttggcaaactccgcttcctccgtaaaggcataacggaacacgcggaaaaagtccgcctccacccaaagaagacgaacattgacagccacagagtcaatacccaaatcaataccgttactgccctcattgtacggaaagcagttttgcgaaagggcaacggcctctacgccggggcagtggcgcagcctgtccgtaagccggagcaagtcgtccatatcatcatcggcggtcagctccggattataaagaggcgagtcctctcccagcttgcttacggtgatgttgtagcagtgctccgtatcgaatcccatcggagcgtgatagacccgtgcggtgacaagcgtccagtccacaatataccacagcacgacaaagaccagcagcagctccacaaagagaaaaagattgctgttccactcgttctttatttgtttcaatatcgttttcataaccatcgtttacctttgattaatcgcatccgttatattcattctcgaagccctccatgccggtatgcctgccgaaaggatgttcatcagcaaacagaaaccgaaagcagcaaggaatgcccagggcgaaagcagcatgcccggtgtcagggcggtttccccgctgaggtaggcattggtgctgttgttgaaaaggaaaccgttcagcaggaaggtggcggcgtaactcagcgcaagtcccaacacgccggcaaacaatgtcagcaacaggttctcaaagaatatctggcgtatcagttcgccacccgtagccccaaaagccttgcgcacgcctatctccgccatacgtctgcgcatacgggagagcgtcatgctgctcaggttgatggcaggcacaagcaacaggatggcgataacgagcatatagcgcaggataatggctttggtatcgggcgtttcgctccacttgcggtaaaggttggcaaactgttcatcgggttgcccgcgatagaacacttccgagtcgcgcagactgtcgttatacttacggcggagttgctccgcctcctcacggatagccgggaaatcggctgcggagcgcgcaaggataaccgccctcatctgccccatggtctcctcccaccacgtcagccgggcaatgtctgtggacgtatagggaacccacacctgcgcataggcggaagtggccagtacggacacatccgtcaccacaccggatatacggtattccacatagttcaactgtaccgtctttcccgcaacgtccgtcgtgccgaacaggcggcgcgccaccgcagcgctcaacacggcgcatggcactccggcatcgctgtcggccttggtaaacgccttgccgctgagaaagcggaaccggaagatatgccagaaggcgtcgtccgtctgcaccatgtcggccgtgaccttgttgcctgccggcagggacacacgtaccttttcgggcaaggaaaccaacgttaccgcctccgccgtagtgagactcttaaagcactcgcgccccgtacgcaccgacatgcgggcgttggatgaatcgccgtcgcttccgcccttgttcttgacggacatggcagacacatacagcgaacggctgcggttcacctcaggctcgcagtccacgagccgcacctgaaaagtgatgacaagtaccataatcatacagatggccaatgccgtacccagtacggaaacccatgttatgatgggattctcgcgcaagtgatatagcgcttgctgaaagtaaagacgtatcatattccgttattcgtttaacttcctaaaatcattcatcatgcaaagcctctgccggttgtaccttcatcgccctgcgtgccggaatgcctataccaatcgcaatcatcaatcctatcagcaggaagctgatggcagcgcaaagcaataggcgctcccactccaaagtcgtaccgttgcgccaggagttcagttccatgcttgccagattatagtctatgagcaaagcaacaggcgtgacaagcaacagcaaaagcagcccctcgcttatcagacgggtgaaaatactcatgtccgatgctccatgcaccttatgcaaggcaatctccgaacggcgttgctgggtacggaaccagaaagtgccgagcagtcccagaaatatattcagcaacagaaatcccatacccattacgtaattgcgcaggtcattgctccatgtctgctggaaattacggcggatgtccttaaaggaacgtatttcggagataaagacattgccgatacggaactgtttctcactgtccgctttcaggcgttggatgaaatcatggtcctgattttcgcggacacggacacagagttccaatcccgtatcataccaatcgagtttataaagaaaggtatacgaatcgcgggcctgctcgaaatcattgtaacgtacattctccaaggccgctcccaaccggtaggtttgtatcgtatcgccgaaaagccggaagctcttgcctacgaattccgtcagcggacggccgtacttccggtaaaggttgtcggaagcaaggaactctcccttttccaacatcccggcaagctgctcgggcgtctcgccacgtgtgccctgataacggaacacacgcacaaaatcgggagtcaccaaacggcgtatcgtccaattaccggagatcagcgtatcgtactgcaccagatctgtggagttactgccattatatggatatgagttttgcgaaaggctcaccgcctctatctccggacgacggcgcagacggtccacaagttcaagaatatcggcatcttcctgctcatcggtctggttcgggatataatcgggactcttatcggtaagctttcccatttcgataaggtagcaatggctgatgtcgaagccccgcggctccagataagttgccgtacgcgtatagagatagtccaccacaaaccacatcacaacgcttacaaccagcaattccaacgccagccacaggttattgcgccattcattctttatctgtactaaaagtttcttagtcatttctttccgtaattaatagttagcgacaagcgtttagtgtaaccgtcctcccaatgcgttcactatcccgatgcgggaagccttccatgccgggaaaccgctgctcatcagattcagcacaaagcagaacagcaacgcccacccaaaagtggaagcatgaagcagaatggaagcatccacttccggcgggttcaaagtctgactgaattcctgtgcaaaaagcaaggtgttgcccacgtatgcaaaggccacgctcaacagcaaaccgacaacacccgccaataaagtcattaccagattctccgccacaatctgccctatcagctccatccgtgtactgccgaaagcacggcgcactccgatttccgatacccgctgacgcaagcggctctgtgtcatgctcgaaagattgatggcaggcactatcagcagaatgacgaagatgacaatccgctgacggcgcgccgcattcacatccggttcgatattggcaccgaaagcgatggcattcttttcctggtcgtaagggcggttacggtaaatcagcttccagccgttctctccgataagcgtattatactctgatttacggcgttctgcttcctggcggatagcgggaaaatcattccgactgtgcgccagcatcgtacaactcatcattcccatgtgccggtcgttccacgtttcattatccatgcccgttgaggtatacggaacccatacctgtccgtaagcacaatccgccagtgtagacacatccttcacgacaccggctacgcgatagggcgcatggctgaggagaaactcacgccctgcaacatcagtcgttccgaagaggctgcgcgctacactctccgtaagtacggcaaccggctgtccggcatcgaacacggctttatcatagggctttccattgataaaggaaaagtcgaatacgtgccagaagatgtcgtccgtctgccgtaaatccacactgactgccggtttgcccggcaaagacaccggagtggatacggggaaaatggtatagatagtgaccgcttccggcgtcttcaacgattgaaaacattcacgggctgtctgtacactcatcggtccgttgcttgtaccgtctccccaattcgagttggagatgctcattgacttaacgtgcagaaagcggtcgcgattgctttcgggcgcaaaaggagccacctttacctgctgcatcattaccaccagcataataaggaatatggcaagcgcagtaccggctatgctgacggcgctcatcatcggctgctgccgcaactgcgcccaggcttgtgcaaagtattgctttatcatcttaacggcctattttcaaattatctgtatttactcctcctatgcctcctttggaaatatccgcacgtccggcggttccgctcaaagtgacgctacccacaccacccattttggcagacaaatagtcgcaggctacatgaatatcggcgctgcctactccacgcaaggcaactttcagctcgttgcacgtcaagtcggagacattcacttcacccacaccttttatctcgaatgacacggcatcgagcttcaagggcttctcacatttgaattcgcctacaccggtaaactccacctccttcaagtcgggagccgaaatccagatagtcacgccatccttctgattgctcctgcgcttgtttttcccgtccttgaaacctatcagcagacggccgtccttcactgtggtctgcgtattcttcacgtacctctccctgccttcaatcctgaaagaataagtgtcactttgtgtaaaatgaattgtccccacagaggttatctcaatggacgagaaagcatccaccttacgtacttcacttacttttgcatcttgtgcacaaacactcagcattacctgcaaaggccaataccaatgcaatgataacacctgctacatcagttctcatatttcttcttttttattttgtttcacattctattcttcgtgcaacgcctctgccggctgtatcttgatagcctgccgtgccggaaaccatattccaatcaccaccatcagtgctatcagcagccatgcacccaacgagcccagcagaaaacgcaggaagctccatttcaccggccaggtggtaatcagttccgtatgtcccattgtaaattcggcaatgcccacgttataacagacaatcatggcgggcagcgtaacaagagtcagcaacagcaatccctcccccatgagcaggcagaatatctgcttcttcgtgctgcccatggcaagccgcaaagctatttcattgcggcgcctacgggtgcggaaccagaaagtgcctatcagccccaggaacacattcaccaacaggaataccaccacaaccgtttgcgtattcaccttgtccacatcgcctttcatcacttcaaactgatattgctgctccgtataaggcacaacgtcggctatgaacatattgtcggtgtccaggtgcggggctatttctttcagaaatttgctccggtaatcgggagagtccatgttttccttcacgcggaaaacaatctgcgctccatcatcccgcaattcggtccgtatcacattctcgtcaattctccggaaagcccactttgcatcggccccatagcgataggaacggaaactgccgatcatgccgcactgcgttaccacattcgcggtatctccgtaccagctcaagggagtatccaaagagaagccgggcaccctttccttataatagtcggccgtaccctcgctcagcatcacataattgccggacgtgacatcattccccacaggcattgccgcaaacggacgtccggcatcttccttcatgcgaaatacccgcgtatatcctccggtagcgtttattatacgcaccgcacaaccgatggtatcctgcacagccagcgagttataggaattattgccgctcatcggcaggctccaatacgacagggcggccacttcaaccgcaggctccctttcgagcttctgcaggatgcccaggtatttgtccgcactcgtcatgctgctgtcccggctttcaccgcccttaatcattgaaagctggtacacatggtctatgttatagcccaacgggcgatagaacgtatacttcaggcatcccagcgaatcgcagagaaaccacatcacgataaataccagaaacaattctgcaagcacccatccgttactgcggagacgcgcccgaatcatacgtaagttatgtactatgaatttcataatcaatctcgctttatttatcgttcaaagaatccacaattgtgtgccgtgcggcaagccatgtaggcaggcctgcgctcagcaggttgatgaccagacagaaaaggaatgccagacagaacaccgtagggctgaacagtaccgacatgctcaggtcgaactcgccggaagtgccggtgttctgattgttggtgaacagccacgtacgcatgccgtacacggccagatagctgaacaccagccccaccgctccgccaatcagagtcagtacgaggttttcattcaagatctgccttatgagtacgccgcgcgtcgctccgaatgccttacgcacgcccagttcgctgatgcgctgctgcatacggctgttgctcaggccgcacagattgagcgacggcactaaaagaacaatgagcaatgccagagcgtactgtatgtacaacatccgcaaatccggccccacgttggcccacacatggttgacatgcgtcacgatttcatcgggctgttccataatgtccatcagcgtttcggcctgtacggcattgatgtctttcacccgcttcgctattccctgcctgatggccggaatatcttcggaagaacgtgccagcgccaccaccgtatgcgattgggcataactccagatggaagtggcatcctgcaacttggcgggatacatgcgccacacttgcgcataagcatccttcgcaatgaccgaaacatcctttaccaccccgcagatacgcgcttcgttacggttcagcagcaccgtcttgcctactgcatccgtagtgccgaacagtttccgcgccacagaagcagccacgacaatggcggacacatcaccgccccggtcggaatcgtcgaatccccgtcctgcgacaaactgcatccggaacactttccagaatcccgggtcggtttccatagcatccactttcaccgcattagtgccgtcgggcatggaaaccagggcgaccgttgccggaacaaatgccgtacaggcctctacttcgggcaacggctgcacacagttcttcatgaaagccggcgaacaggctgtataattattccagttcttgttttccttaccctgcaaatgcatcttgcttatgtagagagagcggttacggttcacttccggctcgatgtcggcatatttcatctgccaggtaatcacaatcgccataatcatggtaatggcaaatgccgtacccaatatgaatatggtactcagcaacgggttctgccgtaaaagtataaaagcttggcgaatggtctgcatttttgagttatgagttataagttatggattatgggggttattctacttgacggccgtcgaagaagcggattgtccttgaggtctgtctggcttgctcttcattgtgggttaccattacgatggtgcgcccgtcttccttgttcagtcgatgcagcagctccatcacttccgctcccattttggagtccaggttaccggtaggctcatcggcaaggattatctccggattgccgataatggcgcgtgcgatggcaacacgctggcactgaccgccggagagctgtgtaggcatgtggcgcatacggtggctcaggcctactttctgcaacacttcctctgccaggcggcgacgttctttggacgatacctttctgtacagcaaaggcagctccacgttgtccagcacattcagcgagttaatcaaatggaaagactggaacacaaagcccagcttccggttacggaaagccgccagttccttgtccttcatgccgtccaccttggtaccggctatttcaatcgtgccgctggtaggtgcgtccagcaaacccataatattcagcaaagtagatttaccgcaaccggaaggtcccatgatactgagaaattcccccttgttcacttcgaggttcacattctccaacgctacggtttcaatctcgttggtacgataaatcttgttgatgccagttaacttaatcataatggtaggtatttaattgttatttcagtttcagcttattcttgttcttatattggctcatgtcgctcaccaccacctcatcgcccggttgcaagccgccaataacttccacaaactcaaagttggaatcgcccaactgcactttgcgtttcacaatctccttgtcggaattgcgtacaaacagttcgtactccccgcgacccacgtagtaagaggcgttggctatgcgcatcacatcctctttcacggcgttcatcacatacacgtccgtcttcaggccggagcgcagacggcggttgttgtcctcgttcaactgtacggtgaaggaaataacaccattcttggacaacggagtgacgctgctcaccgtaccttccagcttctcgctgcctatcttgactatcgccttgccgccggcggcaacacggtcgccgtacgtgtcggctatctcgccctctaccttgaagtggctcaaatcggagatgacggcaatctgcgaaccttccgccacctgcgcgccgatctggttgtttatgtaagtgaggattgccttgcggggcgagcggacctgcgcatcgtccagcgtgcgtttcgtttcggcaagcgtttttctgaagatgctgaagtccagctcctgtacctgatattcggcatccagcacttccttctcattggcgtactgctgcttcaactgttcgtattccaactccgccacgttataactcaactctgcctgacgcactttgtcggtagtgcccgaaccgaggctgtcgagatattgctcgttgcgcaactccacctttttgcggttcagttgcatggcagagacttttatcttcatctccaggtcgttcagcttggtcatattctcaagcttgagctgcttcagcttgtagctgcgcatctgctcctcatcgagtttctgcttgtagtcggtttcggcgctctgtaagtccaacttcaggatgggcgtgcctatatccacgctgtcgccacctttcttatatacttccagaatacgggtgttgatgggcgagttgataatctcctcaaaggcaggaaccaccttgccggaagcgcttacgctgacttcaatcgtgcctgtacttacctgggagaatacgatgtccttctccttcactcccgtgcgcatcaatgagatgagcacactgataacgacgatacccgcagcgcccatgccgccatagcgaatgattttcttgttacgctctttgttacgaacttctttcggaatctctctatccatattttctgtctttatttaccgttttacgttgctgccgtcctgttgcgtaaacggacagcctgcgattcttcgcccttatacttgccaaatccgtgccaaaaacataaatcattgaaaacaagcgttaaggcaaaaagaagagtgtccgttttcggacactctgtacattttcggatagcggcactgtacgaaaagaagaaacagacggaagagaaagcacaatggtacggcggaagaaatataaacgacaggggataacggggaaaactcctcacctcagcgtccgtttccccctttggtatttgtaatgccacgcgttggtacttgtcataccactctttggtacggcatgtaccacactgtggtactacgaataccgcactgtggtacgagagataccaacggttggtactccgcgtaccaagccgaggtatttcccggtacatcctttcttatgactatcaagcacttacgataatattccctgaacgttatctcaggcgcagtctgtcccctacttcgggcacatattccgcatccttgcggttcatcttatacagattcttcagacggatgccgtacttctgcgaaatggagtgcatggaatcgccgtcttttacaatataaacggtatgaggtttggcggctttcttacgcttgtctttcagatagatgatgtcgcctgcctctaaggtgtactctttatgcaggtcgttatacttcaccagtttgcgccaactgatgtcgaactctttgcccaggaactggaaagtatcgccgtcgcgggccacaacgtaggcaatgtcgttggcaatatacacctgatgcgggttggcaagccagggtttcttcttcagttctttctcccacttgcgggcctcgcgcttgctcatgccgcggctgtcgtacttatacaggtcgtagtcctcaataatggttatcaggcggttggcataggaagggtctgtggcgtatcccgcttttttcaggccgcgcgcccagcctttgtagtcggtaatcttcaacttaaacaggaaagcatagcgtgcgccgcgtttcaggaagagcgagtggtcctcgtaggagtccttcgggtggcgataggcgcggaagcactctcctttggcatcgtcgtcgtggtacactctccgcccgcgccagtcgctatggcactttatgccgaagtggttgttgctcttgcgtgccagtgcgctttgtcccgcaccgctctccagcaggccttgtgccagtgtgatgctggcgggtatcttatgttccttcatctgctccacggcaagcggggcatattgtttgatatattcgttgtaacgggaatttctgcgttgtgcctgcacagccacgcaaataaggagaagtgctatgatagcagtcagtctgaatataggtttcatgcttcgagtgttgaatttgacacaaaagtctgcaaaagaattgaaaaaaccaatctctttcctatctttgtaacattaattacaataaaccattattctatgaaggacctgaacatacagattgccatcaagatatacgaatacgaagagctgaatgccgccgaccgcgagcttctggatgccgcccggcaggcaacttaccgcagttatgccccctattcgcacttctcggtgggcgcggccgcccggctggcaaacaatatcatcgttaccggaaccaatcaggagaatgcagcttatccgtcggggctttgcgcggaacgcaccactttgttctatgccaactcccaatatcccgaccaggctgtggagacacttgccatagccgcccgcaacgaacgcggcgagttcctggaagaaccgattcccccgtgcggcgcctgccggcaggtgatgctcgaaacggaaaaacgtttcaaacgtcccatgcgcatactgctgtccggcgaaaaaggcatttatgaattgagaagtgtgggcgcattgctgccgctttcgttcgatgcgtcttccatgttataaaacaaatacctacctttgcaactgctaaccaacaaataccaccaccaatgagaatatccaaataaagacagcacatttcggtaaacatcgctttatatatgcttttcatatcagaacgctgagcatcactcaaaaggaaaatgtttagcctttactgtgtttgtctgttccccacagccttacaagagttgaaagtgtgtcgtacagacacctatgttatctaccctaaacacagtaaatttatgagtatcattattaaagaccttagctatacccataccgataaggaagttttgttttccaacctcaatctgattatcaattccggagaaaagaccgcgctgacaggcaataacggttgcggaaagtccaccctgatgcgtatccttgcgggagaagcatcgccgggcaccggtagtgtacattgttccggacatctttactatgtgccccagcatttcggacaatatgacgaccggacggttgcgcaggtattaggcatagaccgtaagctaactgcactccatgccattctgaacggtgatacagcggaagaacactttgcccggctcgacaacgactggaatatcgaagagcgtacccaagccgttctccacgcctggcatttgaacggtatctctcttttacgcccgttagaggggcttagcggcggagagaaaacacgcctgttccttgccggcatggaactgaaagaaccggacaccctactgctggacgaaccgaccaatcatctggatactgccgggcggaaacgtctgtatgatttcgtacaccgcacttcggctacggtgctcgttatcagtcacgaccgtactctgctaaatctgttacccgccatttgcgaactctcccgcaacggactggcttgctacggcggcaattacgacttctacaaagaacagaaggaagtgcaccgcaatgccctgcaacagcagttggaagaaaaagaaaaggccttgcgcctcgcccgcaagaccgcccgtgaaatggaagaacggaaagccagacaaaacacacgaggcgaaaaggcttccataaagaaaggtattccgcgtattctgttaggcggtctgaagaatcatgccgaaaacagcagtagcaaactcagcaatgtccatgccgaaaaaacggacaagattcaacaggaaataacaaacctgaaaggctccctgccgcaaacaaacaagctgaaaaccgacttcaatgcttcggcattgcatataggcaaaatactcgtcacggcacagaatatcaactttcattatccggacagcaacacaaacctttggacggttccgctcagctttcagctacgcagcggcaaccggttctgcattaaaggtgataacggcagcggcaaaacaaccctgctgaaactgattaccggcgaactgacaccgaccggcggaacgatagagcgtgcagactttacctatatttatctggatcaggagtactcccttatccaaaatgaatataccgtttcggaacaagcggaagccttcaatctgcggcatctgccggagcatgaaacaaagaccatcttaaaccgttaccttttcccgcaggacgtctggaacaagccttgcagcaaattaagcggcggtgagaaaatgcgtcttgccttctgctgtctgatgattgccgataacactcccgacctgtttattctggacgagcccaccaataatctggacatcgaaagtattgaaatcatcacagctacgatacgtaactatcaaggtaccgtacttgcagtctcacacgaccgggattttctgaaagaaacaggaattgaacaagaaataagcttttttctgtaaaatcggtaaaaacaaacgtaatccatatacacaaactaattataaactccttatttttgcaatgataaaactattatgactatgttacgtactatcagactgacacttgcaattgtattctttgcactcgtcacgttcctgtttctcgatttcaccggaacgctgcacggctggatgggctggatggcgaaaatacagttcctccccgcactgctcgcactgaatgcaggcgtggtactgctacttgttgcattgaccctgctgttcggacgcgtctattgctccgttatctgcccgctcggcgtatttcaggatgtcatttcccggtttgcaggcaagcggaagaaaaaccgtttccgctattctcccgccaggaaatggctgcgttacggaatgttggcagtgtttgccgtgaccctcgttgcaggcgtgcgctttcatgcggttgcttcgctgctcgaaccgtatagctcttacgggcgcatcgcttccagtctcttcgctcccgtctatcagtggggcaataatctgctggcatatctggcggaacgggcggacagctacgctttctatgaaacagaggtatggatgaaaagcctgcctaccttcatcattgcggcccttacttttgtcgtgctcatcatattggcatggcgaggcggacgtacgtactgcaacacgatttgtccggtaggtacggtgctcggtttcctgtccgggtattctcttttcaaaccggtcatagataccgagaagtgcaacggctgcggactttgcgcacgcaactgcaaggcatcgtgcatcaactccaaaacccacgaaattgattacagccgttgcgtggcatgcatggactgcctagataaatgcagacaaggagccatcacctacacccaccgccgtcataaagcggatgctgcgaaaatatccgcccggaatcagactcaatgtacaacaacttctaccggaccggcagatgatacccggcgcgcattcctctcggcaacggcagtattggccactaccgccgctctaaaggcgcaagagaagaaagtagacggcggactggccgtcatcgaagacaagaagatacccgcacgtgccgccgccattactcctccggggtcgttgagcgcacgcaactttgcacaacactgtacggcttgccagctatgcgttgcggtgtgtcccaaccaggtgctgcgcccctcttccgacctgacacggctgatgcagccggaaatgtcctacgagcgcggctactgccgtcccgaatgtaccaagtgttcggaagtttgtccggcaggtgctatccggccgataacgaaagccgacaaatcggccatccagataggtcatgccgtatggataaaggagaattgcatctgcatcaccaataaggtggagtgcggcaactgcgcccgccactgcccggtcggcgccatacaaatggtggcttcggactccggaaatccgcaatcccccaaaatacccgttgtcaataccgaacgctgcatcggctgcggcgcatgtgagaacctgtgtccggcacgcccgttcagcgcaatctatgtggaaggacatatcatgcacagaacggtgtgagaatcagatgacaaaacgataaaggaaaatcttcgatacgttctggacaacagacagcatcgagaagaataaatacgagtaactatggaagagaataataataataagaataacagcaagataaaccgccgggacttcttcaagcttgccggcgcagggacgtttgcatcggcagccgcactgtatggctgctccgacaagaacaaccgttcggacagcgaatcggccgctttgggtgaaattcctaccgataagatggtgtaccgtaccaatcccaccacgggcgaccgggtatccttattgggctacggctgcatgcgctggcctacccggaagcgtgctgacggaaacggagatgagatagaccaggaagccgtcaacgaactgattgactatgccatcgcccacgacgtgaactatttcgacacatcgcccgtgtatgtgcagggttggtcggagaagtcaacgggaatagcactgaaacgccatccgcgtgaaaagttcctgatagccaccaaactgtccaacttttccaattacacccgcgagaattcaattgccatgtatcggaaatcgttcgaggacctgcaagtggactacatcgattattatctgttgcactccgtcggcaatggcggcatcaagacattccgggcacggtacatcgacaacggtatgattgattttctgatggaagaacgcaaggccgggcgtatccggaacctggggttttcgtttcacggaacaacggaggtgtttgatgaaatactggccatgcacgaccgcatacactgggatttcgtgcaaatccaactcaactatgccgactggcggcatgcttcgggcaataatgtcaatgccgaatatctgtatggcgaactcgttaaacgcgacatacccgccattatcatggaaccgctgctgggaggacggctatccagactgaacgaccacttggtggcacgcctgaaacagcatcgcccgcaagagagtgtagcttcctgggcattccgctttgccgggagcttccccaaggtactgacggtactgagcggcatgacgtatatggaacatctgcaggacaatctccgcacctattcccccctcgacctttgcacggaagaagaactggctctgctggaagatacggcgcaggtaatgcttacctatcctatcatcccgtgcaacgactgcaagtattgcatgccttgtccctatggactggacattcccgccattctgctgcattacaaccgctgcgtcaacgagggcaatatacccaaaagcagccgggatgagcactatcgcgaagcccgccgcgccttcctcatcggttatgaccgcagcgtaccgaagctccgccaggcaagccattgtacaggatgcgaccaatgcaacccgcactgtcctcaaagcatcgatataccccaaaagttacaggaaatagaccagtttgtagaaaatctcaaacaagagagattataatacaaacggaaaaagaaaatacgccctatctttggcggagcaaataatgaagaaagcgatacgaatgaagaaaaaaaacatattactcctttcgatagccggcctttggacaatggcgggatttgcgcaggctgcaaaggacagcgcgcgcattgcccggaacctgactatagatgaagtggtagtaaccggaacaagaaacgaaacggatatacggcatctgccgatgaccatctccgtagtgaaccgcaaggtgttggagcgacgtttccaaccatccgtactacctgcactgacagagcaagtgcccggactgttcgctacaagccgcggcatcatgggatacggcgtgtccacgggagcagcaggcggaatgaacctgcgcggcatcggcggcagccctacggctggtttgctggtgctgattgacggccatccccaatatatgggattaatgggacatcccattgccgatgcctatcagaccatgctgaccgaccaggtggaagtgcttcgcggccctgcctcggtgctgtatggttccaacgccatgggtggcgttatcaatatcgtaacccgcaagatgcaggaagacggggttaagacccatgcgcaaatcggctacggctcctacaacacattgcagacggaagtttccaaccgcatcaggaaagggcgtttcagcagcgttgtcaccggctcttacaaccgtaccgacgggcatcgcgacaatatggagtttgagcaatacggcggctataccaagctgggatatgacttcaacgattcctggaaactgtggggcgatgtaaacatcacgcagttcaaggcctccaatccgggcgaagccggtaatccgtacatagacaatgactcccgcatcacgcgcggcatgacttcgctcgctctcgaaaaccattatgaaaagagctccggcgccttgagtttcttctataactggggacgccataaaatcaatgacggctatcatcccggcggtacgccgcaggaatcccacttcaactccaaagaccgcatgctgggcgtgtcgtggtatcagagcgcaacgcttttcgccggcaaccgtctgaccacgggtttcgactatcagcacttcggcggcgaatcatggaaccgcatggtgtctaccggcgaacgtgttccgggtgtagacaagcaaatggatgaatttgccggatatgtcgacttccgtcaggacctcggcgaatggctctctctggatgcgggcatccgtgtagaccaccattcgcacataggcacggaatggattccgcagggcggcctttcgttccacttgccccgacagacggaagtgaaagcaatggtgagcaagggattccgtaaccccaccatccgtgagatgtacatgtttccgccacagaacccggatttaatggcggaaagcctgatgagctacgagttgtctttctcgcaacgggtgttggacggcactttgtcttacggcataaatctctactacattgacggcgacaatatgattatgaccgttcctacggacggcaagcccaagaacgtaaataccggcaagattgaaaaccggggcattgaagccaatatcggttaccgcattaccccgcactagcaggcaaatgccaattacagttggctgcacatggagaatccggtgattgccgctcccggacataaactctatgcaggcgttgactttacgcgagaccgctggggagtgtcaaccggagtgcaatatataaaagacctctataccaacgtaagcaaaggcaaggagaagaaagaaagttttgttctctggaacctgcgtgccaattatcgtgtatgccgctatgccgatgtctttgtacgaggggaaaacctgctggcgcaacgttacgaaataaacgacggctttccgatgcctaaggcaaccgttatgggcggagtgaatatcaatttctgacaaaatcaggcattactgttgtcaagaccgtattggtttgaaataatagttataactttgtgagtataaaacagattgtttgattagccgataaagattatccgacagaccaatacaatttacccgataaatgaataagattattttataaacgataagaacatggaaacaaaaactgtaaaactctattcgctggattacagcaatgcaagaacttacttaatggccgcattgttcattgcaggcaatatggcactgccccagcttttccaccttataccgcaaggcggtatcacatggttgcccatctatttcttcaccttaatcggtgcatacaaattcggctggaaggtaggattgctgactgcgatcctttctccgataatcaattcactgctgttcgggatgcctcttccggcagtgcttcccgccattctgttgaagtccgtattactggcagcagcagccggctgggcagcacatcgtttcaaccgtatctctctgcctatcctattggccgttgtactgttctatcaggtagcaggtactctgggcgaatgggctatggtgggtagcttcttccaagccgtacaggatttccgtatcgggctaccgggaatggcaatgcaggtagtaggcggctatgcgctgataaagtatagcgcatcgctgtaataaccttgtagaaatattaaaaaaggttcggaactgtttctgtatacagttttacgaaaagcatagaagtatcctcccgtttctacggctatcattcgtgctgatacggaaaggcaaagaaatattgctggtgcatacacgcaacttccgcagcacgttccacgggttggtagccggctttctcgaaacgggcaaaacgttggaacaatgcgtagaacgggaagttatggaagaaacgagactgaaggtaaaaaacatcacttatttcggcagccagccctggccttatcccaacggattaatggtaggattcatagccgactatgaaagcgggaaaatcaaactgcaggccgatgaactcagttccggcgcattctattccaaagacgacctaccgaaataccccggaaactaagcattgcaagaaaactgattgactggtgatgcactttctttgtgcataaaaatggaggtatgctaaattgaactgcacgaacgtgtgtttaatttagcatacctccattttttaaaacatctgccgaatactcctgaaaaggaaagaaacttcgtcacaggttactatgaaaaaagcttcatccagcaaagtgaaaaatatccttattaataggaacgtgcaaatatcacgcggcaggcagacggcttgcccgtaaccatacatttgcccggctccttgtcgcccggtacgaaagaatcgaacggaatacagcggatagtggctttggtctcttccttaatcttctcctcggtttcggtcgttccgtcccaatgagccaaaataaagccgccttcttcaatcttttccttgaactcgtcatagctgtccactgtagtgatacggctgttgcgataatccaatgctttcttataaatattcgcctggatttcctcaagcaggtcttttacgtattcctcgataccgtcgcaagagcgggtttctttctccagcgtatcgcggcgcatcacttccattgtattgttctccaagtcgcggccacccataaccagacggacaggtacacctttcacctcgtaatcggcaaacttgaagcccggacgtttgttgtcggcattgtcgtacttcacagacatacccatcgctttcagtttggctacgatgcctgccaccttctcgtcaatcttggcaagcatttcggcattcttgtagataggtacgataatcacctgtatcggagccaagtgcggcggaagcaccagaccgttgtcatcggaatgtgtcatgataagcgcacccatcaagcgggtagatactccccaagaagtggcccatacgtattccagtttgttttccttgtttacgaactgcacgtcgaaagctttggcgaagttctgtcccaagaagtgtgaagtaccactctgcaaagctttgccatcctgcatcatcgcttcaatggtataggtgttgagagcgccggcgaagcgttcgttggccgacttcacacctttgacaacgggcactgccatgtatttctcggcaaattcgctgtacacgttcagcatacgcactgcttcctcttcggcttcttcgcgagtggcgtgagccgtgtggccttcctgccacaagaactctgcggtacgcaggaacagacgggtacgcatttcccaacggaatacgtttgcccattggttgcacaggataggcaggtcgcggtaagagttaatccagttcttataggtattccaaataatagtttccgaagtagggcggatgataagttcttcttccagctttgcagcggggtccaccactacgccgccgccattcgggtcgttcttcaaacgatagtgcgtcactacggcacattctttggcaaagccttccacgtgttccgcttcgcgactgaggaatgatttcggaataagtaaggggaaataagcgtttacgtgtcctgtttccttgaacatatcgtccaactgacgctgcatcttctcccagattgcgtatccgtaaggcttgattaccatacatccgcgcacagccgactgctctgccaaatcggccttcaccaccaactcgttgtaccactgagaataattctcactacgtttggtaaggtctttcaattctactgccattctatttcgtttttaaagttttctattcgggttcattaaacggagtgcaaaagtacaaatttctgtgcgaaaagtgtttattgtgtaaacactattttttgcatactttataaatgagaactttttttcctattgcgagttatcataatcagtcgtttacaaaaacaggggttcacccgctatactgcatgagcaggaagttgtgaaaggtgaaggggtggcttgacatattcctataaaacaaaaatcagatagaaatcttgtgatgactatctgattttctgtatgaacggtaagcgaggttcgagcttgtgagggtgtcaaaaaaacatttgatgatttcttttaggcatggaattacacggatttcacggaaaaagaacaaagaaaatctatgttttctgtgtaatcccgtgcctaaaaagaaacaaatggcaagcgaattttagtttagacatatcctctttctgagatttaactttaggatgataccaagaattaaaaataatcaacttcaaatacagcttttcttattatgtatcatttatttagataagaatgcccgttcttgcgatgtcgcagtaaagaggattactcatatcctctataagcaagacgggttctataaggttacttatcttacgtctaagtttccataatagaggggtatcttcaaaatagttatcatccaaatgctctactaccactgcaatgtctatatcgctatcctctctgtaattccccttgctatacgagccatagagatagagagcctttaatggtaatctttctgctaccatttctttatatcgcttagcgaggactatagcttgttctttatccatgactgtaattctttagtttggcttaaaagtcctatacaatattccttagtcagacttttcatcaatctctctttataagagggataacgggcttcaatattaagtggctcaagtgtatcaatgaaatccaactgttcttctgatagttctttatctaattctgttctctctgctaatctggatagcgaatgtatctttaaaggtacttccaccaaacgattagcccaatatgccttgagtattttttctatcgtttggtggcacatgaagcccacatagagataacggcctgtaagcaacatcgcatctgctgtttccaagtcataatctgacatttcaatccaataagttactttaccatccataatacaaaggtaattattcccttttaaatcacaatgatttagctgtaacatttaaaaaaaacagcaaatgattcgttgctgtaactctgtttgcttatcaagaagattttctgaatatactctttattgggacagataatgtctttgatttgtagcataccattaaaattgcaacactcatacagatgggtattcaccatttgctaaggttttccacttgtagcatactacattaactgcgagttcaactgccattgcctaaaaacaaaaatcagatagaaaccttgcgataactatctgattttcaagagagcggcaagcgaggctcgaactcgtgaccctcagcttgggaagctgatgctctaccaactgagctattgccgcaggtttcgtttccctttattctgaaaacatcggcaaaggtaatgaaatcttttaaaaaagaaaaaacgaaaccgctaaaaaaatactctattcttgccactgacgcagaaatcatgtacatttgctttcataaaaacttcaagcaaaccaatgagacgaatcatacttattaccggtggagcacgttcgggcaaaagtacctatgcggaaaagctggcgctcagcctctcgcccacccctgtctacctcgctacggcacgtatatgggatgaagaattccgcaaacgggtgatacaccatcaggaaaggcgcggaccggaatggacaaacatagaagaagataaagagctgagccgccactcgctgtccggacgcaccgtactgatagactgcataacgttgtggtgcaccaacttctttttcgacctggatgccgatacagaccgttcccttgccgcagccaaagccgaattcgaccgctttacggcacaggatgccacatttatatttgtcaccaacgagataggtatgggcggcacatccgaaaacgaaatacaacggaagtttacggatatgcaaggctggatgaaccagtatgtggcttcacgggcagatgaagtgattttaatggtgtcggggattgcaacaaaaattaagtgtgaataagtacggaatataagaatgaagtataaggtataaaattatgaagacatttgatataataggaccggatgaagttatacgaccggcactggttgagaaaatcaataacctgaccaagccgaaagggtctttgggaatgctggaaagccttgcgcttcaggtagggctcatccagcaaagcctgactcccattctgcaacatcctcagaatatcatctttgctgccgatcatggtattgtagaggaaggtgtcagcctctcacccaaagaaattacctggcaacaaatcagtaatttccttcatgggggtgccggcgtcaatttcctgtgccgccagcacggatttacattaaagatagtggatgcgggagtagattatgacctgccttatgaaaaaggcatcattaatatgaaagtgcgcaaaggcacacgcaactatctgcacgaagctgcaatgaccgaaacggaaatggaactttgcctggaacggggtgcggaagtggtgcgccgttgccgcgaagaaggcagtaacatactcagtttcggggaaatgggaataggcaacacctcctcttcttccctatggatgagctgcttcaccggcattccgctaaaagaatgcgtcggtgcgggaagcggactggacgatgcaggcatccgccataagtacgaagtcttgaaacagtcgttggacaactacaaaggagacggttcgccgcgtgacaccatccgctacttcggcgggttggaaatggttatggcagtaggcgccatgctgcaagccgccgagctgaaaatgattattctggtagacggcttcatcatgacaaactgtatccttgccgctgccaagctgtatcccgaagtgctgcattatgccgtattcggacattgcggagatgaatgcgggcataaacttgtacttgactcattaaatgccaaaccattgctgcatttaggattaagactcggagaaggcacgggagctatctgtgcatatcccattatagaatcggctgtccgcatgattaatgaaatggataacttcgcacacgcttccatcaccaaatacttttaagaagcccctcaaacggcatctctaagcagagaaccattttatagataacatatataactttgttgatagtacccacattttaattttatagacaatacctatatataatgaacatactggctgcatttatcttcttcacccgactgcccttttggaaaatcagggaagtacccgccgaatgtttcaagcatgtagtaccctactggccgctaaccggctggctgacgggcggcatcatggcaggcactctctggctgaccggacagatactgcccgtatcccttgcctggattatagctatcatcgcccgcctgcttgttacgggatgcctgcacgaagacgggttagcggactttctggatgggttcggcggcggcaccacccgcgagcgtacgcttgccatcatgaaagattcccatataggaagctacggagttatcggactgatattctatttcctattgctgttacagatgcgcaatctgcctctgaatttcctttgtatccttgtcttctgcggcgactgctggtgcaagttctgcacatcccaactcattaactgcctgccatacgcccgaaaagaagaagacagcaaggctaaagtcgtgtacaaccgcatgagtcgccaggaattgacatccgccttcatctgcggattgcttcctttcgtcttactcctgccggtaaagatgtggcctgccaccctcttcccgctgctcgcattcgtactgctgtgccgccttatgaaacgccgcctgcaaggatatacgggtgattgctgcggagcggctttcctgctttgcgaactggcattctacataggcagccttgtattggcatatgtctatgcaggttttggaatcgatttccttacggactttgtctcggttcccttttattttcactaaacatttaatctgaagaattatggaagtcatacttattcgtcacacatccgtcgatgtaccgcccggcgtatgctacggacaaacggatgttcccctgaaaccgacattcgaacaggaagcggccgttacccaagagaacctgaaagcctttttgcctttcgaccatgtatataccagtccgcttacgcgttgcgtacgccttgccacctattgcggctatccggatgcagaacgtgacaaacggattatggaaataaacttcggcagttgggaaatgaaacctttcgaccgcaacgacgacccgcgcctacaggagtggtatgccgactatttgaatgtagcggctacgggcggagagtcgttcgccatgcagtaccggcgtgtcagcgactttctcgatgagctgaaaggaaagccctaccagcgggtggccgtttttgcccacggcggcgtcctgatttgcgcacagatatatgccggcatcatcaaacccgaagaggcattcagcgcactgacaccctatggcggtatcgtcagaattaccctttagcactcagaagaatgagggaataacgtacatacaggtagcggtagcaacaacgatgattaccattatccattccacactgcggttgatacgcacggcaatcctcatgtcttcggttgtcaaaggccgttcattgtcgccgatataaggtttccacacttcctcgccaaaatagttgtgagaaccaccgaagcggcaatccaatattccggcaagtgccgcttccggatagccggaattgggactggcatgcttgctgccgtatttccccacaaaaaacagcaacgggaatctgccggaaaccgccaccatgagaaaagccgtcagacgggcggggatatagttggctacatcgtccagacgtgccgcgaaacagccgaaccgacgatagcgttcattcctataccctatcatggagtcgagtgtatttatcatcttataggcaagcatccccggcacacccagcaacatataccagaacagcggagcgattacgccgtcgctcaggttctctgccaacgtctctaatgccgccgtacgtacttcctgtgccgaaagtccggaagtgtcgcgccccacaatacgggctacctgcttccttccctcttccaacgaacggtctacagccttaaacaccccgcagacttctcgcaccagcgtagtacccgcaaggcaataaaagatgagcagcacctgcaaagtcaaaagcagaccgggagaataatgcgctgcccaacgcagcaggaacaatgtaagcagataaacgcctgccaccagtaccaacgacatgacagcccctttcaggaaacgggcattccccctattcagacgatgctcacagaacgagatggcctttccgaaagccaccacaggatgcggcagccagacaggatcgcccaaccaatggtcgagcagccatgccgtaagcagcggcaggttcagattgaaagcaatgcctaaaaatatgattatatcttccataaaatgtttatcactcaggttctactattacgccggctctaccccgccataaattcctctatcgccgccaccagcctgtcattctcttccggtgtctgtgtggctatgcggaaaaagcgctcgtccagccccgcaaagttggacgcatcccgaataagtatgccatgctccccggcaagatactctttcaaggcagacgccttgcccatgcgaagctgcaccagcataaaatgcgtctgcgtatcccaaacgtccaatccgcctacggctttgagcgccttgcccagacgcgccgtctcctgcaaataagcagccacatccaacggttcgggcacatcgttctccaacaggaaaagtcctgcttcaatggcaagccggttgaccgaccacggcatacggttggtgcgcagccgctccagcaaaccggagctgcccgttacatatccaagccgcaaaccgggaatcgcataccttttcgtcatggaatgcagcagcagtacattcggatactccgccgcctctgccggagagaaaagcggacacagcgtaaagaactcataagactggtctataataaaacaaacttgcggattatgttcaatcaatccgcgcatatattctttaccggccaccgttcccgtgggattgttggggttgcagagccacagcatccgcacatcgtccggcaggcgatacccgtcctgctccttcggcagttgataaagcgaactcacccggtgtccgtgcatacggcaggcatccgcatattcgctgaaagtgggttgcaggatagctgtattcgtaccccggaaagtctgtgcaataaggtatatggcctccgttgcgccattcgttacgcaaacagctccggacggcagctgacagcgggaagccatacgggcttccaacgtatagggttcgggttcggggtaattgcctatctccccgatacattcgcaaagatgaactttcaaacgggaaagattcactttgttgtacacgttggaactgaaatttgccgttatcgggcggctgtatttataggaatcgtctccgtgtccgtcaatcatattctatccgattttaattgttgtccgtcaatatcttgtaaataagcggcagattgacatgctgccgcacatggtcggcgagtttgtcgtactgctcttccttaaactgccggtagttgaacgtttccgctgcttccgacaatttaccggcaaacggttcgagcagaaagtcgataaactccggattgtcgagaatgccgtgaatgtaagtccccatgcacgtacggtccacgatatacccgtcacattgcccgctttccaaccggttcagcggagaagcggacgctccctccaccggtacggtactacccatgtgaatctcgtagccttttagctgaaaatggggcactgaaggttggttgttgaaatttgagggggaagagttaccttgcggaacaacggcacggcagctttcaagaagttggaagttcacctgccgcgtcaccttttctcccgtcattcgtgtacttacaggcagcagtccaagaccgggcaaccgttctatctccccttccacgtggtcggggtcgagcacttcctgccccatcaactgatagccgccgcagatgcccaacacgacagttccctcacgatgggcacggatgacggcttgcgccactccgttgcggcgcaattcatagaggtcggcaagggtactcttgctaccgggcaggatgatgatatccgccttcgccagttcgtcggtgttgttggtatagaaaagatgcacgcgcgggtcgcgttccagcacattgaaatccgtgaagttgctgaggtggcgcagcagaaccacagctatattcaccttaccctgctccgcctgcaatgatttggtggcaagggcaagcgaatcctcttcctcgatatagatatccttataataaggaaccaccccgaccaccggaattccgcaaagctcttccagcattttgacgccggactcgaagagacgtatatctccccggaatttattgataagaataccttttacatgcttgcgttcttcgggagtaagcagcattaccgaaccgtacacactggcaaagaccccgccacggtctatatccgctaccagaatcacgtccgcaccggcatacattgccatcggcagattcacgaggtctacctcgcgcaggttgatttcggagatgctgcccgcaccttccaatacgatgggattatatttctgcgcaaggcggtcatacgccgcacatacttccctgcgcaactcctcgcgtccttccttgcggaaatagtcgtatgcaccacgactgccgataggcttaccgttcaataccacttgcgaagtccggtccgactggggtttcagcagtaacggattcatgtctgtatggcacggcactccggcggcttccgcctgcacggcctgtgcacgtcctatctccagtccttcgggagtggcatacgagttaagcgccatattctgcgctttgaagggagcaggccggtatccgtcctgcctgaaaatgcggcaaaaggcagcggatataatgctcttgcccacgtcgctgccggttccggcaaacatcaaaggatgaagttttttcatttgtcgagctaatatacggcatccggcacggtctgttttaccgttctccgtttgcggtatcgattctgtcataaaaatatgtctggggcgatgataggcatccagcaccgtctgcaacttactctccagttctcttgcatccacctgtccggcaatcagcaaggtaagcgcctgccccaaacgcgggtcgggaacagaagtaactacaaatggtacagggataaacggccgtagtcttttctccatttcctccgcctgtatcttgattccgccgctattgataacgttatctttccggcctgcaatggtaaaacttccatcgggatagatgcaggcaatgtcattggtctgcaagacctccccgcaaatcagcggagctttaataaccagcgtactttcagcggataaggacagttcgaccgagggaaaaggataataatgcttggaagcggtctctccgttcagacggcgcaatgcgatatgggacaacgtttccgtcatgccgtacgtagaatagaccgccgtgggaagagcgcttatttccgcctccagactgtcgtccatcgctccgccgccgataatcagaatatccgtctgctccagccgcgccttttcttcgggaacacggagcgtgttataaacctgcaaaggaaccatcgccgcaaatctcagcggttcttctatatccgaaagaggatggccggaagcaggacgcactatcagattcagccccgcaaccaaagaacgcaccaccaccatcatagcccctatataacgaaggttcatacacagcaaagcggtatctcccgcttgcaggttcagaaactcgcaagtgaggcgggcgctctgcatcatccggtctttgcacaccaccaactctttcggcgtgcctgtggagcccgacgtatgaacggtgataaccggagaggcatcgaaccacttctccagaaaaagatacaaatcccacaaggcgggcgggcagttttccactccctccgccaccaaccggaatatatccccggccgtatactcctttccttgcagcagcaaacgctgtcgttgtcggtcgaatatcatcggatacctttaaatatcatcattacaaaaccataaacaatctttcctcacttcaagaggcatttccacgttgtccgtaaaaagcagtcccgtacccagcccctgaggcagcggattatcgaaggtggcacaccattgggctattgcattcaggccgatattcgactccagagccgaagtaatccaccagccgatatgccgtttttccgcttcggcaatccactcgttgccaccgcatatcccgccgtgcaaagaaggtttgagaacaatatactgcggattgattgccgaaagcagcttccgcttcccttccggcgtattgcagcctatcagttcttcatccaaggctatcggcagcggagagtcggcagcaagacgcgccatttcctcccactgccctgcacggatgggctgttcaatggagtgcagctccagttcggacaggcgtttcagtttctccatcgcatcagccggagagaaagcgccgttggcatccacacgcaactctatctccctggaagagaaatgtgcacggatatggcgaagcagagccaactcatcctcaaagccgatagcgccgattttcagtttgatacaacggaaaccggctgccattttctcctctatccgggagagcatcgtgtcaaagtcgcccatccagataagcccgtttatcggaatccccgcctttccttgcgagaagtccgtatcgtacaatgcccaactgcccgtcaggagatgacggaacgccgtttccaatccgaacaggatggacggatagtcgcgcaagacatccgtatccagttctcccccgcactgttccagccgccggcaagccccggcaagtatattctcgtaatcgggaaggtcgtcacaactcaatgcaggcagcggagcgcactctcctattcccgtcctgcccggatagtcgggagaggtcagatgaagataccacactttccgggtcgtatacaccccgcgggaagtccccgccggctgcttgaaatgcagcaaccgggggataatctctatcttgcagtccattacgggtgtcaggggaatttgggatactgcttgaagttaggcttgcgtttctccagaaatgcgttcttaccttcctgggcttcatccgtcagataatagagcaaggtagcgttgcctgccagttcctgaatgcccgactgtccgtccagctccgcattcagccccgccttaatcatgcgcaaagccagcggactgagctgcatcatctcttccgcccactgcacatactcgtcttccagttgctccaaaggcactaccttgttgaccaatcccatttccaacgcttcctgcgcattgtatttccggcaaaggaaccagatttcacgcgctttcttctgacctaccacacgagccaggtaagatgcgccgaatccggcatcgaaacttcccacacggggacctgtctggccgaagatagcgttctcggaagcgatggacaagtcgcacaccacatgcagcacgtgtccgccaccgatggcaaaaccgtttacggcagcaatcactggtttcgggatgctgcggatttgcttctgtacgtccaatacgctcaaacggggaacgccgtccttaccgatatacccgccgcgtcctttcacattctggtcgcctccggagcagaaagccttgtcgcccgctccggtaatgacaatcacatcaatatccgcttcctcacggcagatgcgcaaggcatcgctcatttcggcggtagtggtcggggtaaacgcattgcggtagcgttcgcggttgatggtgatacgggcaattccgttatagtattcaaaaagaatatcttcatattcccggatggttgtccattctctttttgtctgcataatctgtattctattttaattgatgataataattcttcaacatacgggtgtcttcgtccttgtcggtaaacacttccagtaagacggggcgctccgctgcctccggactggtgaaggacttcatggcctcagccaactgtccgccgttctccgcacgcaggtaaaggaatccccgctcttccgcccagcctttggccgaagtcttgtgaaccgctgtgataaacttatgcgaagactccgacatgtcgagccccggcaatgtatgaaagatttctccgccgccgttattcagtaaaaggatgcgcaggttgggaccgatattggcattccacaacgcattcatatcgtaaaagaagctcaaatctccgatagcaacgaagttcagcttgtcagatgccgccgcataccccacagccgtggaaagcgaaccttcgatgccgctggttccccggttgcagcaaacctctacggtgggcgaaacggcatacaactgggcataacgcaccaccgaactgtttgccagatgcagtaccgatgcttccggcaaggactttatcaacgcccccactgccgccatctccgaataagcgaactccggttcgggaacagccttgcagtagtcttcccagatgcggggatattcgggagtccgggtttcaagcagggccgctatcttttccagaaactcaaacgggtccatttctataacggtggtcaaggagccgtaaaggtcggtcacctcgccatccggcgacacatgccaatgctctttgggcggatgccggcgaagatactttttcaaccgtttggatacgatatgccctccgtaagtaatcagcagttcgggagccatctggtccattttatcttcgggcatggcatagagcgccgcatcgaaattcttcacgggaatgcccggaaccgtccggttgccgatatgctccgccagccatgcaaaatgtttatacagcagtttggtataccgcttttcaaacagatagataaggttcatctgccccaccacaatcatccgcttccggtatttgttcatgcggtcgatgagttcgttataatcgcggtcgtagacattcagcccctgatagcgggtgatgacacgcacttggggcagcgcctccgtcgtgaaattgaacaaaggctcggaaacgggcacattgatatgtaccggtccttttccgtgatggttggtttccagcagggcttcgtttatcagtcggttgcagaaccactcatcctcctccgtatgaatttcgggaaggttgacggatttcttgaccagcgaccggaacacctccggctgcggaagcgtctgtccgtccatttgtcctatccaagcagccgggcggtcggcggaaatgactatcaagggaactttctgataaaaggcctccgccacagcagggtggagattcagcaaggcagttcccgaagtgcagcacaccgcaacgggcttgccgctattcaaagccaggccgagggcgaaataccccgcactccgctcatccgtcattgcatggcaaacaaagcccgggtgattggacaaagtatgcacgatgggggcattgcggctgcccgggcacaacacgaccctggtaattccgtacgcctcgagaagcgctgccagttggagtatattctttttgtctgtatacatggttcagtgattaaagattagcgatttatggattatagggacatgcttaccaaccgtttcatggtctgcaacttcttttccgtttccagccattcgtcattcagctccgaagaagccagcagtccgccgccggcatagaaagacaactgcccgttttcgatgtgcatgcaccgcaggttcacgtataaatccgtcttgccgtcagggtcgagccacccgatgaaaccggaataataacggcggtcatacccttcgttgtccagtataaaacggtatgcctcctctttcggcagaccgcacacggcaggagtcggatgcagaagctccagaaggcttcccaaacggttgttatctttcaaggtgaaacggaaactcgttttcaggtgcgacagtgctccggcataagcgggatacggaccgctctccgtgggatgaatgcccgatgacagaagctgccgacggatataagacgccacatagtcctgctcctgccggttcttctcgccccattcctgcggcagtctgccatcctgcaaaggttgggttcccgccaatgccacggtgctccactcgtttttctccccggataagataatctcaggggtactacccatccagacacctgtccggggcgtatagcataagtatatataagaatgaatataatgcttgcatgccgcacgaaacactgccgagggagagaaacccgggcactgcccgatgacggatttacgggaaaggaccaatttgtcaaactgcttgctgcgcaaggcttctataaatgtccggaagcatgcttcgtactcttccgtgcaagcttctgaaaatgtttccctgccttgacgcaaccggaaagcttccagctcctcttccgcgtactcgccaagcggcaaaggctgtccccactgctccggctgtatcagcacaatcgggcacgactcgcttgcacggaacggtgcaatgacgaaaccgcgtgccctgtccaagtctttaaggtcatacaacagacggacgcttcccgacgcttgtgtcagcaaacggggagtgtcctcacctggaatacgataaacggccaaaggctgttcctgccggatcaaggtatcaatagctttcagattacttatttctttgtcaatcatcttcttttgtaaaagcataaaaccacttgcagagttcaggtacgctgcatggttttaattcggatgacaaagatacaaaatcctttttatagagatagaaagcgaaagtatctttccttatgtattttcattgagttacaaaaagtgccgtccataagattctatgaacagcactttttatatgtttcccaccataatcgggagtaatgacagatggcattatgcagccatcccgaacagttctatgcagctaccctgcacaaggctatgcagtcatactgcacagtactgtgcagcgtggctgcataccaactcttgtttatccgagaggattttcttcttcactgccggacgaaccgcctccgccttcgggcgctttgccgatataaatggttttggcggcgctatgtggggttttcagtaatttagaaccggaaccggagaattgcgtcgtcactttcagttcgtacgtgccgtcggcaaggcctgcggggatgatgaacgtcagtcgggacgggtcgttcacgacatagaggtcttccgttatttttgtttccgcaccggaagaatcggtcagagtgatgcctactgaggggtccgtaccggctattttcagtttaccgcctgtgagggtgaaagctcgtcctgcggtggcgctggcatcctgtgcacgggtggcggcatcctgtacgcctgtaacgaacatggctgcacccttctcgccaatgatgcctacggtagtattctttattgtctggcgcaaatccgctcctacattgaaattcaccacgatagagttctttgcgggattccattgcgagttctctatgacaccgcgaaagctgacgctggcgtagtaaagacccgtattcacgttgtagccgctcatgagcaggcgtttgataacacgtttctccaattcgaatacgtgcttgatggtctcctcgcgcagacctgagtcctcggctttcatctccgcgatgatacgtgcctcgtttgcactgccgatgctgacggggacaagaatcatgtcttccttgttatccaccgtaacggtattgtcggccaactggccattgatctgatatttgatattttctgccattgtatgttttttttaattgttatgatacgattggttgcagtgcttacagcgactgcattgaaaacaaaggtacatcaagtcgtgggaaagaaatctgttttttgatgcacctttgcatgttcagacaattctctattcggtgttgcccatcagagcacgacacacattgtcataggttactgttcccaccagagtttgggatatacgggtgctgtatcattccaacggccaccagtcttccaaaacttacagtctgaaaaagttttcgagtttgtatcgtaagtatacgaaccatcgggagcatcggctacaaaccaaaaactaccggcagtgttataagccggccaggcacttccgccgaatactgttgttccattctgagactctccatacaatactgcagtaaaacagtttgtcgtattatcagcaagactttttatccgtgccccgtctactactcccgtattatagcaacctatggcagtaccagacgctcctacaatacctccacttgtggcggaactgtaaccctcatttatatttcctgcattataacatcctgctacaacagcaccggtcgcagtcgaagctatacctacaattccaccaccctgataggcacaaattaccgtaccataattggcacacgacactataatggtttttccttccgcttctccacaaattccaccgcctgcatagctcgcttctacacttcctttgaaagagcatccacttatcactcccgtagtcgttgcttcatattttgacatgcctccgcatattccaccggctttatacttgctttttacatcaccgctgacatggatattctttatcacaatattgccatcagcatatccgaacagaccgctattcccattttgttgtgtcacgttagctttcaaatcaattatttcatatcctcccccatcgtaatttgctcgtaaaggattagtagttgttcctataggcatccagtcatgattgttcagatgaatattgactgtctgcttgaaatatttattctcataagatattccgctattcacattcgctgcaagctgggcaagatcagaagctccggaaataacgtaagccgtctctgcactatcgccattcttgcttgcatcaccaaatttggcatttgcatcggctgcaggagtttgcccgtcccatacactgacatctatatctgcatcccaatctgcaaaatcacaagtgtaagtatgcgtaagagttgccggattaaaactaatcaccacattggtcttatagttttttttggtaggcacgtggtcgatagtcacgctctgcaaaggagtacccggatttgcgctgttataagtatctatctccagactcaacatacttccggcaccatctgccgaagcaaatgaataaaccgactggtacgtaaatctgccatctgcaccggcatttgccgtaaaatcggttacttcaaaagcagacggatccgtaacactgccagcagaagaaaccgtattgtccgatacattaaaagtattgggaacattggtataacttactgtcagtttggaatacttctccatcttttcattgctcttgatatttacttgtgccacagcacgcctcaaaactatcgagtgaacccccgatgcctgaccgaccgttattgatgcagtagcacaaaatgcctgacattggtcggcatgcgtcagatgcttctttaaagtcacagccttaaggtctgttgtatcaaaaaactcattttcaccgccggcatccggaatgtaatgcgcccaaaacaaacaggtataagccacacccgcaggtaactctacactgaatgtacctgtttcgttattatcggaagatgcttctatcgcatttccgtctgcattcaggacttgcaggaaatactgtaatttatatcctgtcaccgtaggcgcagcggcacgtgtttgtacatctccctctgtagccaagctaaaagtgaagatttgggttccgctcacttctgtccccgttgccgattgtcgttccgagcaagagacaaacaaaattgctgttatagcaatcagactgaaaatcaattgttttgtttgcataaataaaagtttttagttaataaattagtaattaatacattaatgagacacattgatatttatttctccctcatagtcaccgtccacaccgacatttattccacctgaagcattcccgctgttcctggaaaggaaagcgccttccacagtagtagtatatccgcgccgataaggtatttccaagtcagtggtccggctcaacaatacttctttaccatctgtcacagcaaggctcaccgttattatagaacttttatcgtccgcaagtaaatagtcggcagcaagttcacactccgccattgaatcggtaagctttatctggcgggtataactaaaaccgggagcagaatttatcggctcacccgtaataatattcaaatgggttacgagaaaatattgatagttcacgatgatttcatattctcctataccggaatgaccattggcatattgtttattcagaaactgctgcacatcggtggcaataatacggtaatacgccaacggccgctttagatttatccgtaccttatactctccttcctgttctgtcaaatccacggatgcattaccatagaaagcatcccgtcggcagtagtcatcttcataaggcagcaggtaagaaacggaacagaagtcctccgtagcataatatgtatccgatagcgtctctgttcgcgtataatctacccaaactgtaaggtcgtaaaaagcaggattaagaatcagaggcgaaggaagagttatttgggctcccgtcagcttttcttcattgactatcgtcacagctcgtacggtagagacagattctcctgctctgcgcgcttcaacgataacgcgggaagcataactttcattcacaacaccttcatcggttttcgtaatggcaggtaaaggaataaactcaccatccaataagagttccatttccaaagagacattttccgttggggtttcatcagggtattggtgaatacaaccgccaagaaacagcagcagtaaatataaaatcggaatgcacgatttatgaaggtattttccttttataataatcttcttcatggtttcgacagtttataaatgaatgacagtcccaaattggtgacaccccaataacgtagcggacgaatagtacacaacgcaccattcggcatattaaggaaagttttataacgactgtttgcataacccatacccaaattaaactccactccccaaagagcggtcaatgaaacagtatagccgtaactaaatcctacaccccaaagaggatagccagtatcctgataacgatattctttccatttcaggttataacgagcaatgtgtatatgcgggccgagaaaatgccctcgtcccggtttggaaaaccaataacgcagttccggctgaaaaaggacgattcgtaaggcagaagtacgtgtcaagtcccatgaactccacactaaaggcaaatcaagagaaaaacggtgacctatctgtatctcataggccaaattgacagaagcaattgcccatgcagcgaggtttgttttcaaagcggaatatctatcggaagttttgggaagaacatatatataaggtgtaggagcaggcagataatttgatacagaacctgctgtctctatcatttcgccaacagttttcattcggcataaagatacagaaagcgctgtcgaattcaaacacccttttatccaaacaatacaaatcatggcattgcgtaataacggaagaatatgttgttgcatatatctgaaggctttgccaccgttcaggaatttaagcagagattcacgacgggcaggattatgcactttatcaagtatcatcaatacctcttcacgttcattgaaagctgtatctgccgaaaccaatgctcgcagcccgtcccagttctcaccttgcggaaaaagagagacaggaacggatgacaacaaaggatagttatcggcaagatagcgttgcatggtatctgcacgtcgaacagagagttgtacattgtatttctctcgtccttcgggagaagcataggtatataaatgaattgaatctataaaggacacatgaaaagaatcggataaaagagttcctaagcagttaagcacattacgattatcagcataagcaatatcaatgtctgtcttgtcaaaacgaaaaaatgcagtatgggtaatacggatattttcctgtccgcaaacgggaaaagagagggctaataggaacaatatagccaataatttttgtgctgatagcatggacataatagtatatagggtattacttatcaagtaatggccggcatacgaagagaagagtgtacaattcgtggaatctgtacatgattcagctgttattacccctataaattccatctttcaactgtcgaggtttcggctccgcttttacatccgaagcggggaaaggggttcgtatatcttatacggaatacgaacggggcaatatgtattttataaggtgggatttgcggacttcagaactaaatacaagatttaattaaactttttctaacaattaattggcatttggtaaaatttagcatatatttacaacgttaacaacaccgttacttgataagtaattccggcttataatcctgccctatattctgtttcatttttccatttacattttctaacggaagctatcagttgcctgtttgccttatcgaccagctcattgccgaaaggcttgagataggtttccgtcacccgcagggacgaatgccccaaagcctgactgataatccccaccggctgtccgctatggaaagcaagtgtagcccatgtgtgccgggccgtgtatgagctgacccgtacaccgggcagcaagcggctcatcacctgccccaacttgcgattgaaatgccgaagggcatcctgataattgcggtacgactgccagccgtcccgtatcctcgcatcgagtatggggaaaaggtagggcgatgcagaatgcctgtcggcgtacttcgctatcagcgcaagagcctcacggggaatgcgtaccgttatcggcttatccgtcttatgacggctgtaggttatcctgccatcctgcatatcgcgcttgcgcaaatgggcaaggtcgataaaaggcatgccgcggagcaagaacatcagcagaaaataagcaagtaccgcctgctgctgcggagaaagaccggaaaggtcggcttccagcaactgttccatctggcgggcagtgagcgcacgcttggtctgcgacaccacaccggtatagacatcatcgaagagtctcggattgtgttccgccgtgccgggcggcatccaacggttgtaaacggcacgcaaagtacgcatgtaggtggatatggtgttctgcgtcagtttacggagcaacatccactgttcgtactctttcaggcgaccgggtgtgaagacttcctgcatcggcatggagcactcctcctctccattgtcggaaaaacggatgaaagagcggagcgtacaagtataaatatgtactgccggcggcttcctgtcacgccttagttcttcaatcactttcatcatgtaggcagacaaatccgttgtgcccacatcttttgtttctacttcattcataaatctgctttattagttttttacgcaatatacgaacgaacaatctttcgcaaagagtgtttgaaagactattattccaacctaaacgaaaaacttaatatatgaaacaaatcttactcatcatcttcttgggagcaagtgtttccgcaacggcgcaaaccctctccctgagcttcgatgatgcccttcggcagatgcagcagggaaaccgaagcctgaagatagccgacaagggtatcgagaccgcacggacggaacgtgacaaactgaacgccctttggtatccgagcctgcaaggtgcgggcacattcgtacacctgtccgaaaagatagaagtgaagcaaccgttgtcgcaatttaccgaccctgccaaagactttgttcacaacctcgtaccggacgaccaatttatcagcagtatcctcgaccagataggcagccacaccctcgcctttccgctcgcaccccgtaacctcaccacggtaggtctgaccgccgaatggatcgtgttttccggcggaaagcgcatccgtgccggaaagataggaaatgcaatgattgacatcgcccgcgagaaccgcgaacagacagacgccacgcagcgtgtcctcttagcagaaagctatttcggactgcgtctggcacaagaagtggtgcgcgtacgccaagacacctacaacagcctgaaacgtcattacgaaaatgccttgaaactggaagccgccggaatgatagacaaggccggatgcctctttgcgcaagtgaacatggacgaagcgcaacgctcgctggaagcctcgcaaaaggaaacagccgttctgcaaaacgctttgcgtacgttgctcaacataacggatacttgcagcatacagcccgtttccccgcttttcataaacgccgtgctacctgcaaaagaggagttcctgcaaaccatgcaaaccgaaaactataccgtcaaccaattgcagttgcaatcgcatatagccaaacaacagctccgtatcgaacagagcggctacctgccggacatcgccgtattcggcaagcagacgctatatgcccacggcatccaaagcaacctcatcccccgcaccatgataggagtaggattcacctggaatctctttgacggtctggcacgggaaaaacggatacgccaatccaagatagcccaacagaccctctccatagggcaggaaaaagccaaagacgatttaagtgtgggtatcgacaaactctacacgcagatgcagaaagcacaggataatgttcgtgccctgaacacaaccatcgaactgagtgaagagttagtgcgcatccgcaagaaatcgttcactgaaggcatggcaacaagcaccgaagtaatagattcagaaacgatgctggcaaccgtacgcgtggcccgactggcagcctattacgagtatgacgtggcgttgatgaatctgctggcgctttgcggcacgccggaagaattcgggaaacttagtaatttgagagttgagaattaaaaattgagaaacaggctgtgcaatgaggattacacggaaaactcagattttccttatttcgtataatccgtacctaaaaagaaacatcaagtgtatttggatacaccgtactttatagtttatacttaaattaaatgaatatcagcaataaaaccatcagcatcgcattcatcgtcgtattaatcgttaccgtaggagtatcggttatcggaatgtcacttatgagccggcagccaatggtgctgcaagggcaggtagaagccacggagatacgcatcagcggaaaactgccggggcgtgtagattctttcctcgtacaagagggagattgggtaaaagcgggtgacacgctcgttgtcatcaacagtcccactatcgaagccaaataccgtcaggtaaatgctttggaacaggtggcgcaggaacagaacaaaaagattgatgccggaacgcgcaggcagattatcgctacagccttgcagctttggaataagacgcaaagcgacctgacgcttgcccaaaccacctatcagcgcatcctcaccctttataaagacagtgtggttacttcgcaacgaaaggacgaagtagaagccatgtacaaagctgcacaagctgccgaacgcgcggcataccagcaatatcaaatggctgtggacggcgcgcaaagcgaagaccgcgcagccgcacgtagccttgtagatgccgcacgcagcacggtggatgaagtttccgcccttcttgtagactccaggctcactgctcccgaagacggacagatagccactatcttccccaagcgcggcgagctggtggctccgggcacgcctatcatgagcctggtggtgatgagcgatgcacacgtagtcctgaacatccgggaagacctgatgccacagttcaaaatgggcggcactttcaaagcggacattcctgccctcggcaagaaagacatagagttccgcatctattacatcagtccgctgggaagtttcgccacttggaaatcgaccaagcagacaggcagttacgatatgcagacgttcgagatacatgcacgacctgtacaagcggtggaagggcttagaccgggaatgtcggcaatcgtaaataaagtataaaaaggaaagaagggaaaccggacaatctttttcagacataagaacaaaagaacatattcatgattataacatatgctaatgttttcttatttgttcttatgtctaaaaaatccgtcatcaccctatttgaaaaaagtctgtcatcacccaagtcgataccgttcagagttgaagcgccaatcatctcaccatacaaatttcttattatgaatttattatataatgtcctcttccgcgaatgtcaccgtatcacctcacgccgtctctatttcggcgtgtgcatcctcctgcccttgttctgcctgttctttatggctaccattttcggaaacggacagatggagaatattcctatcggcattgtagaccaagataatacggcagcctcacgtaccatagcacggcgcattgcagccacacctactttccgggttacggagcactttacggacgaagcctctgcacgacaggcattgcaacggaaggagatatacggctacttatccatcccgccgcagtttgagcagaaaacagtcagcgggacgggtgcaacgctgacttactattaccattacgcccttctttcggtaggaagcgaactgatggcagcatttgaaaccacactcgcccccgtagcactgtcgcccatcgttgtacaggctgaagcattgggtgtggggcaggaacagatacagacgttccttcttccggtagaagccaatacacatccgctttataatccggatatggattactctatctatctgagccagccgtttttcttcgttctattccagatactgattctacttgtaacggtgtataccataggcagcgaattcaagttcgggacaacgcaagaatggatgggggctgccacacccgcaggaaaagacccggctaatctgcggaatgccgatatgctgactgccgtcgcaggaaagctgttgccctacaccgttatgttctccgttataggcatactggcaaactacgtgttgttcggactgatgaacataccgtttcaaggcagcttgtggctgatgaacatcgtaacggtactgtttatcatggctacgcaggcattggcggtgctgatattctctatctttcccaagatagcctatatcatcagcgtggtgtcaatggtaggctctttgggagctacactgtcgggagtgacatttccggtaacggcaatgtatgcaccggtgcatgcggcgtcctacctgtttccggtacggcacttcaccgaagcggcacaggctatgatttatttcggtgcggggtttgcttatttctggcaatcggtggctgtactactggtattcctgctgctggccatactgattctgcctttattgaagtggtggatactgaggaggaaggaaagcgaagaaactctccatatcggagacaaagcattgtccggcattgcagcgaccgatatacagtccggtatatcatccggtacatcgcccggcacggaagcatccctgagcaatgtcatccgccacgaatggaaagccattgccaccaatcccgccatcctgctggtgctggcagggggaatcttcctttatggcttactctacaactatatgtatgctcccaatctggtacgcaaagcaccggttgccgtagtagacctctcccactccgcactcagccgggagtacgtacgatggctggatgccgccccgcagacttcggtctatgcccaaacgcccaatatcctcgaagcccgcaagtggatgaaaaaaggcgaggttaccggtatactctacatcccttccgacttcgagacgcatgtagcgcgcggcgagacttccgtattcaccctgtatgccgccacggacgcattcctcaacttcaagggattgcaagaagcaagctcgcgcgtgatgcttgccgtaaacgatgcccaccggcgtgccggaacagtattcctgccgccgcaaggtctgttggccgttgcgtcgtccactcccgtcagcgtatcgggaacggccctttacaattacaccgaaggatacggttcttacctgattcccgccgtaatgattgtcatcatcttccagacaatgctgatggtgattgccatgcttaccggcgaagaagcggaacagcggcggaaaggcattcacagcatgagagcccgtttcctgaaagatatgctgtgcatcgtatcgggaagaaccttcgtatatgtaatgctgtatgttgtgttctccatgttcctgttgggactgctgccgcatattttcagcattcccaatataggaagcggttgggacattgtcactatgatgattcctttcctgcttgccacgagtttctttgcgcttgccgtgtcccgctggtttaccgactccgaagccccactgctgatgatagccttcttttctgtgggttacatcttcctttccggcgtgtcttacccgctggaactgatgccctggtactggcaagcggcgcattacgtcttccctgtggcccccgcagtactcgctttcgtaaaattaaattcaatgggcggcagccttgccgacatctggcctcagatgctgacgctgtggatacaagtaatcatatacggtgcgtgggcggtgtacactacaaggagagtctataaacgaagtaacataaagacaggtgacatagaggcataaaaaaaggctatctatcccagacagccaatcttcttgttaaccttaaatctaatactatgaaaaacacattgcaaatatacggacatttcgggaatctccaaattatcggagggctgtggtcctacttataacatggtttaataggaatacgctgttgttaacaaatcagcacccggaaattaagaaaaacttacagtcttttcctcttataagtaaattcctgccatttctcttccggccaatcctgccgctgcatctccgtacgcgccatgacaaagaagagatctgacagacggttcacaaaacgcaaaatatcctcattcagcggagcttggcgatgcagtgtccataagcgtcgctcggcacgccttgccactgtgcgggcaaaatgtagttgcgcagaaacaggcgtaccacccggcagaagaaaatagccattctccttcagtccggcagtcatggcatccatttcctgttcgcagcgtacggtcagttcggcggcagaaagaagattggggttcaacacgccatcgggcgtagctacatggctcatcactaccatcagttctctttgaatggtatgcagcagttcctgccaattgtcttcggcaggaagcatggaacgtacgattcctattacggcattcagttcgtccagacagccgtttgcctcgatgcgaatatcatctttgggaacacgcgctccgccatgaatgccggtggttcctttatctcccgtacgggtatatacttttttcatctttcagcgtatgcttattcaaataacctcattatatccgtttcaccccaataaagatgcgtgtaacttgctatcgtattcttgtagcggaatacgggcgtgttcaccggttgccctttggcattatacacctgcacgacggtaggcggcatatacaactctttcttactgtcatcgggagccgtccccaacttgccgaactgcgtataatgaaactcgtgcccccgcaaacgctgccccttatagtcgaagctgcgataccccaacgtcagtttccgatattcactctcattggagatataaaaaggaaacacacccgccattctgtcgaacccgctgccaccgctctcatgctcccgtttatcataacctatggcatacgaaaggtaaatcattccgccacactccgccagcgtctttccgccgcgttctatatactcccgaacggattctttcacctgacgggccccggcaagcgccatagaatgtttttctggatacccgcccggcaagtacaacaaatcggtgtcctgcgctatggggacatccttttccggatcgaagaaagagacattgcccattccgcgcaacatctccagatgttcttcataaatgaaagagaaagactcctcgttacgtgccaccaagatacgcaggttgcccggtttcctaccgccgacaaactccttatccctttcccgcgtttcccgcaacggaaccgctgtcttcgccagcagcagtttccaatccacgcattgctccaataaccttgtcagagtaccgatggcatccgtgcctttggatcgactgaaatcaagtcccaaataacgtgattcctgctccagcactttctcctttggaagataccccagacaggttatgcctacctcggcacacacttccctgagcatttcataatggcgggacgaccctacacgattgaatatcacccccgcaatccgtatatccggacgaaaatggatgaatcccgacagcaaaggagccattgaataagcggcagacttggcatccaccaccagcacgactggaagttgcaacaactgagctatctccgccgaagagccccggtcgcgatcatatccgtcaaacattcccatcatcccttccacaatgcagacatccgcagaaacggcatgacgtgcatagagttcgcacacatgttcaccggaagccataaacgtatccagattaatggatgcacgtccgcatacagccgtatgatatttggtatcgatataatccggaccgcatttaaaaggctgtaccgccaatcctttttgtgtcagcaaagccattagtccgcggcttacggtggtctttccgctacccgatgtgggggctgctatgagaaactgagaaacgcgacgcatgttatttaggtataaggtatgaagtataaaagggctgttatggattttgtcggacaaaggtaataatatatccggtaaaagtcttatcttagctgccaaatataaaaaacgctatgataatcgaagaacttaaaaaactctacattacacatactgggcacgaacccgaagccattgacgaacttccctcttccggctcaaaccgccgctatttccgcctcaaaggtacgcctacgctgataggggtaagcggcgaatccgttgaggaaaaccgtgcctttctctatatggcagagcatttccgcggaaaaggattgcccgtgcccgaagtgtttatccgttccgaagacaatatttactatttgcaggaagatttaggagatacgcttctgttcaacgccatcgaaaaaggacgcaagacaagcgtattcgatgaagaggagaagcaattgcttcgtaagaccatgcgcctgctgcctgccgtgcaatttgccggagccgacggcatggacttctcctactgttacccgcaggctgagttcaacagccgtagcattctgtgggacttgaactacttcaagtattgtttcctcaaggcaacgggcatggactttcaggaagaccgcctggaagatgatttccagaaaatggcagacgtgcttctccgcagcagttccgcaactttcatgtatcgcgacttccaaagccgcaacgtgatgattaaggatggcgaaccctggcttatcgactttcagggcggacgtaaagggcctgtctactacgacgtggcctcattcctgtggcaagccaaggccaattatcccgacagcctgcgccaagaacttctgaaagaatacatcgaagccctgcgcaaataccagccggtggatgagagctatttctatgcccagctccgtcatttcgtactgttccgcaccatgcaggtattgggcgcatacggtttccgcggttacttcgagaagaagccccacttcatccaaagcgtgcctttcgccattgaaaacctgcgccagttgttgcaggagccttaccccgaatatccgtatctctgtaaagtcctgcacaggctgaccgaactgaaacaattcaccgacgacctgaaaaagcgtcgtctggtagtaaaagtcaccagtttcgcctataaaaaaggtatccccgaagattcttccggcaacggcggcggtttcgtattcgactgccgtgccgtaaacaaccctggcaaatacgaacgttacaagcctttcaccggtctcgacgaacccgttgtccgcttccttgaagaggatggggaaatcgccgtattcctcgaacacgtatatgggctggtagatgcatccgtgaaacggtatatggaacggggatttaccaacctgtccgtatgtttcggctgtacaggcggccaacaccgctccgtatattcggcccaacaccttgccgaacacctcaacaagaagttcggcgtacaagtgaacctgatacacagagaacagaacatagaacagaattttagcgcgaaacagtaatactgcccgtcatcctattattttatgaaagcaatgatatttgccgccggactgggaacccgtcttcgtccgctgacagaccacaccccaaaagcgctcgtctccgtagccggaaagccgatgctggaacgggtgattttacggctgaaagaagccggattcaatgacattacggtcaatatccaccactttggagaacaaattatcgagtttctccgcgccaataacgatttcggcatcactatccacctcagtgacgaacgggatatgctgctcgacacaggcggcgggataaagaaagcgcgtccgtttctggacggcaacgaaccgttcctggtgcacaatgccgacatcctttccgacatcaatcttgcagagctttaccggcatcatcgggaaagcaatgcagaggctacactgctcgtcagtcaacgacagacatcacgctacctgctgctggacgatgccaaccgcctgcacggctggataaacaaatccaccggtgaaaccaagcccgaaggattctctttccaagaaaggcaatacaaggaaatggctttcggtggcattcacgtcatatccccttcccttttccgctatatggaaagcagacaatgggaagggaagttctccattattcctttttatctatccgtgtgcgaaacagcctgcatacagggttatccgcttcaggaccgccgttggttcgacatcggcaagccggaaacacttgcaaaagcagaggaatactaccgatagaaagacaaaatgaagaaaaaagaaaataatcaggaagaaaaagctgaataatatataaaaagtctttatctttacccccggaattggcaatcgggaaggcatatccgcctgccgatgcaagggaatccggtgcaaaaccggagctgtacctgcagctgtaatcctcaataaaagatgtttgtatccgcaaaagccactgtcgcggcaacgcgatgggaaggtaatacaagcagaggagagccagaatacctaccaacttccgtaacttgagcactgagcttccaggattagaagcgatgtcccctatactgatacgataggattcctattttactctttcgggccattacctttcgcacacagaagcgaagtgccgttttgttttatcaacgaaaaaatcggtagacgatgaagcacaagtattggcttgaagcggtactgctgtgcggtgtgatgcaatccgccccggcacaaagtatccttaaaaacaaagatgagaaagaactctcgttactgctcaacgaagtagtggtaacaggtacgggaaccgagcactacctgaaagacgcccccgtgcagacagaggtgctcacgggaaaagcgctggatcaatatcaggcgcgcagcatagacgaccttctcagcgggctcagcccttccctcaccttccatgacggcgacatgggcagccatatccagctcaacgggctgaacaacgactatatcctcatcatgataaacggcaagcgcatgaacggggacatcggcggacaaaacgacctcaaccaactgaatcccgccaacatagagcgcatcgaaatcgtgaaaggcgccgcttcttcactttacggcagcgatgccattgccggagtcatcaatatcattaccaaacggagcagagagaaaatggaactcaccagcaccacccgtgtgggcgagcatggcgatgtacggcaaagcgccagcttcggcttcaactacggcaaactgaaatcggtgaccggtatcaacttccggcacaccgacggctggcgcaatacggatatgcaatgggatcagaaccaactgaagcccggttccaccatgcttaccgtaaaccgttccagcaactacactctttccgagaatctggaatggcaggtaaacagaaaactgaacctcaccgccgaaggaacgtactacgaacgttgggtgatgcgtacgcacggcccgtggaagtacctgcccaacgacttctactaccgcaactatacttttgccgccggaagcaggtacaagctgaacgggcgcaactacctcaccgccgacctctcttacggtcgctacggttacttctacgactataagctgaaagacatcaccgactacttcaaagacggcgaccgcatcacctactaccccggccagcgtatcaagcagagcatacagcaacaagtgctggcacaggtaaaaggtatcttttacttcggcgaccggcacatcctcaataccggcatagagtaccagtacaaccgtctggaatcgcctcaccacatagcaggcgacatcgcttccgtctatacgctcgccgcctatgcgcaggaagagtggactgccacaagcaaccttatactgactgccggcgtacgcggcacgcaacacaaggaaaccggactgaacctcagccccaaagtatccgcactctacaaagccggtaacttcaacctgcgcgcttcctatgccatgggcttcaaggcgcctaccatcaaagagctctattatgaacacacaggcagcatcggcggcagctccctcaccgcctatcatggcaatacagacctcaaggcacaaacctcacaatacacttccatcagcgtggagtatgcaggaaacaagttccaggcgagcctgaccggatatgccaacttcatccgcaacatgatagagctggtagagataaaagtcacccccgaagaaaagctcctcgaaatagagaaaagcaagaaatacaccaacctcacgaaagcccgcatctatggcatagacttcaccttcaactaccgccccacgaaagacatcatgctgggcggtgggtacagctatgccgatccgaaagcgcagtatgccgccgatacgggcgataactacatgaagtacctctacatcgacgccacatccaaccataatgccacgctcaacgccacctggcagcacacgtggcgctgttaccgcctcggcttgggagtgtacggccgataccagtcgacccgccactacgtcaacgacaacgatgccgacggcttccagacatggcgcatcaacaccgcccataccctaatgaagatgcggcactggacgctgacaatgaacataggtgtagacaacctcttcaactacgtagaccgcactcctttcggacgtaaccgggctaccagcacgccgggaaggaatttctacgcatcggcgcttataaagttcaagaacgggggcggagcaaaatagagaaaaacatcttttttattaatcaatttacaaacaaagtatgaaaaatttcaagttttatctgatggcggctctcgtagcagccacaacttgcacaggattcacctcctgtagcgatgacgacgatgcagaaagtaccgtaaaccctgcaaccagggtagtagccgaaaccaagaagtatgacaccgccatcctactctgtactttcggaagcacttataatgagtcattggacgtttacaacgaaatcatcgccgacttccggaagcagttccctcaaacagacatctatatgtctttcacctcacgtacctgcatcggccgtgcagaggcttctaccggcgaagcgcgctacaaactggaccaatggctgaaagccatcggcgatgcaggatatacacgcgtagccgtacagtcgcttcacgtcattcccggcgaggaatacctctctctaatgaataccgatatcaagaaaaactttatgattgactggtatccgcacatcgacgtgctgaaaggcgccaacctgctctctaccgatgatgatacggacgaagtggcacaggtgctttacaaccactacaaagacaaactggccgaaaagaaaaacatcgttctcctgatgggacacggtaaccctgatgtgaactacaatgccaacaccaaatactccgaagtccaaaccgccttgcatactcttgccacaaacaaaaatatcttcgtaggtactgtagactatggagaaatgcttttctggccgaaagaagaggaagagaaagctgcagatcgcatcccggtagtacctgccgcccaaatgatagccaactatcccggctgcatctattcgcaagtgatgaagtactgccaggacaataacctggagccaaatgaagtaaacgtacacctcgctcctttcatgtccatcgccggcgaccatgcccacaacgacctatggggcatcgaagcgatagccgaaaacaaaggcttggataaagtggaactcaataccaacgagtacagttggcgcgaacgtctggagaaagcaggtttcaaggtagacagaacatttgaagcccatcccgtaggccaagccgatgccgatcacggtatcaaagacggctgcggtatcaaggctctgggcagctatcccgaaatccgcacaatctgggtgaatcacctgaaagagcaatgggatgccgatgcctgggaaaacggtgaagggtatcagccggaagcataacatttgtcctccattttcttaattcaataagggaaaaaaggagaggaaaggctgagacagaaaaaatatgcgggtatttctcatctacagaggagcacccgcatattatattaataatcaaactattaaatcaaagccttaaagaatattgctcctctttggctacataaaagaaattacccaaacgctaaaagacaacatttttccacaagccaaacaagataagtacatcttactcaaaaatcacaaaacacttatcaaaattaatagtcaccttgtcaaattggttgataagtgccattccaatattacctgcgtagggcacaagtctgttattttcaagccccactgcaatattcttgagcactacatttcttccaccaaattgaaacgaccattcgggcaaaattaacatgtcgcgttcctctacaacaccaattccgcccgtaagtctcctaacacgtttactttttgcatcaatttctgttttattactttcgtaaaaattatgagatagagcggcaaggccattacctgtatcgaagaagaaattgtatgattttccacagctttccccttttagtataagagagcgattgtccatgtatatattgctgccacttgcaggtttttccgtcaacaatgtgggaattactattttcccattgtgaggaaatatttgtatctctcccagcaatgccattacatctgccccaataagaaagtcaatatcttctaccttgttcagtgttgtgtccttatttatcgttataggaatattccttactatgatatcacctatctgcatgctgtccaagatacccgattgtccgtaaaccgttataccaccatgtatctgtaaagaatctgcaatcaatctcacacctgtctttttagcaaatgcttccgacatgaaagtggtacttgcacctatgtcaaatattgctttatactgtttactgttcactgttatcgacacatacatgctagttcccctctgtactgtatcgttttttatattcagtctgatgctgtcgttactcattgctatcacagtatttttttgagggagttctatgctcattggtgggcaattacggaagcggtcgtaaaactggactgcttcatctatttgagtgtaatccattgccacaccttgttcccttagctgcgatgtaaaatccttcaatatatcggcagccacggcataattacccctatttgcctctacaatagattttacaagcaacatagaggctatatttccaagtccgagttcagcttgataatgttgcaacaacgagtctacacacgttatcgtttcgtccgggcgattgaaataatatcccaataaggcttcagacattaatctgagcataggagtttgcacgctatctttaatcataggatattcctcttccagcgtaaaccaatcgccattattgagtaattttcccaagcgtatgtcgctcttttgtgcccatacacccgttactcccaatagcataagtatataaaacagatatttaacaagcttcatgtatatcataatttttgctatttttttaaattgtctctcattgtatttcaacaccctttcctcattgtaagcatctatcacaataaaagggcatccggtcctgttatctttatagtctttaatattggttttaagccagcattaaataatgcaaacaatgccacagtactaggtagtacagccgttgtcattcaacaattcttccacatataaatcagcaccattgaaaaaatagtcaaggtcatttatatcacaactgaaaattgttaataaatatactaaaaattctgccgtagaatccaaaattggtttttattaactcattttaatcataacctactattcttcgtaaaaagaaactactctattacacaacaaaacagtgtaagaattttatttttttcagacaggtacaatccatcctcataagtcattggccactagttacgccatcatcatttattcattcctaattgatttttccagagataatacttatatttgtcaccgcttaggtgatacactccgttattccaacgagttgtataaaagggaatccggtgcgaaaccggaacagtgcccgctactgtaaagccactttgctccgcctgcttgttgcagcaacggagcatacggaaaacattcttcaaaacaatgccactgtcttacagacggctgttggtgagagcgaacatcagtttgagccatcgcagaccggggacgggaaggtgtggttttccgcagggctgagtcaggaaacctgcctgggcaattacacagtcaacgccttcccggggtcaggaagacaagtattaatcttacatttttcaataaatgaaaaccaactatttattggcagccatactgtgctgcctgacacccctgctccatgcccaaaccgcattgagcggaaaggtggtgagcgccgacacgaacgagcctcttgcaggggtaaatatccgcgtagacaacagtctgacgggatgcaccaccaacggaaaaggagaatttatcatcgacaatctgcccgacggacaacacacgctgcgcttctcctacatcggcttcacccccaaaaaatacaccgcggacggacaagaagaaaacatccttgtaaagctggaggagagttacagcaacctcagccaggtggtagtgaccggaaccggtacgcaccgccgcatgacagacagccccgttcccgtatccgtaatcacggccaaagaaataggcagcgccaacgtatctacgctggaagaagcgctggtgaagctgacgcccaatatctcttcctacaccaacggcatgggcactaccatgagcctgaacggcatcaacgaggactacatactgatattggaaaacggcagacgtctggctggtgaagaccgctacacgcgcatcaacgtggccaacatcaagcgcatcgagatactgaacggcgcggcatccgccctgtacggaagcgatgccataggcggtgttatcaacatcatcacggacgatgcccggaacaccgtgaacgtatccagctatactcactactccggtgagggacgactgacggagagcgtcaatgccgatgtcaatacaggcaagttcgcctcttatacttcctaccagcgccgtcaggcaggaagctggcagaacaacaacattgacgagaacggctacgaaacgggacgccctacttccgtaggcttctactccaacaccgtaaaccagcgtttcgtgttcaatgccacagacaaactgtcgttctacgcgcgcggtacttattatgataacaaaacccgccgtccgcaggacgccacctactatgccaaaagcaaaggccagttcgtgcagaaagacgcctatacctacaatctgaaacacgagacctatacttatggcgccggcatgaagtacatgataaaccgttcggcctacatcgacgcggaattctactcggacaatttctcgtcggactatatgtacttcaagaaatcgggcagctatctgccgggcgaccgggtgacccgcaaacaagtgcgatactacaacggaaacatcaagggtattttccgcctgggcagccgcaacaaactgtctgccggcgtagaatacgtaaacgaggggctggagagcgaatcggacaacatcgactcccgccacatgtacaccctcgctttctatgcgcaggatgaaataaagctgcccctaaacctgcaagccgtactaggcatacgctacatctacaacgagaacttcaagaactacgccaccccaaatgtgtcgctgatgtacaaactcggcggactgaacctgcgcgccgcctacgcggcaggcttccgcacgcctaccttgtcgcaactttacgccaccgacgaatccaagaccagcaaccgctacaccacgggcaacgccgacttgaagcctgaaaagaacaacttctactcactgaatgcggaatacaactaccgccggatttccgtgtccgtcaccggattcatcaacgacatccacgacatgataaactatcgcaccctctctgaccaagagatacacgacatggggctggacgacaagcacgccgctttcgacgagatacgccagcgcgacaacgtggacaaagccaagaccaaaggcatcagcctgaacgccagcctgaacctaggcgcgggcttcagggcaggcggcggatacacgtacatggacaccgaggccaagcagttacaagccgacggcagttacaaagtgtcgcccatagacaaaagcgtcaggcacatggggaacatcaacggccagtgggaacacgcctggagcttctaccgcctgaacgtaaacgtgcacggacacctgcaaagcgaacgctactcgcaaacgtacggttacgctcccaaattccagcaatgggatttgaatacccgccacaccttcaatctgcaatccgtggttctggaaccgggcgtaggtatcgagaatatcttcgacaagaaagatgaccgcccctggaacaataacttctccacgctcagcccgggacgctcggtatacgtgagtttgtcggtacggtttaagaaataaaaaaacagcaatcattttacaaaacagtaattacttttatttatgaaaacatctctcctttccctgctccttgccatttctctcttctgctccgctcacgaagggggaaacttcgtgtcgagcgatatgcttgcaagcatgaaacctggcgaaaaggccgcattgcttatggtacacttcggcacgacgcacgatgatacacgtacgcagacgattgatgctatcaatgcccaagcacgcaaggcttttcccgacctggagtttcgcgaagcctatacttcgcgcatcatcatacgccgcctcaagacacgcggcgttgtcaaaaataccccgctggatgcgctactccaactgcgtggagagggctacacacacattattgtacaaagtaccaatatcattgacggtgtggaaatggagtcgctccgccgtgatgtggaaagcgtgctgcctttcttcaaggagatacgcgtaagcactcctctactctattcggtggaagatgcgaaaaaagtaactgatattttaggacaacgcctcaatgcttcggtgcagcagagtgcaaagaaaaagggtaaagaacactttgtattggtagggcatggcacttatacgcccggcactgctacatacagtcagatggactatatgctgaaagtagccggattcggtaacttccatgtagggaccatcgaaggctatcccacctttgaaaccatgttggcacaactgaaagcggccaaagcaaagagtgtgacactcgttccttttatgtttgtagccggcgaccacgccaaaaacgatattgccggagaatggcgggagatgcttgaaaaagaaggttataccgttcatgtgcgcatggaaggtttagggcaaatccctgaaatacaaaagatattcgtagaccatatccgtttcggactgaagcaccgcacacagggcatcatggaaaagaaagcggtatatgcggcaggggaaaaaaacgagtgagaaagtcaccttttcatgccataatgtgataaatagaatgtatctttgtgaactgcaggcgtaacacttaccatgctctgcagaacagacagcaataagtcagatagcaaatgaaacaacccaaaataatcatcgccggcatcggtccgggcaataagcaagacataacacccgctgttgttgccgctttacaggaagcggatgcagtggtgggctataaatactatttccgctttgtcactccgtacctgcgccccgatacggaatgtatagatacaggaatgaaacgcgaacgtatccgcgccgagcaagctttcgagctggcggagcagggaaaaacggtgtgcgtcatcagttcgggcgatgcagggatttacggtatgacgccgcttgtgtatgaaatgaagcgggaacggaacagtaacgcagagattatttccctgcccggtatcagcgcattccagaaagcggcttccctgctgggagctcctgtgggacatgacttctgcgttatctccctctcagacctgatgaccccgtgggaacgcattgagaaacgtatcattgccgctgccgcagccgatttcgtgacagccgtctacaatcccaaaagtgaaggccgctattggcaactttaccggctgaaagagttgttcctgcaagaaggacgttcaccacagacccccgtaggctatgtacgccaggcagggcgtcccgaacaggaagtgcacataacgacgttggaagcgttcgaccccgaaaaaacggatatgtttaccgtagtactgataggcaactcgcaatcgtacgaatggaacggtacgatgattactccgcggggatattaccgggaggaggttgcgaccgggaatacccagtatggagctagtaaagggcaggacatcatgatacggagcttccgtaccatcgagaaagagctcaggaaccgggacattcccctcgaccataaatgggcgttgctacacgccatccacaccaccgcagattttgaaatggaaaagctgttgcacacagacgaaaaagcagtggaaacactatatcaaggtatcatcgggaaacgcatacggaccatcgttacagacgtgacaatggctgccagcggcattcgtaaaggagctttggaacgtttgggcataaaggtgaaatgctatctcggcgatccccgtaccgcagcaatggcaacggagaaaggcatcacccgcacacaagcgggcacacgccttgccgttgaagaccatccagacgccctttttgtattcggcaacgctccgacagcgttaatggaactatgcgatcttatacgcaaagggaaagcgcatccggctgggattatcgccgctccggtgggcttcgtacacgtacaggagtccaagcacatgacaaagcctttcaccgccatcccgaaaataattgtagaaggacgcaaaggcggaagcaaccttgctgcaacattagcaaacgccgttttgtgctacaatgatgcggaacagttacgaccgggacgagatgtgtgaaacaacgattaagaattaacgattagtggtaagcgaatggttatacaacgaaaatttatcattataggaacggacgataaccggacgcctttctttccgccggaagtattggaacacatacggcacgggaaagtattttcgggaggagtgcgacacaaagagattgtcggaaacttgttgccagatgatgcggaatggatttccattaccgtaccattggacaacgtattctcacaatatgagaaagtgttcagcagtgacggatacgaacaaacggataccgtcccccggcaaattatcgttttcgcttcgggcgacccgctgttcttcggctttgccaatacggtaaaacggaaattgccggatgctgaaatcaagctatacccctctttcaattctctccaaacattagcacaccgcctcgtaatgccttatgacgatatgcgaaccgtttcgctgacgggacgtccctggcatgaattcgaccgcgccctgattgaacgcgctcccaagataggcatccttaccgaccgggaacatacgcccgccacaatcgcagcccgcatgctggaatacggatacaaccgttacaccatgtatgtaggcgagcatcttggcaaccccgaaaaagaacgcatccgccacatgacactacaggaagcaacgcaaggcggattcgagcatcccaacaacctgttgctttgcgccacctcttttcccgaagcccgcccttttggtatccccgacgaacaattcgcacatttggatggacgtacccgtatgataaccaaagcacctatccgcctgcttacgttacaagcgctggaactgaaccgccgccgtgtattctgggatgtcggtttctgcaccgggtcggtttccattgaagcccggctgcaattccctcacctcacggtcgtttcctttgaggtacgtgccgagggcgaagaactgatgaatatcaacagccgccgcttcggtacgccgggcattacggcaatcacaggcgatttcctgcaaacagcgaccgatactctcccccgtcccgatgccgtcttcataggcgggcacggcggacatctgccggaaatgctgatgaagataaaggaagtgttacagcccgacggttgtatcgtttttaactccgtatcggcagacagtaaaaaagcattcatggaaggagccggagccgccgggctgatactgcatccgtcagcacgcatcgcactgaatgattataaccctattgaaatcatgaaagcaacactttcataaaataacaagacaagctatattcattataaaaacaaataacctgtatgaaaacagaaacatcccacataaagacggccatcatgctcgtttcggaaaccggaatggcttccgcccggctgttgctcaaagaatttcccgaagcggagattttcactccccgctatgaaagcggatttacgcacatcgaatcgaccggcagtttcactgtcaagaatttcaatcgttacgacgcgtttatctttatcggagccttaggcatctgcgtacgttccatcgccccttgcgtgaaggacaagtacacagaccctgccgtaatttgcgtggacagcacaggtaaacatgccatttccgtcctttccggacatatcggcggagccaacgaactgaccgaggcagtggccggtgcattgggagccgaacccgtgataaccactcaaagcgaccttaccggactgtgggcattggacaaactgccccaacgcttcggctggtctccgaccatctgtgtgagcccttccacccacctgctggcagggcttacccaaactcccgacgaccagatgaaggcgtgcatgaacgaggctatcagcctttttgtaaccggacagcctaccgcattgctgttggaaatccgcgacaaaggaaccgactggatggaagcgaaccttccccctcatgtagaggtgttctatcagatgaaagacatcaaattatcccgcttcaagctggtactgatcgtctctccgcgaatacattatataaaggacataccgtccatctgctatgtgccgcgcgtggtgcacgtcggcatcggacttgcccggcaggcaagccccacgagaaaagttgtgaaaggcattatagaaaagctggaagagtacaacatctccccgcaatccatcataaccatatctacgattaacgtcaagcgtgacgaaccggtagtgaaatcgctccaaaaggaatacgaagtcttcttctatacggccgaggaactggcgacaatggacgtgccccaccccagcaaaacagtgatgaagcacatgggtacgcccagtgtaagcgaggcagccgcattgctgtcctccggaaatagccaactgataatgccgaaacgcaaaggcgagaactatacggtagccgccaccctggacatctgcgcccagcgccgggggcacatcgagattgtaggtgcaggtcccggcgaccctgaccttatctccgtgcgaggacgggcgatgctggaaaaggcagacctcatcctctatgcaggcagcctcgtgccccgtgaactgacactttgcgccaaaccgggcgcaacagtccgcagctccgcttccatggatttggaagaacagtttgcactgatgaaagagttctacgaccaaggaaagttcatcgtacgcctgcatacgggtgacccctgcatctatggtgcgatacaggaacagatgaactacttcgaccgatacggcatgagttatcatatcactccgggcatatcttcttttcaggcagcagcggcggctttaaagtcgcagttcaccatcccggagaaagtacagagcatcatactgacccgcggcgaaggacggacacccatgcccgaacgggaaaaactacatctcatggcacgctcgcaaagcaccatgtgtatcttccttagcgcaagcattgcagaacaagtgcaggcggaacttctgcaggagtatcccgaaacaacccccgtagccgtatgctatcacctcacctggccggacgaacgcatcttccggggagagctgaaagaccttgcacggatagtaaaagaaaataacctgaccctgacaaccatgattgtcgtaggcgaggctatcggcaatcgcaaaggactgtcgcgactgtatgcacacgaattcaaacacttattcagaaaataaaaaatgatattagtattaggcggtacaaccgaaggacgcatagctgtccaaacacttgaggaagctggaaagcccttctattattcaaccaagggcaatgaacaagaagttcctctgcataacggcatccgcctgcaaggtggcatggataaagatagtctggagtctttctgccgtaaagagaacatctcgctgctgatagacgcagcgcacccttttgccgaagagctgcacaggaacgtcagtgaaactgctgacatacttcagattccggtcatccgttatgaacgcatttacccccgtatagagaataatgaaggcattgtatggtgcgacaattatgaagacgctatccgccaaataaaaaaggaagaagtctatataatactggcactgacgggagtaaacagcataagcaaactgaaagctctatggatggaaagcagccgttgctatttccgtattctcgaccgtgaaagttcgcgcgaatcagcgagaaaccagggattccccgaagaatatttacgttactaccataccggagaagacgaacgcctattgatgcagcaaatacgccccgaagctgtcatcctcaaagagagcggtgcttccggcggattttccgaaaaactaaaagcagctcaggaactgggcattcgcatctttgtaataaagcgcccgccgcttcaccccaacttcttgtccgtaaacgggaaatacggcctacgtagaacggtagagcaatactatcccggcttctaccccctgcgcagcggactcactacgggaacatgcgcagcagccgcagctgcggctgcgatatgggatatattcaacattcagggaactccccgtcccccggagtttgcagtaatcctacccaacggagaattgatagatgttcctgtagagccgcagcagagatatccccgttccagttccataaacaacaattggatagtggagtcggaagccagcgtcataaaagacgccggagatgaccccgacattaccaatggaatgcggataaaggcggatatcattcttccgatcgatatagatgaaaacaacgatgaaacatcgcaaaaagattttaatatcatcattgccggcggagaaggaataggcatcgtcaccatgccgggattaggattggaattgggagcgcctgccattaaccccacgccacgcaagatgatagaagacaatgtaaggatgtacctcgactacgtcggcatgcctaaaatgagcgatcccattgttgtgaccatctccgtacccggcggagaggaaatagccaagcgtactttcaatccgcgtctgggcatagaagggggaatatccatcatcggcacatcaggcattgtgaagccgttctccagcgaagcttttataagctccatccgaaagtcgatggaagtggcatgcgccacaggcagcccgcgtatagttatcagctccggagcaaagagcgaacggtacatcaaggcttattatcccgaactgccggcacaggcctttgtccattacggcaacttcatcggcgagacgctgaagattgccgataagctgaaactaccccgtgtcacgctgggagtaatgataggcaaagccgtgaaactggcggaaggtcacctcgatacccatagcaagaaagtgacgatgaacaaggagttcattcaggacatagcgcaccggacaggatgcaacgaagatgtattgaccgctatccggaatatgaatctggcacgggaactatgggatattatccctgcggaaaaactggagacattctccaaactgctgacagagcattgcaaacaatgctgcgctcccctgctgcccgatggagaactcacgattttattaatcagcgaagacggaaaaatatatgtatgaaaaaggcattgatgataatgtacatggcgattgccgtatcgaccgcacaggcacaatctcctctctccttttatgcagaggcgggaatcggaacttcccgcctctacggaaagcactcttgctgtgatacgcgaatagcctgcaaagcggggataggcgcgaaatacgcactgaacaagacctgggtcttgcaatctgctttggagtttgtatccataggcggcaaggatgatatggactatgtgaagaacgccaagatgaacgagctatacttgcagatacctatcagaatagctgcaaggttgccattgggaaaagattaccatgcctcgctgaatgccggtccgtacattgcctgcggcgtgggcgggaagacatccggcagcatcccgtattatcacgacgccggttcttccagcgggaaccggcttttcaagatagatactttcggcaacgtattggagaataatgccggaaacaggcggctggacggcggtatcatcgtgggaatcacatttgaataccgcaggctcattatcggtgcagaggcacaagtgggattggtaaagatcaaccagcaactaaggcaggtaatagacacggaagaattccataattacctgccacgaaactttgcttcattcttcaccgtaggatataagttccgataaaggaatactgcccgtagggttcgtgcccgacactttcttactcaaaatgagatttcgtggagcttcgccaataaatcctcgatgctggtgagacatatcggttcttcaccgggacgatgcaggacaaaagcgccgccgcctttcaaatcgcccgtttcgatgtaggtttccgactccacgttgcggttggcaaggatgccgttacgctgcaatgccttacgcaccatggcgtatctctgcccatgccctgacaaacgtatctgcatggtatattcattatctacacggaacaatccggtttccaaatcaaacacgatacctttacgggcgaaaaagctgctaaggctgccgttcagagcaaggtcctcgggagtaccgatggtgacgccgttcgccttgtccataagccagattttgtcggctatctgcaaagccagttcgaggtcgtgtgtagagaggaaaatggtcttgtccgtctggcggctgaggtggtgcagcagttgcatcatttccactttgctgggaaaatcaagaaaggctgtaggttcatccagataaatcacgggagtttcctgggcaagcgctttggctatcatgactttctggcgctcaccgtcacttaacgtatgtaccatccgatgcgcaaggtgaggaatacctaccagagcaacggctcgctccaccacctgcctgtcctctttggtaagcgtaccccaaaagcccgtatagggactgcgtcccaatcctatcaattccgtaacggacatattgcggatgtcgcatttctctgtcagcactacgctgataacgcgcgacagttgcttgtcggtataggactcaatctccttgccttgaatacgtatctctccacccagtttgggctggaaagcggacagggtgcggagcagtgtggacttacccactccgttagcacccagcaggcaggtcagctcgccactgttgatgcctgcacagatgccgtccgccactaccttcacatcactcttaccgggatagccgatagaaagattctcgatatgtatagtctcgttcttcaatgttatatgtaatattagagttcaatatacttgatattttattcgttcaactccccttttctctttctgaaaagcacggatgcaaccaccggcgcacctaccagcgcagtcaccgaattaacgggcaacgctccttcgaatcccggcatgcgggctatcaggttacacaccaacgccaaggctgcacctaccagcagggtagcgggcatcaatatgcgatggtcggacgtgtgaaaaatggcgcggcataaatgaggcactgccaacccgataaacataataggaccgcagtaggcggtgacaatggccaccagcactccggaacaggatatgacgaacaggcgcgcccgtttgatattcaatcctaagttacgtgcataaccgtcgcccaacaacaacaggttcatggtctttatcagcaggaacgacaagggcagcaacaccgccatgatacagacaaacagcagcatctgatcgccggagacacgtgcaaaactgcccagcccccagataacgtacgcccgtatatcctcttccacactgaaatatttcaatacaccgataacggcacttgccacataacctatcatcacaccgataatgagcagcgttacattcccctttactttttgggagacgtagacaatcagcgccatgaccgacaatgccccgataatggcagccacggacaacgccacctctcccatataccccaaacggctcagtgccacaccgcccatagcaccggacagcagtaccacacaagccactcccaggctcgctcccgaactgatgcccagcaccgaaggtcctgccagcggattacggaacaccgtctgcatctgcaaaccgctgaccgaaagccccgctcccgccaccaatgccgtcaaggcctgcggcacacggcttttccaaaggatattgctccagataacttcctggttgctcatcgtatcgggattggaagccgctcctgtcccccacagcaattcccatatcttgccaaacgggatatggacggaacccaacagcaggttcagcaaaaagagcaggaagatggatgccagtataaggagcatcaacggcaatgcaggtcttttcattagttcagtcgctcgtaataagtgggtttataatcgggcagcaggtcgggatgaaaagcatgaatcaaatcttccaatactacctcaggctgcatgggcatactctcatagaagggtttctcacgcatattgcaatagattactcctttctcgcgaaaagcgcgaaagtcggcataacgagggtccaaagacttcaaggcatcgtaagagaatgttccgtcgtaactgttgacaatgcgccaatagtcggcactctccgccctactgtacaccgtctcgaaatccagtgtcacaccgcccgaacgcggatcgcctttcaggaaatagtctgcaccggcatcccggaacagttcggcaaggaaactctttccgcctactgcataccagttgccgccacgcatttcaccgctgaacaccacaggacgcttttttacaccggcagccaattctttcagctcgttataccgcttctctatcccggcaaaacgggcattcgcctctgcttcccgaccgatgaacataccgatgaactttatccattcagcctgccccaacggagtcatttccttatatcccaagtgcggcaccagcggaatgcctgtttcgcacatggcgtcatatccgccccgtttgaaaggagagataaagataacatcgggattaatgctcataatcacctcgttatcgaagttcccctcaatcccgattttggatgtcttgcccgccttcagacgcccgttcatctccttattgaaaagatggcgggtactggtaatgcccaccacataatcgcaggcatccaaccggataaagttggagagttgcagggaagtcatgcagataacatgcttcaccggagtttctatcacggtataatcggcaggaataccggcaggcttcgtacccctcggaaccaaagcataccgaaaggtattcccctcttctttttgagggtcgtgtatgtccaccagacgcacattccccggcagatgtttcaccgcatagcctttggcgtagacgggaataacggctgttgcggtatccgcaacggaaaccgcaacagccgcagtatcggaattgccggatgcttgccgggactttgtaccgcacgaagtcatagacactgcacacgcaaatacaagacccatgagaggtaatctgatcatgattgttcggttttatatttcagggcacaatattcggcaattttgaggagatacgcaaactcttcccgaacaaatcgttataaaagaaactacaagttcatcaaatcgttcaatgcctcgctcatgctaggatgtgtgaagatgaaatcacgcaggaaagtatactcctgcctcatcttcatagccatcgccaccagattgattacttcactcgactccgggccaaacagagtgcaacccactattttatcggtatcggcatccactatcaccttgaacaacccgtccgtattgcccaatgtacgggcacggggaatggcggagacggggagtttgtttaccttaatgttcaaacctttctcacgtgcttcggtctcactcataccgatacgtgaaagcggcggatctataaacaccgaatagctcaccggctcacggtcggacaccttacgctctcccgctccaaacaggtcttcgcggagaatacggtaatcgtccaacgaaatataagtaaattgcagtccgcctttcacatcaccgatagcacggatattgggattggtagtctgcaaatgctcgttcacgataatagcaccacgttcgttcacctctactcctgcctcaggcagattcaatcccgcagtattgggacgacgtccggtagccaaaagaatagcatccgcgtccaattgcagaatcttgcctgtcacggcatcctgatagacaaccaccgtaccttccacggactgcacacgggcattcaggcagaaagtgatgcctttcttttccaacacttcctgcacgctggcagcaatgtcacggtcttcacgggctatcagttcggaataactttccaacactgtcacctgcgatccgaaagaagcgtacatcgaagcgaactccaagccgatatacccgccgcctacgataacaagatgcttaggaagctccgccagttccataatggaagtgctggtgtatactttcggattgtcctttactcccccgataggcggaatgatggtttcagctcccgtattgacaaatatctgctgggcttgaagctgaatcgtttcttccgccatacgtacttccaccacatcaggaccgacaaaagaacctgtacccgtatataccgttatattaggattgtctgacagattacggtaattcttctgacgcaggaaagaagtaacttcctctttccgtgcaacagactggcggtagtatgcccgtttctgttcccaggacgcactcgtatctgccaactttgccgaatgtatcagtgtcttggtcggaatacatccgatattaatacacgtaccgccgtacatcttatccgaacgttctatcatagcaacagtaaagttccgttcggccagcccggcagcgagtgtcttgcctccttttccaaagccgataataatagcatcatactttttcatagtcttatttttccaattggttcaatactctttttgcactgtccgccagcaccacgatagctccggcaaggatggcggtatcctttatcaccagtcgtccggcccctgtcagcaaagggaagccatgctctccgcttcccaaatcgggaacccacacttcaggagtagtgacaaggaacgaaagcgtgccgacagtcattatgacggccagcgcagcccctgccagtccgattttcggaaagaatatccccagaaaagtaaggataccgattgccataatcagtatgccaagaccgcgggagaagccgtaggtattgttctctacatgccaccggtgcttggcttcgtcaaactctccctctttcagcttgtattccttgtattccggtgcaggcttatcgtagaagaaactcataaaaggactgtttgccacgaacggaacgattccttcggcttcgtagttccagaatttcaagccgcctatccatacaaatatcacaagaatggccacgcggatgaggttgatacccaacttttgggaagaagcggccagcgtcagtgccgcaaggaacagtttttgcaatttcgttttcatatttttgttgttttaggttcaccgcagagacactcgggtgaaatgtttttgcaaagatccctgtttcctgccggttgtggaatggcaattattccgtaacagttggcaattcttcccgatgtgcttgtttccgatactccgacacactctctcccgtcattttcttgaagaagcggctgaatgcagccaagtcctcaaagcccagaatggcgctgatttccttagcgctcttccgtgtgtacagcagcaggcgtctggcttccgcacctatccgttcgtgaatgatgcgaagcggagaaggcagtccgcaggcagaaaacaagttggaaagcgtcttaggcgaacggcaaagcatatcggcatagtcctgcacctgtttcttttcacggaaatgctggtctaccagcacatagaaccgacggacaacatcgaaagtcctttcattctcctgccccacaccaaaccttgcacgtgctatgcgcgtacaggtgatgatgaaacgtttcagtacaatccgcaacatctcttcctgaagattgtcattaatggcggactcctgacggaagatgcggactatatcatgcaggttggacgattgctcctcggacagcttcagccgcatcacccgggacgaaccgtagaacagaaagccgttgcaggacacctcattgtcatgtccgtagatgcagtagaagttactgttgaaaacaaaggtcagaaactcacctgccacctctttgatagtcagatgatgcagcggggtaagcgtgacaatctcgtctttcgccagcttcatgggtatatggtctacctcgatggcgagcgtgccgctctgtacccagagaaacttatacagagtcttgtcgcgttgcagcggcttgttttcgtgaaagcgggatgtcattgcgatattgccgttcaaacgcgtattcagttggtagtccataggcttccattatttgtaagggtaacaaagatagcgaatatcttgcttactattgattatttcccgatttttgcacataaaaaacagaatgtcccctattcaattcgtatccctcggccccggtgaagccgaactcatcaccctgaaaggactgaaagccctgcaaaatgccgactgtatcttctgtcccgaaacacccgtccgcgacggtcattccctgtcacgcgccgccgacatcatgctccggctcgacatacccgccaaccgtatccgccgcttctccctgcccatgagcaagcagcggaccgatgccctcaacgcctacgaccaagtgtatgccgccgccctttccctgcatcacgccggcaagaaagtggctatcgtggcagagggcgatgcaggcttctactcctctgtacattatatatatgagaaactgcaagccgccggcatccccgtagaacagattgccggcatccccgctttcatcgctgccggagcacggggcggattgcacatcgccagccgggaagagaggctgaccgtaattcccggcatcaccaccgccgaagagatagaacggctgatacaatcgcagaacacggtagtcatcatgaaactgtcgcagtgcaccgatgaagtgcaccgttgcatccgccttcatcccgaatacgattaccgctatttcgagaatgtaggcactccgcaggagaaatacatcagtgacgggcagcagcttgaaacactccgttttccttatttctctctgcttatcatccgtcacaatggcttctgacgccgatttaatacaatttcgcacagagtacgagtgatttttgcagaaatggcttacctttgcaccttgtgtaattaaaaaagataaagacatgaagaaacttgctttttatatgttgatgctggttatgagcatcggttatgcctatgcacaaggcggggcagacattaaattcgacaagaccacccataacttcggaacattctccgaaaataatccggtggtaagctgcacgtttacattcaccaacgtgggagacgctccgctggtaatccatcaggcagtggcatcttgcggatgcacagtgcccgaatacacgcaagagccggtgatgcccggaaagaccggaaccatcaagattacctacaacggtacaggcaaataccccggacacttcaagaagtccgttacgctgcgcaccaacgccaagaccgaaatgatgcgtctgttcgttgaaggcgacatgactgccaaagacgccaaataaacgtttttatgatacagaaaaaaggagaatttttcaattctcctttttttttgctttctttgaagtctataatggaatacatatcgcaatcataacaataaaaataaaacagctattatgaaacaagaagaagagaaagcaatcggcgtaccggaaaacgcgttccgcgaactgaagccgggagaggtctacaatcccctgatgagtcccgacaagaaatatcccgaagtaaacctgtggtcggtactgtggggcatcgccatggcggtactgttttcggcagcggcagcctatctggggctgaaagtgggacaggtattcgaagccgccatccccatcgccattatcgctgtcggcgtgtccggtgcagccaagcgtaaaaacgctctgggcgaaaacgtcatcatccagtccatcggagccagctccggagtaattgtggcaggcgcaatctttaccctgcccgcactgtatatcctacaggaaagctatccgcaggaaatcaccgtaacatttgcacaagtattcatcagttcgctgctgggcggcgtactgggtatccttttccttatcccattccgtaaatattttgtaagtgacatgcacggcaaatatcctttccccgaggccaccgcaacgacgcaggtgcttgtatcgggagaaaaaggcggcagtcaggcaaaaccgttgctgacggcgggtattatcggcggtctgtacgacttcatcgttgccactttcggttggtggaacgaaaacttcaccacccgtgtatgcggcttcggcgaaatgctggcagaaaaagccaagctggtgttcaaggtaaacaccggagctgccgtactgggtctgggctatatcgtcggactgaaatacgcctctatcatctgcgccggctcgcttgccgtatggtggattatcatccccggcatgtcccttatctggggcgacagcgtgctgaaccaatggaatccggagattaccgccaccgtaggtgccatgtctcccgaagaaatcttcaagtactatgccaagagcatcggtatcggcggcattgcaatggcgggtatcatcggcatcatcaagtcatggggcatcatcaagagtgccgtagggctggctgccaaggaaatgggcggcaaggctgatgcggaaaccaacgtgaagcgtacacaacgcgacctttccatgaagattatcgctatcggttctatcgtgacgctgatactggttacgctgttcttctacttcgatgtgatgcagggcaacctgatgcacacggtagtggctatcctgctcgttgcgggcatctcgttcctcttcaccaccgtagcagccaatgccattgccattgtgggaaccaacccggtatcgggcatgacgctgatgacgcttatccttgcatcggtagtaatggtggcggtaggcctgaaaggtcccggcggaatggtggcagcgctggttatgggcggtgtggtttgtacggcactgtccatggcgggcggtttcatcaccgaccttaagattggctactggctgggaagcactcccgtgaaacaggagacgtggaagttcctcggaacaatcgtttcggcagctaccgtaggcggtgtgatgattatcctgaacaagacatacggatttaccagcggacaactggctgctccgcaggccaacgcaatggcggcggttatcgaaccgctgatgaacggtgtaggtgcaccgtggctgctttacggcatcggtgcggtgctggctatcgtgctaaatgcctgcaagattcctgcactggcttttgcactgggcatgttcatcccgttggagctgaacgttccgctggtagtgggcggtgccgtaaactggtacgtaaccagccgcagcaaggatgcaaccctcaatgccgaacgtggcgagaaaggtacgctgctggcgtccggcttcattgccggcggtgcgctgatgggtgtggtaagcgcggcaatgcgcttcggcggtgtcaatatggtgaacgacgcatggctcagcaatacatggtctgaagtgctggcgctgggcgcttatgccatcctgatattctacctcgtaaaggcttcgatgaaaacgaaataagctgcggggacactgaaacaaattcagataatacaaaacaatattcaccatgagaaagattctatttctatcccttctgtttgccgcaacgatgttgtccgcacagagtcccgtcgaactgccgttatggcccgacggagctcccaatacaaacggactgaccggtgaacaggaagatttgaaaggcggccgcgttgccaacgtgacccatccttccataaccgtttaccgtccggcaaagcccaacggtatggccgtcattatgtgccccggcggcggatacgcccgtcttgccatgaaccacgaagggcacgacatggcggcctggttcacgacgcaaggcatcacgtatgcggtactgaagtaccgcatgccgaacgggcacaacgagattcccctgtcggatgccgagcaagccatccgcctggtacgcaaacatgccggggaatggggtgtcaaccccggccgtatcggtatcatgggagcatccgcaggcggacatctggcagcttcccttgccacgttatacggcagcgacgctacccgtcccgacttccagatactgttctaccccgtcatctccatgctgaaaggcgtgacccacagcggttcccgtcaaaaccttatcggagagactccttcggccgaactggaacagaaatactcgctcgaaaggcaggtatctcccaaaacgccgcaagccttcatcatgctgtcggcagatgatgcaaccgtactgcccatcaacggcatcggttatttccttgccctgcgcgaacagaaagtacctgccacactgcacgtctatcccaccggcggtcacggatggggcttccgcgacagcttcacctacaagcgccaatggaccggcgagctggaaaaatggctgagagaaggactgaccttcccggagaagtaacgcttctgtaacagccgtttacgccaatcatcattaacctgttcaacccttaaaacttatttaccatgaaaatacacggactattgcttgccgctgcctttcttcctgtcgcccttgcggcgcaggaagaccggtatgcgcaaattaccaatcccaaactcacaagtatcaacaaagagccgccccgcagcaccttcacctcttacacgaatgaggcggatgccgttgtcaacgaccgcaagaacggaacattccgcatctccctcaacggcaagtggaaattcaactatgtggagaacttcgccgatcgccctaccgactttatggatatccatgcagacgtaagcaaatggccggacatcaacgttcccggcaattgggagctgcaaggtttcggcacgcctgtctacgtcaaccagtcgtatgagttctgctctcccggctatgccccctattgggacaagcccaacccgccctacgttcccaaagagtggaatcctacgggaacctaccgccgtaccttcaccctgcctgccgactgggacaacaaagaaattttcctgagcgccgacggagtgcgcggagcggcattctactacctcaacggcaaatttgcaggcatgagcaaagattccaagactcccgcacgcttcaacgtcacttcccttgcccgcagaggcgagaacgtgattgccatacaggtgcaccgcttctccgacggcaattatctggagtgccaggatttctggcgcatcagcggcatcgaacgggacatctacatgtatgcccagccgcaaatacacctgacggacttcaaggcggagactcccctggacggagattaccgcaacggaatcctgaagctgaaagtgaagtttgccaacgaaaccggcaaagaggccccgttcctcgtaagctatcgtttgctggacagcaaagacaagctgattgcccaatcctcaacccgtgtaagctacggtcagacggaagtggagtttaccccaaagacaatcaaagaaccgttgcagtggacagccgaaacgcctaacctctacacgctcgtcatcagtctgaaacataccaacggtgacgttatcgaggccaccggttgcaaagtagggttccgcaccgtagagataaaagacaagcaactgatggtaaacggcaaacctatcctcgtaaaaggcgtcaactatcacgagcataatgaatacaccggccattacgttcccgaagagcttatgctgaaagatttcgaactttggaagcagtacaacataaacacgatccgtacctgccactacccgcagcaggaacgtttctatgagctgtgcgaccaatatggcttctacgtcatagacgaagccaatatcgagagccacggaatgggctataatctgaacgtaggcggcacgctgggtaataacccgctatttacaaaagcgcatatagaccgcaccatgaacatgtacgagcgcgacaagaaccatccttgcatcatcacctggtcgcttggcaacgaagcgggaaacggcctgaacttctacgtcacctacaatacgctgaaagcattggacagccgtcccgtgcaatacgaacgcgccctgctggaatggaacacggacatcttctgccccatgtaccacagtcccgcccgtatcgagaaatacgcacagaaccccgaaatgacccgcccgctcatcctctgcgaatatgcccatgccatgggcaacagcctcggcaatttccaggattactggaacatcatcgagaaataccccatcctgcaaggcggctgtatttgggactgggtagaccagggacttgccaccaagaccgctgacggccgtaaatactgggcatacggcggcgactacggcgagtacggcaccccgtccgacggtgacttctgtatcaacggcatagtatatcccgaccgcagcgtcaagccgcagaccgaggaaatggggaaggtgtatcagaacatcaagttcttcgacttcgacccggcagcctctgtcgtaaagatacgcaatgatttctctttcaccaatctcgacaaatacgacttccattacatcatccgccatcacggcaaagagatttacaaaggccgtatcaaagatatcaaggccgaaccgggacaaaccgtcaccagtccgttcctcaatggcattcccgccaccaacagctcgaccggagacgtacgcatagagttctatgccgctatccgtactcccgaaccgttccttccggcaggtacggtcattgcccgtgaacagacctatgcgcatactttccataaggaagatgccccgaaacaggcattcgccggttcggaagaagacgaccggcaagtcgttttctccggtccgcacttcaaggcaaccttcgacaagcaaagcggcctgctggtatcttaccgatacaagaagcaggagtacattcataacgggcaaggtccccgccccttcttctggcgcgcccctaccgacaatgactacggagccaaacttcccgtacgtttgaaagcatggaaagaggccagctatcaggagccgaaagccgaaagcttcaacgtagtgcgcgacaaagatactacggcggtaaaagtgacctaccgcttcccgcagaccgatacccgctgggatataacgtataaggtatacggcaacggagttatcaaggtagacaaccatttcgttgcagagaacgcccaaacaccgatgataccgcgtgtgggactgcgtatgcagctacccgcccgcatcacctcgctgacctactacggccggggtccggaagagaattaccgcgaccgccgcacctcacagttcatcggcgaatacacatcgggtatccaagatatgtacgagccttatgtccgtccgcaagaaaacaaccaccgcacggacatctattggtgcaccctcaccagcaaagcaaaagaaggtctgctgtttgttgccgaccgcactttcgaaatgaatgtatccaactatccgctggaaagcctggatagcggtgagtctatcgagaacggctctccccgtaccgaaaagaccaatcaccgccatctcaccgacccgcagccggaaccgtccgtagacctcttcatagactaccgcatgatgggcgtaggcggtgacgacagttggggagctttggctcacgaaccttatctgatacgtcccggcaagcagaatgccatcagttacggtttcgcgattgtaccgttcgacaagggaacggatttcaagagtttgatatatagatattaaagctgtccagctatgaaaacgttatccggcatatcccagattttatttaacaggttctactgtatattccgtaccttgccttgcgttttctgtactttggcaatagcatcgtccgtttccgcacaggaaacggacaatgccatgctgaaatacggtttgaatttcctcaagactccctacgtggcacatacgctggaagtgaatgaagaagaaaaacttgtagtcaacttcgacgaagtggattgcaccacttttgtggagtatgtgcttgctctggcactttctcctgtcaagaatggcacaatagacaatgccgactacgcacgcaccctgcaaagcatccgctatcgcgacggcaaaatcgacggttacacttcccgcctgcactacattgccgattgggtgaacaacggcgtcagacatggtttcatgaaagacataaccgccgccaacagccccgatacggtaaggctgtccctcaacttcatgtctgcgcattccaaagcatacaaacacctggagtcttctcccgaaaacatcagcaagattgaagaaatagaaaagtcgctctccggacaactgttccattatatccccaaaaacaaactgcccgatgaaggattcgggtggataaaggatggcgatatcatagccattaccaccaacattcccgggctggatgtggtccatctgggacttgcctgctatgaaaagggagtattgaaactgctccatgcctcctctacgcagaaaatggtagtcgtctcgcaagagccattggcacagatgctgaaaaggaataagaagtttacaggaatcagagtgttaagaataaaataatactctcccaataactgttatcctatcattaaaaactatatctttgcatagtaaggactttccgtccgacatctgtctttctttcgtccgacagatgtcggacgaaaattacacacctgtcggacgaaagagaaactgctatcggacgattacttcttagtaagaaaaaaacaactcattgcagggatggaaattattcattgcagtggcaaaacaatttattcatgagtgcatactatgacctttacgaaactccctctcctaacggaagcgaggaaaaaaaatctctccatgcccgtatatgtcctaaagaaacttatacccaaaaagagtttgtagaacacgttgctatgtttcagcatctgcccaaaaacattataggggcggcactggacgcttgcatcgacgaactgtgcgacctgcttgccaacggcaacattgtagaactcggagagttgggatttttcagcacttcattgaaatgcactcaggataccgatgatgagaaaaagaaaatcaggtccgaatctgtccgttttcaaaacgtacatttgcgtatcagcaacacattccgcaagaaaatcagacaaagaatgaaactggaaaggacacattctccgactaagaaatcgaagaaaacggaaacaacagaagaaacaaggaaagaaaggctgatgctgtttctgcaggaaaatgtttgtatcaccaaaaacgaatatattcacctgaccgggctgacaaggcatgcagccatcgatgaactgaacaaattcatccggcaaggtatcctgcggcgtcggggcataagccgctccacagtttatataaataatattcagcattaacagaagaatggaaactacggaaatggaacaatccatgcagtggttcgtctttttcaaagaccagctgctgctgaagaaagagtacacaacaaacggagagaacaaatacggtatacctcatggagtaacccctcctgtaacacccgcagcgggatgcaaaatacacgaggtaactctgaccggcggaaagaaagtaaaggcttgcgcactcggacagcccgtacccgaaaccgaagaatgggtaatgacaggcttgcgcgcttcttacgactacctgccattggcagattatcaggcagcgggaaaagcattccagatactctattgggacagccacagccgtttctgtcccgtatgcggcactcctatggaacagcagactcctatcatgaagaaatgcccggagtgcggcaatgagatgtatcctcccgtttctacggctatcatcgtgctgatacggaaaggcaaagaaatattgctggtacatgcacgcaacttccgcggcacgttccacgggttagtagccggcttcctcgaaacgggcgaaacgttggaacaatgcgtagagcgggaagttatggaagaaacggggctaagggtgaaaaacatcacttatttcggcagtcagccctggccttatcccagcggattaatggtaggattcatagccgactatgaaagcggggaaatcaaactgcaagccgatgaactcagttccggcgcattctattccaaagacaacctgccggaaataccccggaaactaagcattgcaagaaaactaattgactggtggctggagaataattgaaaggacggattaataattaaaggaaaagacaaaaaaacagattgcggaaaacacgcactcgcaaacgaacaactacgaatgaaacgactctcattcacatcaaccaatcggcgtgcaaccgcaatctgtagtactatctgttaactgtaggctgctgttgcatataagaacagcatttaacgggaattgatttgccaaccggtataaagaatataaaagaaacttaatacattccggcttatcacctgcccgcactgcaaaaacaaaaggtgcaagcagcttcctgccacttgcacctttccatatatgaaaatcaaacagtcttagataccgagtgatttgcgcactgcctccactttcttttcagcctcggcatttgcgctggcataacacttaggacatcccatttcgcctttcacctcgatatagaacttaatcttaggttccgtacccgagggacgaacggaaatcttcgtaccgtcttccgtaaagtactgaagcacattggatgtttcgggcatatccaaagcggttacattgcctttggcatcggtagccttcagcgtcttgtagtccttagtcaaagaaacggcagagccaccgatttctttcggcggattggcgcggaagttatccatcatagccttgatttcatcggcgccgctcttacccggcttcactacgttgacggtagtttctttggagaaaccgtactctacgtagatgtccatcaggatgtcatacagcgtcttgccctggtctttggcccatgcacagatttccgccaacaatgaacaagcggaaacggcatctttatcgcgaacgaagtcttcggcaaggaagccgtagctttcttcaccgccgccgatgtattgctgcttgccttcgcgcagacggatttcacgtgcaatccatttgaaaccggtatagcagtcgagcatctcaatcttgttcttatcggcaacggccttgataagttcggtagtcacaatggtctttacaataaagtccgtaggctgcatcttgccggttgcgatacggttcttgataatatagtacaggaagagcaggcaggtctggttaccgttaatcagcacccattcgcccttgtcgtccttgcaagccatacctacgcggtcggcatccgggtcgcttgccatcacgatgtcggcgtctatcttcttggcaagttcaattgccatggaaagcgcttccgcgttttcgggattcggagaaaccactgtcgggaagtcaccgctcttcaccatctgttcgggcacgcagtgtacattctcaaagccccattctttcagagaagcgggaatgagcgttctgcccgcgccgtgaagcggagtataaacgatgctgaggtctttctgacgcttgattacttccgggtcgatagaaagggtatgaaccttatccagatataccttgtctacatcttcaccgataatctgaatcaaatctttgttgcccttgaacttgatgtcctcaacggttaccttatttacttcatcaataatggctgtgtcgtgcggagcaagtacctgtgcaccgtcatcccaataagccttgtagccgttgtattctttcgggttgtggcttgcagtcagattgataccgctttggcaaccgaggtggcggatagcgaaggaaacttccggagtaggacgcaaatcctcgaagagataaaccttgataccgtttgccgagaaaatatcggcagagatttcggcgaacttgcggctgttgttacggcagtcgtgacccaccacaacggagatttgccccttgtccttgaagcatttgttcagatagtttgccaatccctgggtagccgcacctaccgtatagatattcatgcggttgctgcctgcacccatgatgccgcgcagaccgcccgttccgaattccaggtctttataaaagcactctatcagttcggttttatctggattttccaacattcgtttcacttcagcctgagtttcggcatcgtatgccggggtaagccacttttcggctttctcagtcacctgtttaatcaactcttgattttccataagactttttttatattaaaggttaatacttcattttctgttctgtcacaaatgtaaaagaataagtttgaatatcctaatcaatcgggcattttatagcggtcgcccgtttgttttacatattcttccagaaattccttcggataacccggacgttccacgccggcaggctggcctatggcattgcgttcaaactttccgtctttcatcttgcggacaactccgtcgttgtatttcacgatgatgaactcgcccaaacgtttccaggtgtcgaaagtactctgcgccgtcatattggtatagtttgtcaggaatgctttcgctttggcagggtctttctccaaaagtttggcggcggcagactcgataccttcctgcgcatcgttgaaagtgttttcgagttcggcctgcgtggcacgcacatcgccgatcataaggtcgtaacggggatataccatgttggcaacccagttgaaaatccagaaagaagagttccaggagaatgtgatgtagtccgcaccgtctgcacgcgaatagcatacgggaaccttatccgtacagcagtatacgggagtgaacacggtcatgttggcatcgtccgtaccaaaccacagtacgccgcctatggcatcgggcaaggtggagcgcatctgcgccacgaacacgaaaccgctctgctgggtggaaatggggcgttcgttgaaatattccttgtcgcctaccttgaaggaaaggggcgaaaggcggtaaggggtgtgatacggtccggcgccgaaatctttgctgatgtcgagaggagtaccttcgtaatggtcgcgcatggcattctttacgtcctgtacggagattttacggtcgggcttcacgaaaagcggcatcggtgtatcggtatcgcctaatatataaggtaagaactcgttgcctcgggcggtaaacatattgaaatagctccatacgcgggcttcacaataacggcgagcgccaaaatcgagcggcgcataggccttagcgaagctgaagtccttgtttactccatcgaaataacctttctcgcgggcaaaggaaatgacatcgggagagtacatgcagttgtccttgtcgttcatatcgaactggtggatacggctttggttggcatgcgcggagatgcaatcatcgggcacacggacagccacccacacagcgccacgcacaccggggcccttgcctatcatctccataatccagatttcgttggggtcggcaatcgtgaaagactcgccgctgctgtaataaccgtattcctgtacgagttccgtcattaccttgatggcttcgcgggcggtacgggaacgttgcagaccgagataaatcagacttccgtaatcgatgataccggtagtatccaccagttcgggacggccgccgaaggttgtctcgccgatagtaagctggaattcattcatattaccgatgacgttgtaggtctggcgcgcctgttctatccggccgaggtacttgccggtgtcccactcgtgcacatcaatccatgtaccctttttgtgcatgcctgcgggataatggtataactcgccgaacaatccataggagtcggcagaataggaaacaattgtagaaccgtctgcagaggcgttcttacccacaatgaggttggtacaggcaaatgcgtttaccacagttgccaccgctaatgcgacggagagagttaattttttcatacttctgttattatatggtttgtttgataatgcaatgtcacaggtgaaaagttaccatacaaaatgaaactcttcggtagtccggttgccacggccgtctgttacggtcatttccacagtgtgcctgccacctttctttacatgcttcgggtcgagttcgcagaccagattgccgctgatggaattgggcttgccgaacagagcgtatttcccgtctatcgttccgcggtaactgtttattccggtttctttatccttggccttgagggtgatgcgccccgtacgcccccactgtccggggttgagcggaattatctccggcggcacggtatctaccgctaccgtataagtgcccaggtcgcggatacggactttcatgaaaccgtcctcgtaagtaccgcctatactgtattttccgccccgtgccgtaacgccggctacgtaatacttcgatttatcttccagacggtcgcgccgcaagccgatgcgcatctcgcacgctccgtgcagagggacacgcttattgtgcaactgataagtaaaagccacgtccccgctatcggcacgtacggaatagtccagccaaacgtcatcgtacaacattccacgcggtacaaccaattccagaccgggctcctgcagatagttagtcctgtcccacttgaaagcatacttctcgcgatgttccacagggtgaatttcggtgttctttccttgtacggtgaaacggactttcgaggtgttgcctaacgcatcgcttagcgtatatacaaatcggtaaggacgctcttcgttgatttccaccagtccccgattgccgttggaagcatgcagcatgcgcagacggttgccgggttcgatgaacgacttcatgtactgtccgtgcgtccatgaattgatatagcggttttcttcgtaagcaaagcggtctaccacactgcggaacacctcttcaccgtccacttcgagaataacggtatgcacgccgtagcggttgcccactccgtccatatggtcataggcacggattcctgcacctatcagtccccaagcagtaataggctgggtaggatttacagggaaagtccggtgtatctgctttccgttcaccacgcctttgcccggttggggaaacaaaatgatgccttcggcacggggagcgatattgtccttcaccttctccataaaaaaaggcagcgggtcgacataatctcttgttgccgactcaatcatatccagatgcaggtgagggccgaaagagtaacccgtgttgccgctaagggctatcacctgccccgcctttaccggatattcccccggttcgggggtaatctccacttcccagctttcctgttcatactgcaagtctttcacccttcgggctatatcgcccacaaatgcgctgaggtggcggttgatagtggaataaccgttatcgtagtccacatcgagcacatatcccgaaccgtgtgtcacacggatgcgcgagatatgcccgtctgccaaagcatgtacaggcttgcctatggctccgccggtcttgaagtccaacccaccgtgaaagtgattggagcgtatctcgccgaagttaccggaaaagacaatcggaaaatcgaaagggggcgtgaaagatgcctgctgtatgcccggtccggtttccacctcggacgcttcttgcgcatatccaccttgtatgctgcctgcaaaaaacaaaaaagagaaaagtatcgggtattttatattcttacagttcatatcctattttttaatgcatgcaaatataaaaagaatagttctctccgcctaaccaaaaaagaataatcctgccgtcacacacgagaaaaaagcaggcgttttctgttgtaaaacacgctgtgcaaaatgacaatgagaaagataaatcactatcttgcaacatgtttaaccattaacagatgacattatgattatcggagtacccaaagaaatcaagaacaacgagaaccgtgtaggaatgacccctgccggagtagccgagttggtgaagaaaggtcatacggtgtatgtgcaggcaacggccggcgcaaacagcgggttctctgacgatgattacatcgccgtaggtgcgcaaatcctacctgccattgaagacgtttatgccatagccgacatgattgtcaaagtgaaggagcctattgcacctgagtacaaactgattaaaaagggacaagtggtatttacctatttccactttgcagccgataaattactgaccgaagccatgattgagagcggtgccgtatgtatcgcctatgaaaccgtagagaaggatgaccattccttgccactgcttactcccatgagtgaagtggcaggacgtatggctacccaggtgggagcccgctttttagaaaagccgcaaggcggaaagggcaagctaatgggtggcgtaccgggtgtccgccctgcgcgtgtgcttattttaggtggtggcgtagtcggtaccaatgccgcacaaatggctgcgggaatgggtgcggaagtgatgattacggatgtcaacctgacgcgtctgcgttatctcagcgaggtattgcccaagaatgtaaaaacactctattcctcgcttcacaatattaaaatggaactgcctactgtggatttggtgataggttcggtacttatccccggcgataaagcaccgcatctgattacgagggagatgctgaaaatgatgaagcccagaaccgtacttgtggatgtcgccatcgaccagggcggttgttttgaaacgtcccatcccactacccacagcgaaccaacgtatgtcgtggatggcattgtgcactatgcggtggccaatattcccggtgccgtaccgtttacttccactatggcattgacaaatgcaacgctgccttataccgtggcattagcttgcaaaggttggaaacaggcttgtaaagatgatccggcattggcactgggactgaatgtggtagaagggaaagtgacgtataaggcagtggcagatgtgttcggaatgaggtatgaggagatagaactataagtggttaggagttaggggttagtgataagcgattagtgattaggggtaatgatgaattacgattcagcataacttatagctcatcgctaatcacttatcactaatcgctaatcactaaacaggaattcttctttttttgcatacgcccaatacataatcaatattgttatgcacagattgaagataaacggaaattcttgcgaaccggtatggaatatccattggaaaaagtctgtgatgaagggagaaagcagtatggcaaggtaattcatcaccattacaaaggcaagggcaagcgttgtcttctgaggaatagcagtatcaactgtcttatcgtaaatcagaggctggatgatgccatagcccaaacctactaaaatacatcccggcacgatgagccattccgtaggcgaaatccatatcaacagtaatccgatggcaatagccaaaaggctgtaaagttttgttttattccccaaaagcttcaccaaactatccaacataaatccgggagccataatggcaaggaaaaacagagaaatcatcagcccggaattaccgcttgaaaagtgatgcgcttccatcaagaaaggcaagttaaaagtaaccgcaagaactacgtaagtaaccaacccgtagaataacattaactgaacaagatggcgtatgtgtatgccatatttaccggagattacaggcgtagattgaatgggaggaatgatagccgccgcctgcttgattgttaccgaagccgcatccttctttaaataagccgaaagaactaaagaaatcaacggcaaaagataaacggcaaaaggcaaacgccagtgcacctctgccagataccccgttacagccgtagccaccaccagcgtcatattggttatggcagagctatagccaaactgcctgacgcgatactctcccgtaaaataccgtgaaatcaatcccgtagaaagcggaataatcaatcctgccccgataccaagcaaagcgctgacagccattagctgccacatcctggaagaaaacaaataaagtaccccgctcgctgcaaacagccaaagccccacccgcagcaaacggataaaatcgcgtttctccgccagtttacctgccaatagtacaaaagggataatcagcaaggaaggcaaagaagtcaacatctgtatatccaactccgtggcatggggaaaaatcgtagaaagttctcccaaaataggcgaaacagccaagcccggcaatgaggtcagtgcagaaacagaccagatacctataagcgtaataagaggaatggttccttgtccggtattaatcttcataattcaaaagcggattagttagtggaaggacaacaagcgatgcaacagaatgttcggatagaataagcgataattaaaaagcaacagccggtagagcgccaggatttccgccccgcccttttaataaacgccaaataatgtaaaacggcggaactttctttcgcgggggtcgttgttgtggaaaattcgacggggaaagtccccgccgcctaaacctttaaaaacttatagttatatggaagatttgaatttcagaaaaggagatgccaagacagatgtattcggctcaaaccgtatgttgcaaccctcaccggtagaaaaaataccagacggacctactactcccgaaatcgcttaccagatggtgaaggatgagaccttcgcccaaacacagccccgtctgaacctggctacattcgtcaccacctatatggacgaatacgcaaccaagctgatgaacgaagccatcaacatcaactacatcgacgaaaccgagtatccccgcatcgccgtaatgaacggtaaatgtatcaacatcgtcgccaacttgtggaactctccggaaaaagatacctggaaaacaggcgcgctcgccatcggttcttccgaagcgtgtatgctgggcggtgtagctgcatggctgcgctggcgcaagaaacgtcaggcgcaaggcaaaccgttcgataagccgaacttcgttatctccaccggtttccaggtggtatgggaaaagtttgcccaactgtggcagattgaaatgcgcgaagtgcccctgactcttgacaaaaccacactcgaccccgaagaagccctgaaaatgtgcgatgagaacaccatctgtatcgtacctatccagggggttacatggacaggactgaatgacgatgttgaagcgctcgacaaagcgctcgacgcatacaatgccaagaccggctacgacattcccatccacgtagacgctgccagcggcggtttcatcctcccgttcctgtatccggagaaaaagtgggacttccgtttgaaatgggtgctttccatcagtgtcagcggtcacaagttcggcttggtctatccgggtctgggctgggtttgctggaaaggcaaagagtatctgcccgaagagatgtcattcagcgtaaattacctcggcgccaatatcacgcaagtcggtttgaacttctcccgtcctgccgcacagattttaggacagtattacctgtttatccgcttaggattccaggggtacaaagaagtacagtacaattcgctcacaatcgccaagtatatccacgacgaaatcggaaaaatggctccgttcgtgaattattccgatgaagtagtgaacccgttgttcatctggtacttgaaaccggagtatgcaaagaccgccaaatggaccctgtatgacttgcaggataaactctcgcaacaaggttggatggttcccgcctatacactgccttccaaactggaagattacgtagtaatgcgtgtcgttgtccgccagggattcagccgcgacatggcagatatgctgctgggcgacatcaaaaacgccattgtcgaactggagaaactggattaccccactcccacccgcatggcacaggataagaatctgccggtagaaagcaaaatcttcaatcacggcggaagacaccacaaaaaataataaagcaagaatcagcttaccgctttattgctttcatacattaaaccatgtatcggataaggctttaggagattgaaactccagtctcctattccttattccatataaactctctctatatatagattatggaaaagaaaatatcaatctctcaaatcaaggaagttgccctggaagcctataatgaggtgaaagaacaaaccggcggcaagaatgcggattatattccgtaccttgccaacatagactccaagctgttcggcctcagcatctgcctgatgaacggacagaccatcaatatcggagatacggactaccgcttcggcatagaatccgtttcaaaagtgcataccgccatacttatcctgcgccaatacggtgcacagaaagtgctggatatgattggcgccgatgcaacaggactgccgttcaactctatcattgccattttgctggaaaacgaccatccctctacgccgttggtaaatgcaggcgctatctccgcttgctccatggtacagccggtgggcaatccggacaagaagtgggatgccattgtacagaatatcacagaactgtgcggctccgctccgcaactcatcgacgaactgtacaaatcggaaacggctacgaacttcaacaaccgctccattgcctggttattgaagaattacaaccgtatctacgacgatccggatgtggcgctcgacctttatacccgccaatgctcgctgggcatcacagccgaacaattgggcattgcagccggaacgattgccaacaacggcgtcaatcccgttaccagacaaagcgtattcgatgcggggctcgcaccgaaaatcacttcaatgatttctaccgtgggcttctacgagcattcgggcgactggatgtacactgccggcatacctgccaagagcggcgtaggcggtggcgtaatggccgtattgcccggtgtgatgggcgtttccgctttcgctccaccgttggacgaagccggtaactccgtcaaggcgcaactggccgtcaagttcatcatgaacaagctcggcctgggcgtattcaacggcgacaatgtgacaattacagaataatctctcgtactcttttttccaaggttgctccgaaagcgttacggacgctgaggggcaacctctttaatgatgaattacgggttgccgacggcaattccgtaaccaaacagaccttcattatgaaaatggctctatcggaattcgttttacgaaagaaagggatatacggcatattgcatgtcatcatcctgctgctttcgctgttcctggttatcagcatctccattgatacgttcaaaggcatccccttctacgagcaatcggtgtacatggaagtacagctatggatttgcgcattgttcctggcggactttgtactggaatggttcctggcaacagacaagatgcgttatgtagccactcatttcatctttctgctggtggctattccttatcagaatatcattgcctatatgggctggactttctcacccgaagtcacctatatgctgcgtttcatcccattggtacggggcggctatgccatggccatcgtggtgggatggctgacgtacaaccgcgcatcgggcttgttcgtatcttacctgacaatgctgctggctaccgtctatttctcaagccttgcattctacgtcatggagcatgggagcaaccctctggtaaaggggtatggcgacgccttgtggtgggcgttcatggatgtgactacggtaggctccaatataatagcggtcaccgtcacagggcgggtactgtccgtgctgctggcagcgctgggcatgatgatgttccccattttcacagtatacgtaacgagcctggtagagcggcgcaacaaggaaaagcaagactattacaaaaagatagaacaggaaccggcaaagagcgctccttaattgttaaagctgggattttcctctacccgccgggaacaactgttcccaagggttgttataaacgctgatttcgaatatatttttcaccaaaaaccttaacttatggcaaatattaaacaaacagtgaagctgggagtgtttaccctggcaatcatgaatgtgacggctgtagtatccctgcgtggactgcccgccgaggccgtgtacggaatgagttcggccttctattatttatttgcagccattgtctttcttatccctacgtcactcgtggctgcggaactggctgcaatgtttcaagacaaacaaggcggtgtgttccgctgggtgggtgaagcctacggaaagaaactcggcttcctcgctatctgggtgcagtggattgaaagtacaatctggtatcctacggtactgacgttcggtgctgtgtccatcgctttcatcggcatgaacgacgtacacgacatgtcgctggcaaacaacaagtactatacgctggtcgtggtgctcgttatctactggctggcaactttcatttccctgaaaggtatgagctgggtaggaaaggtagccaaagtcggcggtctggtaggtacgattatccctgccggattactgattgtcctcggcattatctaccttgccacaggcggacattccaatatggacttccacagcagctttttccccgacctgacgaactttgacaatgtggtgcttgccgcaagtatcttcctcttttatgcaggtatggagatgggcggtatccacgtgaaggatgtaaacaatccgtccaagaactatccgaaggctgtgtttatcggtgcactgattacggtgcttatcttcgtgttgggcacattcgctctgggtgtcattattccggccaaggacatcagccttacacaaagcctgctggtaggtttcgacaattacttccgttacatccatgcttcctggctgtcgccggttatagccgttgcactggcgttcggcgtgctggcaggtgtgctgacatgggttgccggtccgtccaaaggtatctttgccgtgggcaaggcaggttatatgcccccattcttccagaaaacaaacaagctgggtgtacaaaagaacattctgttcgtacaaggtggcgctgtaaccgtattaagccttctgttcgtggtgatgccttcggtacagagtttctaccagattctttcacaactgacggtggtgctttatctcatcatgtatatgctgatgttctccggagccatcgtattgcgttataagatgaagaaactgaaccgtccgttccgtatcggtaaaggcggcaacggtctgatgtggcttgtaggcggcctcggcttctgcggctcactgcttgcattcgtactgagtttcatcccgcccagccagatttctaccggcagcaataccgtatggttctccgtacttatcatcggcgcacttgtcgtggtgattgctccgttcatcatctacgcttccaagaagccgagctgggttgacccgaacagcactttcgaaccgttccattgggaagaacaaccggctgcacaagttgcaggcaaaaccgccacggctacggcaactgccggaacaaccgcttcggccactgcaaacgaaagcgttgcctctcccacgggcaatgctccgtcagcaaacaacagcaacaacagcggtaaagctccgaacattccccctaaaggataaaggcaggcttgctgtcatataattttgcctatagtggaaatccggtacaatgtacgtcaaaaggatttttcactataggcaaaatcgtttatatcaactgtcaaacgtcccaacgctcgcaaacattggcggcaagcgtttcgcatgcctgctgataacctgttaccagttcgtccatcacttctgctaccgtctgtattcctttctcattgagcaaggcggaaacctgacctatttcaagttcgccctcttcaaggtctccttcaaaaatgccgcgtttggcacgtcctctcgacaaaaggatacgtaaatcctcttccgtagcccctgcagcttcggcagccgccactgcctgctgaaaattaccgcgggccagacgtaccggagacagtttcttcaataataaacgggtatccccctctttcagatgcaggcaatattctttaaacacttcgctggctgagctttcttcggtcaaagcaaaccgcgtacccacctgaacaccatcggcccccaaagcacgcatggcaagaatcgcctcaccggtagcaatgccgccggcagcaatcaaaggcagtgaggtaactgcacgtacagcaggtatcaggcaaagcgtagtcgtctcttcacgcccgttatgtccgccggcttcaaagccctcggctacgatggcatctacaccggcagcctcggctttcatggcaaaacgcgatgacgaaacaacatgcaccactgtaatgccatgctgcttcagccaagcggtccatgtcgtagggtttccggccgaagtaaacacgatacgcaccccctcatctaccacaatctgcatgatttcctctatctggggatacattaaaggaatgttcactccaaacgaatgatgcgtagccgcacggcacttccgtatatgctcacgtaaggtttcgggatgcatggagcctgcacccaacagccccaaaccaccggcattacttactgccgacgccaaccgccagccactgcaccataccataccgccctggatgacggggtattttattccaaacaaagaagttattctattcattaatttatcctttaaaggtttatttttatgaaaacaagaagcggagaaataaagttcaatactcaaagcggaatatccctatttgataatcgtctctttacggcgggcagttatggaatcaccgtaagtccttaatacttccaaagtacgtgcacggcgtctggcagctttcctgttccagaaatcttttgtaaaaggacgcatgaaatcacctgcaatgccaccaccgccgacacttcgccaactccccacggccatattgttggcacgttcggtcaccatatagcgcaaaccggtagcttctatctgttcgatactctcacgcggcccggcatccaacggacgctttgcccagtctgtatagattttaagcctggtcagttcgtagaacggattgccccgccatgtattcttgttcaccgtaatcttcttctgatagacgggatcccagttgtatttggtgtttgcggtataaggccgtaaggtaagcactacctttttctccggcatccgaggcattgcgggtaaggaagcatcaaagtccatccacgtcttacttacatcagcctttggagagcccaaaggagcatcaacgcccatttccttcaatacatccggattcagcttcatctctcccccgccatccagcaaccggtgcagacgcaaagagtcttgcggcgtccactcttgagcgtaaagaggaaaggttaccgcacaaagcaaccccaaaaagagaatagaatacttcaccccgattgttttttataccttacactttatacctaatctcaccaccacatatagctgcttccgcaaagcggttcatcgtagcaagggtctatagtccacatggtacgcggatatttccggccttcccaccaacggcggtaacgggcggctgcatcgagcacctcctcatcggtcaggaagtagatgccttcataattctcggcatcggtatgcaccatcttacaccccatcgaagcattatgccccaaacgaatcgtttccaccgtccacaggatacattcgcctaaccgcagttttccgcctgccgaataggatacgggagccaacggaaaagaaggtattaccgtcaaatcctcggcatacttcaggagttcttcaatatcttctttggcaaacttgggaacattactcagtccttcaggactttgagtagaatatttgccggttttcagttgttttacaaacaaatctacatccggatgattgtaatccagcgattctttaccgcaggatgcaagcataaggcaagctgccattgcaagtatcagatatccgtatttatatagtttacagaaagtcttcattttgttgtattgtctttaaggttaataagtcatgcgcactccacacaaaagattcaggttcgtaggacgttccgtccgcaaggttccggtttcggagtccgtaccgaaatggtgggaaaccgaaggctcggcaaacaaagcaaaccggtcattcaatctgtaacgcacccctactcctgccgctaccgacagttgaacgggttccgcattaaagccgttatccgcagcgccggcaatgcacttttcggcagttccgcctacagtggcatataaatcgagtttgggagtacttgccaatgtcatattcaattttacgggaatccctaaagtatggagcgtgcggtcggcatgcaaacgattatacagaatacccgtttccaacgcgaaccggctattcagactgcgttccactgtaactgccgccgtcagcggcatattgtagtcccctttaagaagagaggttccaagagctgctttcaacgcccacttacgcgatttccggtattttaaaggagtagttgcctgctcttcttccgcaggaacagcggaaaaggtgtccgaagcagaacttacccggccggtggtgttctgataagaactgccggtttgtgcaacggcactattgctgaagtaaccgtcaccggtctgctgcacccgctgcctgatagtgatggaaagccggacggaaacggactcgctctcagtttccgattgggcagtcatgcctgcgggaattccatcggcaggttgttttgtaccggaattccgtaccatcggggtcgcctgatggatagatggaaaagattcctgtaccacatctccgtccagactgccttccggcgtcaaagcagccacttgcgtaaaggcttcctttatctcctctttcggagagaaataccagaaagcggccgaagcggctcccagcacaaatataacggatgcggcggctgccacccgataatatttaggagaaagaacagccgctctcttccggcctgcagccggagatgccgcgtcttcctgcaactgctcccaaaagccatcgcgtaccgtcatctctgtgccggacagacggctgcggaacaatccggttatttcatctttttctctcatattcagtatattctttaattcttttcgctaacatacacttggcacggtgcaactgcgaggtagacgaatgctccttgatatgaagcagttccgcaatctccttgtgcgacttctcctcgaacacatacaagttgaacacggtacggcagccgtcgggaagttccgccacgaacgccatcaacacttcctctgaaagcccgcttccgctttcggcaatactcgcttcgtcctgcacatcgggaagttgttcttcgtttaccaccagttggctgaaacggtgtttccgtcgcagatagtcgatagcttgtgtcaccatcaccctcgttacccacgtgcccaatgcacattcaccgcgaaacgtgaaacgagtgaagattttgataaagccatcgtgcaaaacatcgtgtgccgcatccatatcgcccgtataacggtagcataccgccagcatctgcttggaatagagagtgtaaagttcctttcgggcggaatcctttcctgcccggcagccctctatcagttctatctcattttccaatgtcagtgctcgttttacggacgcctcttcgcgtcgtttgttggttagacgcagcatccggcagaatgctgcaatagaatctctaaaaagaagttaaagaataaggttatccatatctttccgtttcatcatttgccctttataacataagaaaaaagcctctcacagacctgccctgacgggcagcattccctatgagaggctttctcctgtattatatcgcctttatcagcaggctttgaagctcatgtccaatccttttacggaatgcgtcaaagcacctaccgagataaagtctacgccgcattcggcatagtcgcgcag

SEQ ID NO: 4127 - DNA, 21396 bp, Unknown
  gut microbiota DNA sequence
tacctgttgcagttcgtcgaagttgcgtacttcaatttctatcttgaggtccttgcccttctccttgcaatattccttggcacgggtaatggccttgtcgataccgccggcgaagtcaacatgattgtctttcagcagaatcatgtcgaacagaccgattcgatggttcacgccgccacctatcttcacagccatcttttccagaatacgcatgcccggagttgtcttacgggtatcgagcacacgggtattcgtacctttcagcttctcggcatacttatgggtcatggtagcgatgccgctcatacgctgcataatgttcagcatcaggcgttcggtctgcaacaaagactgcaccttgccttccacaaccatagccacgtcgcccggtttcacttcagtaccgtcattgatgaatacttccactttcatggtggggtcgaaacgacggaacacttctttagctacctcgataccggcaagaataccggcttctttaatcaaaagcttggatttgcccattgccgtagcaggaatgcacgaaagggtggtatggtcaccatcgcctatatcttcggcaaaggccaggtcaatcagcctgtcaatcaattcttcttccttattcatttgtcttatctattcttatttggtgtatcacatatttgcctgccacttttctaaagaaacaattcacccggaagtttccgttcgcggttgtcaacgtaccgactatgaaactcgactcattgcgctttccctggtgattcaccgtaaaaccgctcacccgattgccggaaaagaaagatgccatctttttctctgccgcttggttgtcgacattgattgaacgactctccagaatcagttccactttatcactcagatacccgttcagttcctgagaatttccttttttaaaggcggcgaccactcctgccggtacgtcttgtgccataagcgaaactgtccagacaaagaagcagagccataatattactactcgtttattcattttcacaagtattaatgataggcaaaggtaagcaaatcttataaataacaagaaaagaaaagcgacattctcacaggaaaggattatttttgcacgaaaatcagtaattcatatgaaaatgaccttgctcgtcgtaggacgaaccgtagaacagcactttattacagccatcaatgactacatacagcgcacgcaacgctatctctcgttcgatatggaagttatcccggaactgaaaaataccaaaagcctctccgcagacgtacaaaaagaaaaagagggcgaactgatactgaaagcgctccaaccgggcgatgtggtggtgctgctggatgagggcggaaaagaaatgcgctccatagagttcgcggactatatgaagcgcaagatgaacaccgtaaacaaacggctggtttttattattggcggcccttacggcttctcacccaaagtctatgaagcggcacacgaaaagctgtctctttcgcgcatgaccttttcgcatcagatgataagacttatctttgtggagcagttataccgtgccatgaccatactgaacggcgggccgtatcaccatgaataaaccggaaagcctctctctaaacaatctcctgcaatagggccggaatttcgggagtgctgttttttataaccgtaatacggctcttcccttccggcgtcagcgcaaagtgcatctgacgcttatccgtttttcccaccagtcgggtaatcagcttcttgtcctctaccgagcggattaccttggaagtattggaagctgacagtccgagcgcttccgctatctcgctggaggtgagtttgggcgtattgagcaaggtacacaacagcataccctcattcaacgacaagtcaaactcctgcatgaattttacttcaaactcggctatcgcccggtaaatatcgcggattctacataaagtttccattattccgtttatataaatagattcacattcgccttgtccgcgcgctccatataggtcgctacaccgcctatggtaacttcgtccagcaattcttcgcgccggatgcccatcatatccatagacatctgacaagcaataaactcaactccttgcgccaacgcctgagaacgcaacgattccaaagaatctattcctttccgcttcatcaggaagcgcatcatcctgctgcccaagcccatcatattcattttggacagtttcagccgcaatgaactggacggaagcatcataccgaacatctttccgaaaatatctttctctgtccggggtttctgtatcttcttcaagacattcaatccccagaaggtgaagaatatcgacactttttgtccggttgccgctgcgccgttagcgagtacaaaggtagctaaagccttatctaaatcatcgctaaaaagaattaaagtttttccccgtccgcctgctgccggaagagacgacgggcaggcacaagcctcatcgcctttttcaagcaataccgtgtagcgtcctttttcttcctttttctctatcagcttgttgcccgtagtggcacaccaggcagaagcgtcacgtgcaaatccggcatcggtcgccacaatttccacccgctcgcccggggcgatgctgtccatggctttctttacctgcatgatagggccgggacattgcaggccgcaggcattaaccctcaaaggctctttggcagaaccgctctgtgccgattgcgacggagcggatgcagcaggctgagccggcgatgatgccgtaggagcaggaatgggcgccactgctgcagaataggtcttatatccgcctatcaagttggccgtattgcgataaccgcgtcctatcagaatacgttgtgccaaatatccgcgcaaacctacggcacagaaaagcacgacgggcttatccgccggtatttccgacaaacggtcgcgcatctcgtccagcgggatattgacagctcccggaatcgttccgaacgagaattcttcaggggtacgggtatctatcagcattacttcgtctttcttctctgccagttcgcgccaggaaataaccggcatggcgccgctgataatattggaagccacgtatccggctatggcaatagggtcttttgccgatgagaaaggcggtgcataggtgtgctccgtttccatcaaatcgtaaacggttccgccatgtttgataagtcccgctatctggtcgatgcgcttatccactccctcgtagcctacgcattgcgcaccatagagttttccggttttcggatggaacgtcagtttcaaggtcagaggcaacgcatcgggataataacctgcatgcgaagcagaatgggttaccgagctttgatactccatgccccattgtttcagacgcttggctgcaagtccggtagaggctaccgtcatatcaaagactttggcgatggatgtaccgatagctccttcgtaggatgtggtattgcccaaggccatattatcggcaacgatgcgtccctgacggtttgccggattggccagatagttgagccacggttttccggtcagcggatggggatattcaatggcatcgcccacagcatagatgtcttttacggaagtttccaagtgctcgtctacccggataccgcccgtttcgcccaactccaaacctgcctgttgcgccaatgccgttgccggacgtacaccgatagaaagcaatactatatcggcaggaatcgtttttccgcttttcagaaaaacggtaattccctcttcagtacgccggaaacgggtaacgccctcttccagataaagggaaacgcctttttcgatcagatgccggtgaataggtgcagccatggagaagtcgataggcgccataacctgattgcccatctctacaacagaaaccgcaacgcccgcatgatgcaggttttccgccatctcaagtccgatgaagcctgcgcctactacaactgtgcgttttacttgcttgtctgtgatataagccttaatccggtcggtatcttctacattgcgaagcgtaaagataccttccgagtcaatgccttccaaaggcggtttcaccggattggctcccggagaaagcagaagtttgtcataggtttcttcatattcctttccatctgctttacggatagtcaatgttttcttttccgaatcgattgcgattacttcgttctctacccgcacatcgatacggaaacgtttaccgaatgatgcgggagtctgaaccaataatttttcgcgctcggcgataacgccgcctatataataaggtaatccgcaattggcataggaaatgtatttgcctttctccaataaaatgatttcagcttgctcatctattcttcttaaccgggcagcagccgtggctccacctgcaacgccaccgataattacatatttcatatttctttctttttagtttgatactgcaaaggaagtaataatttccaatataaaatagtttccttaggaaaataatattaatatactatttaataatatattatacctgtataacaagaagaataagctactattaaaaacatgcagtttaatcattgcaagttataaaatataacgaaaaacataaaaaaagagatgcatcctttcggacgcatctccattataaccatatcatattcaaagtcctttctattcctactacatactaccagcccatattttcgagtcccgcagctttataccaagccatggaacggtaagcctcagcagctttggaatcaaccgaaagggggatataatgcgtaatgccgtttgttcctttcattgaaaacattcttttgaacatggagtaatttttatctgtagtattccaatagacaatagaagcatcaaacacattcttccaagcaacataagcatcggcatccagccgcatttccatcatctgcgagaaatcatagtaaccgacatgtccttcttccatatcccgcttatcataatcaaacaccgtattaaaagaaggcatgctttcgttgtccgcgcgctccaagagttgccctgtcacatccgccaaatcatccaacgcatctgtccttacagcgcaaatggaagttccgcctgtccagtttgcattcgagataccctctcctgctttataattatccttataatgattaaagtaggcttctgccatttgtgcagccgcgcccggtttaaacatataaggaacaaccttgtcataaggagcgcccggacccggattctccgtaggcgaaccgatataataatcggtataattacgcacctcataagccacttctacagacatcataaagcatgcgtcaaacattataaagtcaaagtgaggcatcccatcatccaatacatcaacaaagtcagatatattcatacggttatcctgcccctctcctgtatcctgccctatccagcgtgtagaagccgaaggtaccggataaggaatccagccgtctgcgtgcgaccagtaaaccaaaccgtaactgtctgccggatattcatagaaagcacgatgcattacctccttcatcacagaggccttcgtggatacctgctctgcatattccttgattatctccttctccaaacgacctttcttgtttctagagatccggaacaaaaccggtgctaccttgtcatcctgatataccagcaagttactagatgacaaatcaacggattccatgcctgcaatcatctcttccacatcttccttcgcaaatgacgacaagttattatccgctacaatgtaaacaagcacggttctacttcctacctcaggtggcaccggatcatcatcttgattacaagccgtaaacaaaaggaaaaaagatatgcacagcaatgtataaagcttcattctcataggtatcgtataattgttgcaacgcaccgattactcttccggcttcttaaaactgaacttatccgacgtaatagcctgcaacaccattgtgctcttcttatacttcgcctttaccttgacagcttccttttccagtttctttttattctcactgaaatagatcatacacgtataatcgggtttcttcaaatcgtattccagatagtttttcaattgatagctgtacaagtcacgcttgggcaaaaagccgttcttgtccagtgccgtactgtccaatacttggatttccgtacaatacactaccgaatcattgaaagacgccgctacgccaaaagcataaacaggcttatggcttttcattgtaaacgctgtacacaaagtaaatacgagcatcactgcaaatactatttttatgtgcttcataacttctttttgattgtttaatggggcaaagataataaaaaaaccggccatccactctggacagaccggttttcttaatttcttttatttgtcagaaaccgatattcttatttatcccaaataagatttgagcaatttactacgattactttgtcttaatcttctgattgctttttccttaatctggcggacacgctcacgtgtgagaccgaatttgtcgccgatttcctctaatgtcatttcctgctgtccgataccgaaaaacatctgtatgatttctttttccctatcggttaacgtagaaagagctctatcaatttccctcgcaagagactcgttcaccaaagagcggtcggccataggagagtcgtcgttgaccagcacatcgagcaagctgttgtcttctccttcaacgaaaggcgcgtctaccgaaatatggcggccggaaaccttcagcgtatcggagattttgtcaacagggatttccagttcatcggcaagttcttcgggcgacggacgacgttcgttttcctgctcgaacttggagaaagccttgctgattttattcagcgagcctacctggttcaagggaagacgcacaatacgcgactgctctgccaaagcctgcaaaatggactgacgtatccaccatactgcataactgatgaacttgaaaccacgtgtctcatcgaacttttcggcagccttaatcagtcctaaattaccctcgttaatcaagtcgggcaaactcaaaccctggttctggtactgtttggctacagatacaacgaaacgcagattggcacgtgtcaatttctccagtgcaacacggtcacccttgcggatgcgctgagcgagctctacctcttcttcgactgtaatgaggtcttcgcgaccgatttcctgcaaatacttgtcaagagaagcgctctctctgttagtgatacttttggtaatttttagttgtctcattcttataatacagatttgggttgcaaagttacgacaaattatttattacaacactaacatgccgaaactttttcaccttatttataccttacttatacaacaaaaaagatgtcggcaagtattcaccgacacctttttttcatctttctttgcttatattacaatcttcttacctgattatcatgtttttgttattcctggctcaaatcaacagcataacttgcacgcttgcccgacgggaacataccggtgataaacaacacttgttcgggagattgggcggcagctttcagtacctgctccagatcctctaccgacttcatctgtacattgtttgccttgaggatgatgaatcccttacggataccggcatctgccattttaccgttggacactccggttacttccaaaccgtaacccaagttaagttgtctcttcaattcggaagatacaggcttgaaagctgcacccaacagttccattccggcatctttcactactttcgtattgccttgagagttcttcagcgtcaatacaaattccttctctttcttgtcacggattaccttcacctttactttatcgcccggacgatgcttagccagcacttcctgcaaatcggtaaacttatgcaccttcttaccgtcaataccgacgataacgtcatccgacttcaacacaccggcagcagaaccgccttctacaacttcggcaatcaagacaccttccttcacaccgagttcgtcggctttcttcttcatttcctcagccagtctttcgtccatttgcaggtctgtgcccagtgtagtaccggtaatacccagcaaagcacgctgtaccgtaccgaactgcttcaagtccgctacaactttcgtcatgatgctggtggggattgcaaagccgtagccggagtatgcacctgtcggtgaatacaacatggcgttgatacctaccagctcacctcttgcattaaccagcgcaccgccactgttgccctgattgatggcagcatccgtctggatgaaggactggatattcgcagcctgtccgttggacgccgttgcgccgatggcacgagcctttgcactgacgataccggctgttacggtagagttcaggttgaacgggttacctaccgccaacacccactcacctactttcagttcgtcggagttgcctaccggtactgtggggaaatcgtcaccctcaatcttaatcagcgcaaggtcagtgctggggtcagtaccgatgatgcggcctttcagttcgcggtcatcgttcagtttcacggtaatttcatcagcaccctcaaccacgtggttgttggttacgatatagccgtctttggaaataatcacgccggagccgaaacctacgcgcggctgggtctgtatctgacgctgctgtccgcgaccgtcaccgaagaagaagtcaaaaatatccggcatgctctgcactgtctgagtcttgctcaactgtttggcacgtatatgtactacggcatgaaccgaactttctgccgcttgcgtcaggtcaacaggctgcgcatccgtcgcgttataagcagccaaccgtaaattattagggttctgctggaacaattcgctgaatgtagcagacttttccttattctgcatcttataagtggtaacaccggccactcctgcactcagaactacaatggctgcaactccaaggatgttttttgttgtctgtttcatattactttctattttctttaattgttaatattcaaatctcatttaacattctgacgttaaaataacgacaaaaatcgttctgttattccgcttgtcactcttttttgttctcttttaacagtgaatatttgggacttaacagcggttaacggcagaggctgacaaattagcatttatgcacgattactgtctgttaaaagactgacagatagacaaaacaaaaacgcaccatccgtttgcctgtaacggatgatgcgttgaggttcaacagatgatgcgtttcacctcaacacatcatctgttttcaagctgtatgccataccttaataattaaggtaatcaatgtccatatggtaactccattgcggaaaataaaggtttccaccttcccactctacctcgccgcgctggaaatctacggtttcgctacgcggatacttcttttcgggcactaacggcatgccataatcggtatttacaatcatgcgccaggagtcgataccacccaggaagaaatactcttcatcggcattgcgggcaaaagccgggattccaaacgattggtctacaggcacccaccctacaccttcaaaatatacttccgcccaatcatgcagattccaagcacggggatgcatcatgaacccgctctgaaaatgtgcgggaatgccgctgatgcggcataaggttatgaataaaaggctgacctgaccgcaatcgccgtgacggttgtccaatacatattccggtatattctcaatcgtggaatactcgcgggcagatgcccaggggaagtgatcgttaatccaacggaagatgcgcttcgcctttaaataaggattggtttcacctgctgtcaacttggcagccaactcacgcagccgcggagagaagacgatgtgtttctcccgctcggcggtatactctttataaagagcagtagtcgtatcataaggtagaacatcttccgcgcgcagattatgccactctccgcaggatgtatattcaaatgtttcggagaacacggtaggctctccttgtaccgcacgcttttccatatagagcgtgctatgccggcactcttgcggagaaaggacatagtccggctcactggcagagatgaatttcacatcccgctgccgggcctggtcggtacggggataaggcaaccagcagcgaaccagctttccggcaggaacggcattggtgtctaccgtcaacgtataagtgacacgcatccgcttgggagcgactatcgccttgttttctttcttcacggcggtaatcacttcgggcagattctctttgttcaccttctcacttccgcttagagcagtgccctctttggctatctttatatcatagcaggcagaatccacacgaaacagattaggaccggcattacggaaatagcgtttttcaccatccagaaccatgcactccaaagcattggatgcttcccactgccgcatctgttcgtccgttacatcaggaatatactttctgatatagtccttgacctgagattccgtcaaacaaaaatccgtaagcagacgccggtgcaaatcatcatcccaactgtatggcctgttctccggtttcgtgctgcaagcagaaacaaaaacaaacaaaaagacaatatatagcagattcttcatggattatataagtaaatcagtttatatcaagagcacctgtcaccgtatgatttccgtacttttatatcttcacgactccaatacccggcaagtccggcagtgtaatctttccctttacaacttccattcccttgaaacggtcgttggctatcagcaaactgccgtccaaatcggcaaaatcaactgccgaagaaaattgtgcagccgcagaaatggcacacgaagtttcggtcatgcaccccaccattactttcatgcccaaagcacgcgccagtgtcaccatcttccatgcctcacgcataccggtacatttcatcagcttgatattgataccggtaaaaacatctttcagccctactatatcctttaagcgttggacggattcatctgcaaataccggcaacggactctgcccggttacccacgcgatatcatccaactgctctttaggcatgggctgctctatcatcacaatgcctttctctttcagccagtgaatcatatcaagcgcataatgtttgtctttccagccctgattggcgtcaatggcgataggcaggtcggttaccgaacggatggtctcgatcatctccttatcgttgtcgcgccccagcttcactttcaggatattgaactgcccggcacactctttagtcttttcacgcaccacatcgggcgtatcaataccgatggtaaaggtggtagaaggcgctttctccttatccaatccccagattttataccaggggacctgcaacaatttacccaccaaatcgtgcaaggcaatatccaccgcagtcttggccgccgaatctcctgcagagagactgtctatataactcaggatatcttccagccggaaaggatcggagaactgcccgataacatcctgcactttcttcaagaaagccagtacgctgtccatcgtgcccaattcgtgctgcaggtagggcggcatggaagcttcgccataaccgatgatgccgtcatactctatttcgacctgcacatcgggagtggtggtgcgcgaataagcagccaccgtaaacacatgacgcaacctcagttcatacggaaagaaacgcagcttcattttaggcgtaacgccactcttattgatattgaacaaagcaggcgccgcaccctcacctgccaatacgctattgatagccatacccgaacctaaggcggcaaaggcggcggtctttaaaaagtctcttctgttttgcatgtcatttatagtattcattggtttccgttgtgtttaatcccgcctccttatttatataaggtaatacgcgcgtagcgaacagcaaccgcccgagattgtactcatcgaacaattcatctgccaggtcgaaactgctgatatgcacatcgccctgcgaatgaatgaaacgcttgccgccaatatacatacccacgtgtacgacccgttctttacgttccggagttgccttgcggccgaagaatatcaaatcgcccggttgtaggttggagaaatcggctgcaatgtctatatgctcgcccacataagcctgctgggaagcatcacgtggtataatgatgtcgtgcataaaaagtatggtacgcatgaatccgctgcaatccacgcctttcgatgaagttcccgcccaaagataaggtattcccatcatggtgtgtgccgtacggataatgccggcggcatcctgctgcaagccggaacgccatttcttctcgggcatggctatggatttggagatgtatccccggcgaccgtcgggataggtcaccttgtagaaagctcccttgctcccttcccacttcaaacggttgccggccacaacgtccgaaaccgtttgtgaagtttggttcggttcggaatagacaaaaccgtaatgagcagtcacaacgatcttttccgccttgttccacgcagccatttcttcttcggtcaccggatgtacacctacacgatgcacccaggcgatataattgtcgggagtctggatacgcacccagccatcgcgctgcaatacgcgcacaggcatccccatcagactctgtgtcatcatttccgatgagaaatccggggcgacacgcatatttgccacagacacattgataataccgcaggttttgccttcaagccctttcacatcgggaagcagttcaagacagtccatcacggcatagccttttcttgccagttccttcaacaatacgtttttcgcttctgccgaagtagtgacgccacgcagcatcacattcttatcggaaaaagaataatctacatccagcaatgccacacgcctgtccggtgcaaactgttttttcaaactgtcggtgagttgtgccacttctaccggtatattacggtctccggcttccgaagcgacagcaaaaagagttataaagagaaatactgcaaagaatgaggcaaactttttcatggactatacgcatttgggaattattaatgttagcaaagctaacaatttattctaaaagagatacatattttcagtgtttttaagaatttacacaaataaaacaccgataacgaacaaatcaccggtcacctgacgtcaatcactaaaaaattcctatctttgcaccccaaagcagttggtcggtctgtcgcttgcgcctcgtgcgcatgaggaaagtccgggcaacacagagcatcctacttcctaacagaaagctgtccgcgagggtagagtaacgtagaagaaaataaccgccatgccttccggggttgtggtaagggtgagaaggtggggtaagagcccaccggtcttgtggcgacacaagggccgtacgtcttaggagttgtaaggtcatgtaaaccgacgttatgagagttgctcgctccatgtcggagggtagaccgctaaagcctgtatggcaacatacggctcagataaatgacagacgccttgatttaattgctgaatcagggaacagaacccggcttacagaccgactgcttttttaaattaaaaattaaaaattgagaattaagaaataaagccctttcggcatactatcgtttttcaattctcgattctcatttttcaatttagcatgaacaagcgcattgccaccctttggaaattcctgacatacgacatctggcgtattacagaagacgaagtcactaaaacgactttctccttatataatattatcaagaccatttatctctgcatcaaccgctttaccaaagacaggcttgtaaacaaggcatcggcattgacatatagcactttactggctattgtacctatcctggccattgtgtttgccattgcacgcgggttcggcttcgacaatctgatggagagtcaaatcgttcaaggcttcggcggtccgtcggaaacaacggaagttatctttcaattcgtcaactcctatctatcgcaaaccaaaaacggcatattcattggcgtgggcctgatcatgttattgtggacggtgctcaacctgattaacaacatggagattaccttcaaccgcatctggcaggtaaaaaaagcaagaagcatgtaccgtaaaatcacggattacttctccatgctcctgctgataccccttctgctggtagtttcgggcggtctttccatatttatgagcaccatgctgaagaatgtgacagacttcaccctgctcgctcccatcggcaaattcctaatccgcctcataccttttgtgctgacatgggtgatgttcacggcactgtatgttttcatgcccaatacaaaggtgaaactcaagcatgcgctgatttcgggcattctggcaggtacggcacaccaggcattccagttcctctatatcagcagccagttgtgggtatcccgttacaacgccatttacggtagttttgcggcacttcccatgttcctgctgtggttgcagatatcgtggaccatctgccttttcggagcggaactgacgtatgccggacaaaacatccggaatttcagtttcgataaggatgcacgcaacatcagccgccgttaccgcgacttcatctccatccttatcatgtcgttcgtagccaaacgttttgaaaagaacgaaccgccctatactgccgaagacatatccgaggagtgccagatacccatacgcctgaccaaccagaccctttatgaattgcaggaaatcaaccttctgcacgaagtggtgaccgatgccaaaagccaggacatcgcctatcagccttccatggacatcagcaagctgaacgttgctctcctgctggacaagctggacactcacggttccgaggacttcaagatagacaaggacaaggaattccacgggcaatgggaaacactgatgaaagcacgggaagagtactacaagagtgcaagccaagtgctgctgaaagacctgtaacggtagctttaataatggttgtatgaaacaaccttgtccttggatttcctggacttcttccgtttgtcttttgccggatagcctatcgtgatgtcgagcaacagacgtttattggcaggaatgccggtaagcttcttaatctccttttcatcgaaccagcccaggatgcacgaacccagcccctcgctttcggcagccagcgtaatatgagcggtggcaatgccgatatctatcagagggaaatacttgtccttaatcttggcgcccaagaaggaagtgatattcatggattcttccaccaccagaatatgtaccggagcatctttggcaaacttattcatccccaatccggcagtggccttacccacttttacagcaagttccggatcggtgatcaccacaaaacgccacggctgggcattgcatgccgaaggcgacagccgggcagcttccaaaatacgttccaacttctccggctctaccgcacgggacatatcataagcacggtcgctttgacgtgaagcggccaattgcaaaaaatcattcataataagatatgagttatgaattataaattatgagttataactctatttatactgtatcattctgctgatatatttaccgataatatcgaattcgagattcactacgctacccaccttgaaagcgtggaaattggtatgctcgaaagtataagggataatggctacctgaaaggtatcgtccgtagggttgcacacggtcaggctgacaccgtttacggttaccgagcctttatccacggtgatataaccgcgcttcgccatttccttatcaaaggcataccggaacgtaaagtaatagctgccctcggcatcctttatgtccacacaggttgccgtttggtctacgtgtccctgtacgatgtgtccgtccaaacggccgttcatcatcatgctgcgctccacgttcacttcatcgcctacttccaacaagccgagattggaacgatccagagtctctttcatcgccgtcaccgtataagtatcatccgtcatgctgataaccgtaaggcatacgccattatgagatacgctctggtctatttttaattcatttacgaacgaacacttgaaagtaaagtgcacgttttcttggtctctgaccatagccaccagtgtggcacattcttctactattccggaaaacataagcttgttacaatttaaatttagatattacccgcattgcggatgcgacaaagatacaaaaagggtctcatatagaaatgaaaaaaaggaagcttttcacaaagcctcctttttcagttttcaataggtattagttttttttaaggtaaaaagattgttttcaggataacgttgcaaagatagccgcttttcaagataccaaccaaattaaaaaacatgtcttataacatcttttctgtaattcttttgattttattatcatttcaaagcaaatttctacatctgcaatcgttttcaatgggcaaatatagggctattttccattaaacactaaaaatatcctaaaaagttgactatttcttatcgtctgcatagtgctcgtccgtacgtccgctatgtttcagcaccttcgcatcgataaaaaacactatttcctcggcgatattcgtaatatgatcaccggaacgttccagcttacggaaaacactaaccagattcagacaagagagtgcgctttcgggatgcttgccgatataatctgccagaacagcagtggcatttgcattaatttcatccagcaggttatctttggcgaataccgcggttgccagttcctgactttcttcctgaagagctcttttggcaagttcaagcatagccgaaacttgatttatcatctcctccaggcgcagttccttcaccagtccgcttgccagaatcggttccttgcaattcaacgcaaagcgggctatgccttcggcgaaatcgcccaaacgctccaggttcgtattgattttgagcatggcaagcacaaaacgcaagtcgatagcaacaggattatagagagcgatgatgtcttctatatcactgtctatcttgagttcgaaggcattgacacgacgctcgcgcaccaatacctgctgtgccagctcgcgatccaaagtcagtacggcttctccggcacggccgagctggttatacactaaagtccacatttcgtctatttcttttttcagcaagacgagctctgattcgataaactgcaccataatgtttttctatttcaaaattatcaattccataatcatatcacttgtttcaacgcatgacactgttcgtaccaaagagcggtaccgtccgtaccaacgcatgaaacttcccgtaccaaagcgtggtaccgctcgtaccaaggcgtgaaactgcttgtaccacggcatggtaccgcgcctgccaaagcacggaacagtccgttacccgaagcgtcccgttatatagttctgcgtctctaccttatcgggattagtgaaaatctttttggtatcgccgaactccaccatctcacccatataaaagaaagccgtactatcgcttacgcgggcggcctgctgcatattatgggtaacgattacaatggtgtattgcttcttcaattcgtgtataagctcctctaccttagccgtggaaatggggtcgagggcagacgccggctcatccatcaataggacggacggagataccgccatggcacgggctatgcaaaggcgctgctgctgtccgccggaaagggcgtaagcagacaccttgagcttgtctttcacctcatcccatagtgccgcccctttcagggtctcctctacccgtcggcggataaaagcattgtcggtaacgccgtttacacgcaatccgtaggccacattctcaaaaatgcttttcggaaagggattgggacgctggaataccatacctacatttttgcgaagttcgtccacctgcacacctttcttatatatgtcctgaccgtcgataagaatctcaccggtcaggcgggtgtcgggtatcaaatcgttcatacggttcagcaagcggagaaaagtggacttaccgcaaccggaaggtccgatgaaagccacaaccgacttctccgagatatccatgctgatacctttcaaggcatggaagtcgccataccagaaatttacatcacgcgtttctattttattcatcatgccgttcatgattttattgatttagttcattttgattttcttctcgaaatatttccgcagagcattggccagcagatttaccagaaggattatcagtatcaagaccaaggccgttccataggcaataggcagctgggcttccatatccgtaccgctggtggagatgacgtacagatgatagggcaacgccatgcactggtcgaaaatactgccgggcagttgcggcaggaaatatgctgcgcacgtaaagagaataggtgccgtctctccggatacacgccccagagcaagaatcaggccggtgatgatgttgggcattcccatcggcagaatcacatgccagattgtttgcagcttggtggctcccaaagcgcggctgccctcacgcagattgtcgggtatcgccttcaaagcctcttcggtagtgcgaatcaccaaaggcaggctcaacagtcccaaggtaagcgaacccgccaggatgctgtcgccaaagtccatatagttgacaaacaatgccatgccgaaaagtccgaacacgatggaaggtatgccgctcaggttgttcgtcatcatacggatgaaacgcacaatccaacccttaggcgcatattcgttcatatagatgccgctcatcacccccaccgggaaagcaaacaacgcgctgcctgtcatcaggcaaaaagtaccgacgatggcaggcaggataccgccggatgtcatgccgtctgtcggggcgcccgtcaagaactcccagtcgatgactcctatacctttgtatatgataaaaccgagaatggcaaagaggatgcctaccacactcagactaagcaaacggaacagtccgaacgcgatgttttgcgaaagatgttttctacttatcatatccttttactttcttttgcccgaagatacagcttctaccgtgaagtttatcaacaagctgataaaaaacaatacgactcccaagaggaacaatgcctcgtaatgcgcgccacccgccggcgcttcgcccagttcggcggcaattgtggcgggaatcgtgcgcaaaggttccaaaatggtatggggaattacggcagcgtttcccgtcaccatcagcaccgccatcgtttcgccgacagcacggccgatgcccaggacaaccccggacgtaatacctgatatggaataaggtatcaccaccttatatatggtctgccactgtgaagcgccaagcgccagactggcttcgcgcatggcccgcggacagttgcgcatggcatcctccgtcaccgtgataatggtaggcaacgccatgatggcgagcacgatacttcctgccagtccgctctcgccgacaggcaaatcgaacactctctgcagcaaaggcactatcacaatcaacccgaagaaaccgtaaacaacggaaggaataccgctcagcagttctatcaccggcttcatcagattccgtatcttatggtcagccacctcggacatataaacggctaccgccagtccgaacggcaaggctatgagaatggcgaaaaggcttacccacaacgtacccgttatcaatggtaagaagccgaactggggagcaggtgtagccgtaggaaaccactcggctcccgcaaagacgtctttcagcgaaatggtgttgtcccgcagcaaatgaacggagtcaggacggacaatgaactgcctcggcacaaaagccacgatgcccggcgtgcgttccaccaagtccgtgatgcatgcgcctgcattttcgtaagatgctcccaactgttcttccgtataataccgtgtaacatcttccaaacgaaaaagccggatagggagattctccccaccgacttcccgccaatttgttatctcttcatcgaaaacatcctttatctgtaccggagtaagttcacttaccttattgtccttatttaatgccaagacatacccctcttcgattacccggctatggaacagccccaccgcttcggaaaagaggaataagacgataagcacaatagtaagacttgttacaaaaccgctacaagccaatatgccctctataattttctcaaaaacttttttcatattgcctacttttttctgtgcgcaaagaaagggggtagatattaaggcagtgtgactatcatttgaaagaaatgtttcaaacatattacaaatctgttacaataaacacagacccgccgtatgtaacaactttgtaacatgcgttgttttaatttgcagcgaaataaaaacagcgggaacatacctccatacactattgttgtttaagtatcgtcccaaaaacattagaatatgatgaagcatttatttctgaccatcttcgcattggcatttgccgctaccgacattcaggcgcagcgcatcaaaggcagcgacaccgttctgcccatcgcacagcaaaccgccgaacgctttatgacattgaatcccaatgcccgcgtcaccgtcaccggaggcggaagcggggtaggcatttccgccttgctggatgaaacgaccgacatcgcaatggcttccagaggcatcaaattcagcgagaagatgaaagcgaaagcagccggagaagaactggaagaaataccggtagcctatgatgcgctggccgttgtcgtacacccgtccaatcccgtaaagcagctcacccgccgacagttggaagatatcttccgcggtaaaatcaccaattggaagcaagtaggcggagacgaccgcaaaatagtggtctactcgcgtgagacctcttccggcacatacgaattctttaaagaaagcgtactgaaaaacaagaattacatgagcagcagcctttccatgcccgccaccggagccatcatacaatccgtcagccaaacgcgcggagccatcggctatgtgggtcttgcctatgtatcgccccgcatcaagacccttgccgtatcttacgacgacaagcactttgccgctcccaccctggaaaacgccatcaataaaacttatcccatcgtacgcccgctatattattattacaataagaaaagcgccggccttgtagacccgctgttacagttcgtattgtcacccgccggccaagaaatcattaaaaagagcggatacattcctataaacgaagaatgaaaaatgaataatg

SEQ ID NO: 4128 - DNA, 28586 bp, Unknown
  gut microbiota DNA sequence
gccactatacgaataataatagcattatggcagaaataaaaagcgaagaaacaagcgaaaagaagagcctgaacttcattgaacaaatagtagagaacgacttgaaagaaggtaaaaacgacggaaaagtacagacacgttttccgccggaacccaacggttatcttcacatcggacatgccaaagccatttgcctggattttggtattgccgccgcacatggcggtgtctgcaacttgcgtttcgatgataccaaccccaccaaagaagacgtggagtacgtagaggctatcaaggaagatattcaatggctgggctaccggtggggcaacgaatactatgcttccgactatttccaacagctatgggacttcgccatccgcctcatcaaagagggtaaagcgtatatcgacgagcagacatccgaacagatcgccgctcaaaaaggtactcctacccaacccggagtagaaagcccgtaccgtaaccgccccattgaagagactctcgacctgttccaaaaaatgaacaccggagagattgaagaaggcgccatggtgctccgtgccaaaattgacatggcaagtcccaacatgcacttccgcgacccgattatctatcgcgtggtgaaacatccgcaccaccgtacgggtactacctggaaagcttacccgatgtacgacttcgctcacggacaaagcgactacttcgaaggtgtaacccactccttgtgtacactggaattcgttccccaccgtccgttgtacgacctctttgtagattgggtaaaagaaggcaaggacctgaacgaccaccgtcctcaccagtacgaattcaacaagctcaacctgagctatacactcatgagcaagcgcaacctgctgactttggtgaaagaaggccttgtcaacggctgggacgacccccgtatgccgactatctgcggtttccgccgtcgcggttattcacccgagtccattcataagttcatcgataaaatcggttataccacttacgatgccctcaatgaatttgccttgctggagagtgccgtacgcgaagacttgaacgcacgcgccacccgcatatccgcagtattgaatccggtgaagcttgtcatcaccaattatccggaaggacaggttgagaaaatggaagccgtcaacaacccggaacgtccagaagagggcagccacaacatcgaattcagccgcgagctgtggatagaacgcgacgatttcatggaagatgctccgaagaaatatttccgcatgactcccggacaggaagttcgcctgaaaagcgcgtacatcgtgaagtgtaccggctgcaagaagaacgatgcaggagaaatcacagaagtatactgcgaatacgaccccgacagcaaaagcggcatgcccggcgctaaccgcaaagtaaaaggcacaattcactgggtgagctgcgcacactgcctgcaagccgaagtccgcctttacgaccggttgtggaaagtggaaaatccgcgcgacgaactggcagccatccgcgaagaaaagaattgcgatgcgctgaccgccatgaaggaaatgataaatccggattctctgaacgtattgccatgctgctatatcgagaaatttgccgccggcatgaagcccctctcctacctgcagttccagcgcatcggttacttcaatgtagaccgcgactctacaccggagaaaatggtgttcaaccgtaccgtaggcttgaaagatacttgggggaaaatcaacaaataatataacattaatgagtaaaaagaacctgttgtccggaagagacaaggaattgcaagaacttgcagaacaatatgaagcagcgaaagctgagaacaaacctatctatctggatgcagacgatttagccgaccttgccgactggtatgccatgcacagaaaaaacagccaggctaccgaagtcgtagaatacgggctgagcttacaccccggcagtacgcctctgttggtagagcaggcttatctcttcatggacgcccgggaaagggataaggccaaacaagtgatagaggaaataaccgaagattattcctcggaagtaaaagtactgaaagccaatattctcttaggcgaaggcaaaatagatgaagcggaacaactccttgactccatagaagacaaagaggacttggccaacatcgtggacgtatcctatatgtatattgatatggggtatcccgataaggctgtaccatggctgacaaggggattggaaaaatatgccgaggaagaagagtatctggccgtaacagccgactgtttcctggcacaaggtctgaaggataaagccgaaatgttctataacaagctgatagacaagaatccttattcagccccttattggttcggactggcacgttgctatttcgaacagcaactgtttgacaaagccattgaggcgtgcgactatgcaatcgtgtcagatgaagaatttgccgatgcctatatgatgaaaggacatgctttctatcaacttggaaatgaagaaagcgcgcttgagaattataccctggcagaaaaatataaagccgtcagccccaatttcctccatatgttcatcggattcaatgaaatatccaaaggacactgggaagaagggtaccggcatcttgaattggtcatacacagtaaagataccgactcaacgatgttgccgtctttatatgcgcatgtagcgatttgcctctataacttaggcgaaaagcgtcaggccgacctgtttttcaagaaagcccatgagataggcccgaaagatgcagaaccctatctgattgagggaggtatgtatatggaaaaaggagatttcgacaaagctgtaaagaaatgggctttggctttagagtgtgccccgtgtgccgatacttggaatgaaatcggcatgagcagcatggaaacgggccatatacaatatgcccaaacggcttttgagcaggttaagaaactggagcccgacttcgagaatatcaacgagaagctgaccgccctttatctgttacttgacgacatggagaacttcctaaagtacaaccagctttgcgcacacccgtttcaggcaaaagacctggaaaacatgctggatttgctggattgtaaaaaccgggatgaaatgataaaaagagtgaaagagatatttggcgggtcaggtttattttaaagacataaacaaattattaatcacaagtattatatatggaatcatctgcagaacttatcaaatgggttttagaaaatctgaattattgggtagttaccatcttcatgactatcgaaagttcatttatcccatttccatcggaagttatagtgccgccggctgcatggaaagcgatgaccgatgacagtatgaatatcttccttgtcgttattttcgcaactatcggcgcagatctcggcgcactcataaactactatcttgcacgttggctgggtcgtcctattgtctataaatttgccaacagccgtttcgggcatatgtgcctgattgacgaagcgaaagtacgccatgccgaagagtacttcaggaaacatggcgccgcatccacattcttcggacgtcttatccccgcagtacggcagcttatcagtattccggccggactcgccggcatgaaattaggctcgttcctgctttatacaacgctcggtgcgggaatctggaacacgatactggcgctgctcggctattttatataccggttcacagacatcaagacaaccaacgatgtctatatattggctacggaatacagccacgaaatcggttatgtcattctggcagttgcggtattcgttgtaggtttcctgatttataaaggaataaaacagaaaaaataagaataaaaaacggtggataaagacagtccttcttcatccaccgtttttttattgtatagttaagtcccaagcggttatttcctaactgccgcaatcgccttttcatagtccggctcttgcgtaatctccggtacgagttccgtataggcaatctttccatctttaccgacaacaatcaccgcccgcgccagcaaaccgcttaacggtccgtctgccatacgcacaccatagttttcatcaaaatccgagcaacggaaatcggacaagggaattacgttctcaataccttccgtcgtacaaaaacgggcatgtgcaaaaggcagatcctttgaaacagccaataccaccgtatccggcaaaccggcagccaattcattgaatttacgtacggaagcagcacatacgccggtatccagactcggaaaaatattaagaattacattcttcccgttcagttctttcaaagagaaagaagataaatccgtctttaccaactcgaaatcaggagcgactgctcccacttttataaactcaccgataacttttaccggttgtcccttaaattttgttgtagccataattttatcaatttatacaatagagaaacaaacgggatgctgaaaaagttcaataaaacttttcattccacagattgttattctcccaacaaacttataataatcacttttaaattaagatttacatgaaaacaatttttgatgagctgaaacaggaagtaaaaaactggtgggtttcacttattctcggcatcctgtatgtagccgtagctctggggctaatgttcttcccttttaacggatatgccgcattgagtattttattcagcatctcaatgctggtcagcggtttgctggaaattgcctttgctgtaagcaaccgccaaagggtatccagctggggctggtatctggcaggaggagtcattgatatgattttgggactctacctggtgacttatcctgtgctgagcatggaagtcattccgtttatcatcgccttctggctgatgttccggggattttcctcggtaggctatgctatggacttaaagaggtacgggacaaaagagtggggctggtatacagcattcggcattcttgccatcgtatgctcgcttattatcctgtggcaaccgacggtcggagctatctacgccgtttatatgatttcgtttgcattccttatcataggattcttccgtatcatgctctctttcgaactgaagaatctgcacaaacgaagtttccgcaattcataattcgccacagattacacagatatgtacagattagatattcttgagtaagcctcggacgcttaaaatccgtctgtaataatcggcataatccgcagtgaatcacagtacatcccggttagagacttccggtttatcttttatgatgcagaaaacggaacatggttgttctggacactcccatccgccgggcgagttcagagcaggatgttcctttcttctgctctttaagcaattgtttcttgttctccgcaagtatcttcatcttaggcatatccccctttttacgccccaaatgctttccttcctgctttctacgggccagcgcctctttagtacgcattgaaatcagattacgctctatctcggccatcagtccgaatgcaaaccccagcactttgctgttaatgtcattctgaaaaacgtatccctctttggtgctgtacaatatcacccccttttttatacacgaattgagaatagtcataatctcaagcagcgtacggctgagccgtgatatctccgtaacaatcaaagaatcgcctggacgcatcttatccaacacccccgacaacttacgttctttactgctgacgcttccgctgaccgtttccgtataccacttgtcaatgctcatcccgttcctttctgcgaagcgtacaatttcctctcgctggttttccaaaaactgtttttctgtacttactcttaaataagctactactgccataaattttgttgttgttttattggtttaacgccgccaaagaacggttattccaataaaatagccaaccggtccgtcatatcctttgccaaccgttttcaaaatacgggtttgttcccaaacagacgccaaacagataaaaagttttgcattaacataatcttcttccggctatatcaaacttttttcccctttttcgtttatctttgtacatcctttcatgataaaaaaggaaagggtttcttcagcaagccgcaaaaggcaggaagaggaaacaatcatttactaattaaaatactaactaaaatcagaagattatggcaatgcatacatggtttgagtgtaaaatccgttatgaaaaaacaatggaaaacggaatgaacaaaaaagttaccgaaccttatctggtagatgcactcagttttacggaagcggaagcacgtatcatcgaagagatgacaccgtttatttcaggagaattcacggtatcggacattaaacgtgccaactacagcgaactgtttccatgcgaagaggaagctgccgaccgttggttcaaatgcaagctggttttcatcacattggatgagaaaagcggtgctgagaaaaaaacgtctactcaggtattggtgcaggcagccgacttgcgtgatgcggtaaagaagctggatgagggtatgaaaggcacaatggccgactaccaaattgcatcggtagcggaaaccgccatcatggatgtatatccgtacagcgcagaaccggatgacaagccggaagtataagaacctgaaaatttcatttcacagattatcatatatacgatgagtattgcagaaaacataaaacaagtactgagcgaactacctgatggggtgcggctggtagctgtttccaaatttcaccccaacgaggccataaaggaagcttatagcgcagggcagcgtgtgttcggagaaagcaaggtgcaggaaatgactgccaaatacgagagccttccaaaagatatcgaatggcatttcatcggacatctgcaaacgaataaaatcaaatatatcgtaccctatgttactctgattcatggagtggattcctacaaactccttaccgaaatcaacaggcaggcagccaaggccggacgaaccgtaaactgcctgcttcaactgcacatagcacaagaagagaccaaattcggtttcagtttcgacgaatgccgggagatgcttgcaggcgatgaatggaaaaagctcggcaatgtccggatatgcggacttatgggcatggctacgaatacagacaatatcgaacaaatcaaagctgaattccgttcattaaacaatttcttccaagaggctaaagccacctggttttccaatgcagagtggtttcgggagctgtcaatgggaatgtcccatgattaccatgaggccattgccgccggcagtaccctggtacgtgtaggaagtaaaatatttggagaaagaatatattaatacctaataactgttattatggcaacattagaaaccacctttgcagggttaaaacttaaaaacccgattattatcagcagttccggacttaccgacagtgctgccaagaaccaaaagctttacgaagccggagcaggagccattgtactcaagtctctttttgaggaacaaatcatgatggaagccgattggcttggagatcccaatatgtatccggaaggaagcgattacctggtaggatacatacgcgaacataaattgggcgaatatttgaatctgattaaagaaaccaagaaagtctgtgacattcctgtcattgccagcattaactgctatcaggatgcagactggattgagtttgccagaaagatagaagaggcaggagcagatgctttggaagtcaatatccttgctttgcaaaccgacatacaatatgcttacggttcttttgaacaacgtcatatcgacatcttgagccatatcaggaaaacagtcaatattcctgttatcatgaaattgggagacaacctcaccaatccgatagcactcatcgaccagctctatgccaatggtgcggcggcagtagtaatgttcaaccggttctaccagccggatatcgatattgaaaaaatggctcaaagtgccggaagcgtcttcagcacagatgccgatttatccaaatccttacgttggataggtatcgcctctgcggctgtgagcaagctggactatgcggcatccggcggcatacatgctcctgaaggagtagtaaaagctatcttggcgggcgcttcggcagtagagatatgcagcgcactctatcagaattcttacgccatcatcgaagagtatgtccgcttcctaaacgcatggatggaacgcaaagggatggagaacatcagccagttcaaaggcatgctgaatgtaagcgacctgaacgggataaacactttcgaacgtacccagttcctgaaatacttctcggcacgcaaataataaaaatatggtatactaataaaaacggatggtgcttaccagtggggcatcatccgttttttttatgtcacattcttcgccttcaccaggaaaggcaaagcagcagatattacattaaattacttgccagttcgctcagctggctacgctctcccttcaccagattgacatgggcaaacaggttctggtctctcatgcggtctatcatatagacaagcccgttggactggctgtccagatacggctggtcaatctgttggatgtcgcccgtgaataccatcttcgtcccttcgccggcacgtgttataatggtttttatttcgtgaggagtaaggttctgcgcttcgtcgatgatacagtaggtctcgctcaggctgcgcccgcggataaaggcgagggcttcaatgacaagctggtcgcttttctgcatatcttccaaccttttcacttcgcttgagttagatgcgaactgatgcttgattacattcaggttatcaaacaacggctgcatatacggagctaccttttcattggcgtcacccggtaagaaacctatatctttattggacaatgcaacgataggacgcgccagcaggatttgcttatagtccgtcagcttgcccaaagcggctgccagtgccaacagggtcttacccgttcctgccttgccggtgagggccaccagcttgatgttcgggtcattcaatacctcgaaagcaaaactctgttcggcattacgcggttcgatgccgtaattctttgtcttatttacacggcaaacggaatgggtaaaaggattgtagcgggcaagcacgctgctgcggtcgctcttcaggataaaacattcgttggggtgaataacatccttgaagtcgaattcgctgatgtccaacccttccttagaggaatagatgcggtctatcagagtcgggtcaaccccttcgaacacttcgttcgacttttcaaatatatccacgttaattaccttgtcgttgatatagtcctcgcacagcagaccgatagagcgcgctttcatacgaaggttgacatccttggtgacaagaatggatttcatattcggcttcttcacggtcagccagtcaacgacagagagtatctgatggtcgggaatacgttccgggaaagaatcgtgcacgcggggcgaatctaccgagcccgccaccacgaacaggcgtcccagaccttcgcccaacggagcgcctttggtaaaaaggttatcatcggtaatcaagtcgagctcacggacaaactcacgggcattgaaatttatctgctcgttgcccttcttgaatttatcgagttcttcaagcactacaatgggaagataaatatcgttctcttgaaaattcttcaaacagttataatcgtgaaggataacattggtatcaatcacaaagtttttcttagctcccatactctttagatttaaatagtttatacctcataccgacaatataaaataaagcaagcatacacacttaaataaaattgccttatctttgccgttcctaaagataacactttaataaggagaaaggattgctttcccgttaatttttataaaagatggactatcagaacactttaacttacttatataacagcgtacccatgtttcagcaagtgggcggctcggcatacaaagaaggtttggaaaacacgcgcatattagacgaacatttcgggcacccccaccgttcgttccgcacaatccacgtggcaggaaccaacggtaaaggctcctgttcccatacattggctgccatattgcaggaggcgggataccgcgtggggctttacacttctccccacctggtggatttccgtgaacgtatccgtataaacggctctcccatacccgaagagtatgtagtgcactttgtagaaaaagaacgtgactttttcgagcctctgcacccttctttctttgaattgaccacagcgatggcattccgctattttgccgacgagaaagtggatgtagccattatagaggtcggactgggcggccggttggactgtacgaacatcattcatccggatttgtgcatcataaccaacataagtttcgaccatacccagttcttgggcgacacattggcaaagatagcgggagaaaaggcaggtatcatcaaacccggcattcccgtagtcattggcgaaaccacccccgagaccaaaccggttttcctgcaaaaggccgcggcagagaaagcccctgtcgtatttgcagaagaaaggatgaacaacgattatcccggactgaaaacagagttgcagggactttatcaactaaaaaacacacgcaccatcctcacagccttgccattgctgaaagaggccggataccacattgacgaaaggaatgtgcgcaacggcttcgcccgtgtctgcgaactgacgggattaatgggacgctggcaaaagctacaggagtcccccaccctgatatgtgataccggtcataatgtgggcggcattacctacatcgtagaacaactgaaacagcaaacctaccgccagctccatatcatcataggaatggtcaatgacaaagacatcagcggtgtgcttgccctgcttcccaaagatgctgtatactacttcaccaaagccagcgtaaaacgtgcccttccggaagaggagctgtgcaggctcgctgccaaagcaggcttgcagggaaactgttatccggatgttcccgccgccgtaaccgccgcacaagaaaaaagccaccccgaagattttatcttcgtaggtggcagcagctttatcgtggcagatttattagcgaaccgcgatgcactcaatctccactaaggcctctttcggaagcgcctttacggcaacagccgaacgcgcgggaaagtctccctcaaaataagtggcatatactttattcatgtcggcaaacaaagacatatccgccaggaaaacggtagtcttcacgatattcgccatgctcaatcctgcctcttccagaatgtgctttacattctccaacgactggcgggcttgggcttccgcgccttccgccattactccggtagcagcatcgataggcaactgacccgatacgaacaccattccgtttgcttcaatagcctgactgtaagggccgattgcccccggagctttttgactacaaatcacttttttcataattttactcttttatctgttcattatcaaatatatggtatcttttcctactatattcaaaaaaaaaatcaggagactcgtgcagtatttcccagaatcgtgcatttatatatacgaatacacgaaagaaaatttcattcataacctgttaatacctagacttaacttatattttagcatggggaagtttcccaaacaaaggctctgcttgtgaaagcggagcctttattttgttaagtataccgtttatttacaatgcttttcaatcagtccgtccacgttcgggtcgcccaattcctttgccttggcaaaactttggcacgcttcctgcttctttttcatctgcaactgtgcaattcccataagccgataggcttcggcatatttagaatcaatagccaaagcatcctgcaacactttcaaggcttcttcattacgccctacacggatattgaccacggcaagctctgcacgataggtcaggtctttcggactcagctcaatagccttctccatatcattcagtgcacgctggaactgtttggccttcaaggcagcctgctcacgataataatagaacacatcattcaccttgccgtttaccgctttataataagcatcgtaatcaagcatggcggcacgcgcctgattggcgttcatgcgggcttgggcacgttccaacaagtaaggagcggcttcttccgtgtacggttcggtgaaacgtaccacgcaactgtccataagtgccagcacttcttctgccggcgctttcatcagttccttcgtcttagctgcactgaaaaacgttgccgccgacgctatatcggactgattaaccttttcgtagcatgccaaagctgccgcataatcctgctttgcaaacaaaatatccccttcggtctgtacatacaccggaagctcctgaacggcaatcgcttttcttatttcatccacagccttatcgtaagaccagtccttatagggcttttccggattacccagcatataattgtatatcagtttggcacggttgtaatatacgtcgtctttcttttgagccacactcagggctttatccatatccgccacgaccttatccatcgaggcatcatccttggagcggtatatccggttggtggcacggcgcacatagccgtccgcactattcggatattcagcgatgaaatcgtccaacagttctgcatacttctccggagtaacctgtgaggaagccatgaagagaaacaccagcgcctgttcttccgtatcgggcagtgctttcttaatgccgatattctttaaagtcatatcgctgaaggaaaatgccgaaacattctgttccatggcaaaatcgacatctaccgcataacatattgtagcggtatcggcgccggatgacttctgtgcaagcgcaaagacctgtccttcttcggtcatcacgggacagctcaccatcttgtccttcaggcgcagattgagcgtatagtagtgatactttccggaaaattcatccgcagctttcacttgtccggcagtataggaacggtctttctgtgtggaataaggcaggatgtacacattggcgcccacagccggagccacggttgccggatgcaatgccgggacttttttggtggatatacctacacggaatttaatgacatcgtacatgtcattcgcacccataatagaaactaccggcatctgtacgccttccgaattcacgaccaccgcccgttgcgctccttcgaacaaagaacaatcggacaaggccacaccgtcttccgtcacgaagaaaccgtttccggtattcaaaatcttatcattctcgccataagtaatcaccgaaaatacggcacgtttggctttatccacccatttgggagcttgtgccatgctccactgtacctccaaaaggcatagagcggaaagcaggaaaatcttctttttcatattcagttcgttctttgtttcacagcttcataaatcaggatacccgccgcaacggatacgttaagagactcaatcgtacccagcatcggaatctttacccattcgtcgcaaagtgcaaggttatcgtaagagacccccttgtcctcggcacccatgatgatacacataggacctgtgtaatcggcttttgtgtaatcgtaatcacccttttccgtagcagccactatatggaaaccgctgcttttaagaaactgcagggtatctttcagattctgttcgcggcatacgggcaaggtatgcaacgcacctgccgaagtctttaccgcatcggcattcaccgttacactgttcttggcgggaataataacggcatccaccgccgcacactcgcaagtacgggctatcgctccgaaattacgcacatccgttatgccgtccagcatcacaaacaacggattcttgccttcctcaaaaaggaacggcacaaggtcttccgttttctgataagtcacggcagagacaaatgctatcaccccctgatggttcttacgagtaatgcggttgatacgctctaccggcacacgttgtacgggaatcaaagttccctttagagcggcaaacaattctttggacaagtcgctctggatatctttcttcaccaatatcttgtcaatgtccttacctgcctgaacagcttctatcacggcacgaacgccgaaaatcatttcacttttatctatcattgtatcttattgttttttttgttctactttagccggctaaagtgctacactacgattgtaaacctctactttacaaccgtaaagtactacattagtcagacgatgcccaacagtgccttggcattgttcagcgcggcatcggtcagggtggctccactcagcatatgagcaatctcccctacccgttcctcatccgtcaaacggcggatgtggctgttggtttccgtttcattatcctgtttatacaccttataatgggcacgtccgcgggcagctatctgcggcagatgcgtgatactgataacctggcggtcgctatcgcccatttcctgcataatatccgccatgcggtcggctatctcaccggaaactcccgtgtctatttcatcgaacacgatagtgggcagcttcaccgctccggctatcattgccttgacagacagcatgacacgggctatctcgccccccgaagctaccgaagaaatattctgcaaagccccgttcttgttggcagagaaaaggaagttcaccgtatccgccccatgtgcccccggctccttgcgtatacctatttccacctgaaaacggacattgggcatgcccagcggtatcaggcgggctgccatctgcttttcaacctcgcgggctgcggcggtacgcaaccccgtaagtaccgctgcctgccgcttcaccttattatataaggcttcgctacgggctttcaacgtttcaatctgttcatccgatgaagtgatgttggacagtttggcggcataatcatccgccagagccagaagctcgtccaccgtagagacgcgatgcttctgctggagagtataaatcaggttcaaacgtccgttcacctcttccagccggccagggttaaattctatctcctcttcttttcccgaaatctcctgagaaatatctttcagttcgatgtagctgctttccagccgttcggcaagttcaccggcggcaggatatactttctgcaagcccgccattgtattcaggcactctttcaatacggaaagcaggccgccctcatcggagttcatcgcctgaccggcacggaacagtccggcttttatctcttcggcatggctcagcgtatcggcttcctgctccagttcctcctgttctccggtagccagatgcgcatcctccaactgctccaactgaaaacggatgtaatcttcgtccgccttgttcttttcggccagtgcgacaagatgttccaaatcctgctgcacctgcttccattcccggtggagagagcggtatttacttaactcatcttcgtcatgcgccagcaaatccagcacgctcaactggaaaccttccttgttcaggagcaggttctgatgttgcgagtgcacgtcaatcagctgttcgccaagctccttcatctgtaccagcgaggcaggcgtatcgttgataaacgcacggctcttgcccgaagcgtagacttcgcggcgaaggatacactcatcttcgtattccagttcgttttcctcaaagaaaggctgcataccataaccggcaatctcaaaacgggcttcaatcacacattttgcagcgccccgcctgatggatttcacatcggcacgctgccccagcaacagaccgatagctcccaatatgatggactttcccgcaccggtctcaccggtaatcaccgagaagccgctaccgaagtctatatcaagcttctcgataagcgcataattctgtatgtatagagaacgcaacattttattaaacagataattgaaagttgacaatcaaaaaatatcattcacgcttcatcacttccaccaaatggtcgacgatgtccgcagccacttccgctttggacttcaacgggtagtcctttttaccgttccggtcgataatgctgattttattggtatcgtaacggaagcccgcacctttgtcattcaacgaattaagcacgataaaatccaggttcttacggttcagtttatcttccgcattatgctgttcgtcattggtttcgagggcaaagcccaccagcaccttgccgggatgctgcttcttcatctctcccaaatgggcggcaatgtcccgtgtaggcttcaggtgcaatgacatatcacctgtcttttcacgctttatcttcctgtcggcaacctgctccggcgtatagtcggcaacggcggcagccatgataacggcatccgcatcgtcaaacaaagaggtggccgcctcaaacatctctccggcagactccacaccgaaataccggtacacagggtagtgtgtccggagctggacgggccccgaaaccagaataacccttgctcctcttgccgcacactcatcggcaagcgcaaagcccatctttcccgacgaataattgccgataaaacgcaccggatcaatcttttcgtatgtcggtccggtagtaatcattattgtttttcccgccagatcaccgtccttagcggcaaagaactcttccagcctgcggataatgacatccggctcttccattctgcccttgcctaccagatggcttgcaagctcgcccgtacccggttctatgatatggttgccatacgaacgcagtgtctccaggttcttttgggtggacggatgagcatacatatccaggtccattgccggggcaacaaacacaggagcttttgccgacaggtaagtggttatcagcatattatcggcaacgccattcgccatcttgccgatagtggaagccgtggcaggagctatcagcatggcatccgcccacagacccaaatccacatggctgttccaggttccgtcacgctgcgcgaagaactcgctgataacgggcttgctggtaagggcagacaaagtaatgggagttataaattccttgcccgcaggcgttatgacaacttgcacttccgcgccccgttttataagtccgcgaatgatataacaggctttataagcggcaatactgcctgtaatgccgagtactattttctttcctttcagtgggtttgccatgaaatcaaactactaattacaaatttacttctgggtaatctcgcgcaggcggattttagtcagcatagccttggtgttcagtgtaaaatcactgttcagtatccaactgtaatagcccggatcgcgtttcagcacatctgccaccggcatgcctttgtatttaccgaaattaaacacttccacacctttatcatcgtaaaccatgcgtcctgcaaagtcaacattcttgttgaagctggaataatccgagaggaaagccacatcgttctgcaattcgggataacggtccagttgcgacatcagcacctcgtaagtggcacgcgtatcggcttccgccgtatgggcgtcttccaggttcttgccgcaatagaacttataagcggcagacagtgtgcgctgctccattttgtggaagataacctgtacatccacaaacttgcggcgactcatatctatatccacgtctgcacgcaggaattcttccgccagtaccggaatatcaaagcggttggaattgaagccggcaaggtcgcagccttcaatatcattggctatattgcgtgccacttccttgaacgtggggcattctgccacatcttcgtcgtaaatgccgtgaacagcggaagcctcttccggtatgtgcatttcgggattaatgcgcatggttttggtttcctcgtttccgttgggatatactttgagataacagatttctactattcggtccgagttaatgtttgtaccggtggtctccaagtcaaaaaagacaatcggatttttaagattcagtttcatgaagtttcgtatttatttatcttttaggcacggactgcacggaacggtgcggtttctctataaacccgaaccgtgaaatccgcgtaacccgtgcctaaataaaaaaatgacagattactatttcattaatcattcagcatcatcggcatcagcagcatcagcaggtcttcgttttcttcctgctctgccggaacaataacaccggcacgcgaaggatccgccagctcgataaccacttcatccgccgatatattattcaggatatcaatcaggaaagtagacttgaaaccgatgctcatcggattacccgcatactggcatgtctgcgtttcctctgccgaagtggagaaatcgatgtcctgtgccgaaatcacaatttggttctcctgcatacgcagtttgataaggctgcttgcctgtgaggagaagatagacacgcgacgcaacgcaccaatcagttgcaggcggtctaccgtcactttatacggattgttctgcggaattacggagttatagttcgggtagcgtccctcaatcagacggcataccatgcgatagctttccaatgtaaccacggcattgcgttcgtcaaattcaatggtcaccgtgccctgctccttcggtaacaggttcttcatcaggttggcaggtttcttgggcaggatgaaagccgcacgctcattgcctttggcggccagcgtcttgcaacgcactaacttatgtccgtcggaagccaccattgtgatgtcttcggtagtaatatcgaaatagataccgttcatcaccggacgaagctcgtcatcggcggttgcaaacacggcgcggttgataccgcccagtaacacctgtgcatccatttccacacgaacggcattctcgcccagcatggccgattgcggaaattcgtccgcattctgccccatcaggctgtatttaccgttctgatactgaaccgtaatctccagagaactcgtattgatgtcaaacgtcagcggctgttcgggaatttcctttaaagcgtccaacaaagtcttggcagtcactgcaaaacgtccgtcggcatcactgtcattcacttctactgtggtaaccatcgttgtttcactgtcggaaacagttaccgacaaggttccgtcttgtagttcaaaaaggaaacaatccaaaataggcagcgcattctttgaattaatcacgcggctgatagcctgcaaatggctggagagcgcagtactcgaaacgataaatttcatatattctatgtatttaagttttaatttcagttcagttgttaactaacggacaaagttaaaaaaagaattccctacggcaaagaaaaaacagccgtttattcgtcgcatatccctaaaaaattgtaacttcgccgcatcatttaaaaagagtacaatggaatttacaggaaaaatcatcgctatactccagcccagaggcggagtttccaaagcatcaggtaacgagtggaaagcgcaggaatacgtaatcgaagaccacgggcaatatccccgtaagatgtgtttcgacgtattcggagcagataaaatagaacaattcaatatccagatgggtgaagagctgacggtatctttcgacatcgacgcacgtcagtggcaagaccgctggttcaacagtatccgcgcatggaaagtggaacgtgtcagcgcagcaacggcagcgcctgcaacgggagcaccggttccgccgcccgctccgtccgcagcgccggaattcttatccggagacgcaaaggacgacttgcctttctaatttgagaattaaaaattgaaaaacaggaatcagtaagttttatccggtaagaaaaggaaggtgtcaaaatacacttgacgatttcttttaggcacggattacgtaaaaaacacggatttcacagaaaaagaataaagaaaatctgtgaaatccgtgttttttacgtaatccgtgcctaataaaaaacaaatagtaagcggattttagttttgacaagccctcttttctatttctcttatttttcaattccctacttcttcaaactcccctattttctctcctttatacagcaagacgagattcggatacaccactccttccgcgcaagtaaactgtatggctatagtgaagtggcggaagaaatcggaatgacggaagaaaaaattcggaaccaaccgcacataagtttccggctggcgcatcatctcttccatatccaccatcatggcaaagttataataaggagaaagactgcctacaccttcctcgtacaccgaagttccatccagcacatccccgttctccaaagcgtccacataagcggagagactctgtgcatcgggcgccagtaacaaagttcctttatagaagcaggcgtatgtgtgaagcgcggattccgtaatgcctgtcagttgtgtcaatacggtattccggggcaacatatactgccggtacttccgtgcacgcgggtatcgcctgtaattcggataggtccgctccacggccggagcgcctttttcttcgggagtagcatacagtaatttctgcagagcacgttctgcctgcgcttcatcttttacagcaacgctcattacagcgcagggatgccggtcggtagtatccttggaatgaaacaggcaagacatgacattctctcccgcgtacgttttcataaattccatccactcgccatcccgcttcttgatataatcggaataagcagccttagcatattcctgctgcgaagtaaagccgaatatggcttccaaatccgagattgcccactggttgtagaaaaaaacagaggccggcagccgttctcccgaaaaatcttttatcggttcctgtctgcgaagcgcattgataaatgtccgggctgtatccgctccgtgactgataccggaacaataaacggcttcttcattgaacttcatgtcaaactctgcccaacttcccagatgcgtctgcggacgaatgccgtctgtattcttgcccatgcccacttctttcatgcgtacatacactgttgccgccacattgttacgcttaccggcatacatggtacggaaagatgccatgtccatcaatgattgtctggaacggcaggcatcgataacctgctctatcagacgcttctgaaagctgacagccagaaagtccggggtgaaataagccgcaagaaaacgcccgtccgccgtgggatagatgcgtatttcctcgccgttgtaatcaaaatacttagaagggaaagtgctggaacagtatttacgcacgaaagactccaccagctcgtaatcccccgcccccaagctgcaatacaacacctgattcaagggagtatccggttcgtggaaactgataagcattttattcatctgcctgctcagtccatgcggcgtatcacctaccaatgtattgaaatacttcttcaggtatacaaaaagttccgatacatacaggaaatgctcatccttgctgcaatgcaagccgtcgatatcttccatcaaatccgccatacggtctgtctcaagtacagccgtggcatcttgcggcactaacgtaaagagattaaaatcctgccggttttccactgcattcattcgcagaaacgagtatacgccaaaacctgtacacagcaatactatggacacaataacggctattcgtataaggattcgaatcttcatggcatacattcgtcaactgttggcaaaaataaacatttatactaataaaacaaaacaaatgtttcaaaaagtttagaaatctatttccataccgtcatacgcaaagtgcacatggggcggcagttggcggtcgatttcggcatgcagccctgcatgatgactcatgtggatgaaataagtttcccttgcgccgatacgttccgctgccgccagcgcttccggtatgctttggtgcgtagagtgcggctgcggccgcaaggcgtttattaccagaacatccagtccctgtaattgttcatacgaagcatccggcatcgtaagcatgtccgttacataccccagccgcctgccgatacggtatcccaggataggcagccgcccgtgcatcacgataaccggcagtatttccgtttctcgcacgtagaaaggcctgcccgcttccacttcctgcaaataaatgcgcggcacacccggatatttcttatccacaaagcaataaggcatccgtgcccgcagatgagcggctgtgtaggcatccgaatagacaggtatttccgagaaacggcagaaagggcgcaaatcgtccaatccgcccacatggtcgtaatgctcatgggttatcagcacgccgtctatccgctcgtacacggaagcacgcagcatctgtgtcctgaaatcgggaccgcagtctatcaatatcaccgcatcgtccgtatgcagcagggcagatgcacgcaaacggctgtcccgcgggtcggcagatgtgcagaccgggcatgtgcagccaatttccggcactccggtagatgttccgcttcctaatatagtcagtttcataaaacagtgattgatgattatcggttaatcattctataaagttcacttccggacaaatttccactccgaatttctcctttactgaggctcggacagcatctgacagggcaaccacatcttttccggttgcaccacccagattcacaagcaccagagcctgcttatcgtgcacggcggcaggacctaaggccttgcctttccagccgcattggtctatcatccatccggcgggtatcttcacccgtccggcatccacctcgtaatgaggcatggtgggatacaagtccagcaacgcttcaaattgcgcacgaggcacgatgggattcataaagaaactcccggcattacccaatactttcgggtcgggcagtttgctttcgcgaatatctataatcacacggcgcaaagtggctaaggtcactgacggatacccggcaagctcctgacggattgtaccataatccaatgtataatgctccttcttgctcagtacgaaattcacgtaagtcacaaagaccgatttcatttcaggctttttgaaaaggcttttccgataggcatattcacattcgtctttccggtaggtacgcttctcgccgcggatgtttatagtttccacagactcgatgaggtctttcacctctacaccgtaagcaccaatattctgtacggcagccgctcctacctcaccgggtatcagcgacaggttctccgcaccgtaccagccctgctccacacagtaagccgcaaaatcatcccatactacacccgcacccacacgtacatgcacctgcccgtcatcttgcgcggtcacttccatgccgccgatgcgcgagtgcagcaccatgccttcataatctttcacaaacaacagattgctaccgcatcctatatgcaaaaaaggagaagtgatgcgcccttcggctatccatttctccaattcctctaccgagtgatattctgcatatacggcagcttttacatcaaatccgaatgtattgggtattctcataagtctcaaatgctcgtatcttcgtatttatacatcttccactcaccgccccgcctgcggaaatagaaaacgttggaatatccgttgccgataccgtttactttcaggattttcgtattcgaattatcctcgttcttctgtccgtagttgatgttggacaacttgtctgcgggcagcgacggacggaaagcataccactggttcacgtcgagagtggtttccagtatggcaaactcatcgtcggggtcgatggtgacaaactgcaacggattggcaatatgctcgctctgatacaagctgtccgtcacaaaacgggtatagaaatccacaaaattctcgccttcaccttcttcgatatgacgcaaatttatggcttcgagcatccacatgcctcgcttacgttcaaaataatatttctttaccatacgcgttttcagataaatccactccacctgtacggatttcaatgcagtatcgcccaccatgtccatgtcgctctcacggtcgaaaagcaatgtataataattctgtttggtaaacaggtagtcgtgcttccagaagcgttcctctatcttcgaaggagtgtcccggttgtaataaggcaaaggaaactccgtccttgcccgttgcaaagcctcgtccgaagcataattgaagataaaatcgtcaaacagttcgtccgcttccaacggttcaggctcctccttcacttctgcctgttgcagcgtatcggctacatgcccggccgaatccaccatttcggtaatggtagcaaagggatccattttcgtctttctgttcccacacgagaacagaaagacgagtataaaaaatcccgttagtaatcgtttcatcctttaccgacctctacggtcatttatttaattttgctcttagtttttcaagcatgtccacagtcatagactccaggtcaaactgcggcatccagtcccattcctcacgggcgcaggagtcatccagcgaatcgggccaactgtcggcaatggactgcttcaaaggatctatctgataggtcatttcgaagtcgggcacatgtttcctgatagccgcataaatcatttccgggtcgaaactcatggaagcgatgttgaacgcattccggtgcttcagccgttccggatcggcttccatcagcgagatagccgcattaatggcatcgggcatatacatcatatccataaatgtacccgcctttacggggcatacgaacttctcaccttttacggcagaataaaagatgtctaccgcatagtccgtcgtaccgccgcccggaggtgtcacattggaaatgattccggggaaacgtaccgcacgggtatccaccccgtatttcgtatgataataatcacttaacaattccgtagtcacttttgttacgccgtacatggtacgcggacgctgaatggtatcctgcggtgtctttacgtggggagtattctctccgaacgaaccgatggagctcggcgtaaacacggcgcaaccgtattcgcgcgccacttccagcacattccacaacccgtcgatgccaatcttccacgccatggcgggacggctctcggcaactaccgacaacagggctgccaggttataaattgtatcaaccttgaattgcctcaccaccacttcaatagactggcggtctgtcacatcggctatggccgaaggacccgaggatttcaactcaccctgcggcatggcgctcggaatatatccggctacaacatggtcattaccatagcgtttacgcaactccaatgttagctccgagccaatctgtcctgtggctccaattaccaaaatatttttcatacaacttatttataaggtattctttcgttactgagtcgcaaatatacacacttttttttcatttttctatcaaaaagatattgtttattccaagaaaaatgatgtcctttgtagagcttcaaataacgaagtattacctattaaaataaaaagctatgtacggtaaaatgaaagaccatctcagcaaaacgcttgctgaaataaaagaagccggactctataaagaggaacgcctgatcgagagtgcacaacaagctgctatcaccgtgaaaggcaaggaagtactgaacttctgcgccaacaactacctgggattatccaatcatccccgcctgatagccgctgctcagaacatgatggaacgccgcggctacggcatgtcgtccgtccgtttcatctgtggcacacaggacatccacaaggaactggaagctgccatttccgattacttcaagacggaagacaccattctatatgccgcctgcttcgatgccaacggcggtgtgttcgagcctctcttcaccgaagaggacgccatcatctccgattccttgaaccatgcttccatcatcgacggcgtgcgcctctgcaaagccaaacgttaccgttatgccaatgccgacatggcagagcttgaaaaatgcctgcaagaggcccaggcacaacgtttccgcatcatcgtaacggacggcgtgttctccatggacggcaatgtagctcccatggacaagatatgtgaccttgccgaaaagtatgatgcactggtaatggtggacgaatcccactctgccggagtagtgggcgctacgggacatggcgtgagcgaactgtacaacacctacggacgtgtggacatctacaccggtacattgggcaaagccttcggcggcgctttgggcggtttcaccacgggtcgcaaagagattatcgacctgttgcgccaacgcagccgtccttatctcttctccaactccctggctccgggcatcatcggtgcaagccttgaagtattcaagatgctgaaagaaagcgacgccctgcacgacaagttggtagaaaacgtaaattacttccgcgacaagatgactgctgccggtttcgacatcaagcctacccagagtgccatttgcgcagtaatgctgtatgatgccaaactgtctcaggtttatgctgcccgcatgcaggaagaaggtatctatgtaaccggtttctactaccccgttgtaccgaaaggccaggcacgtatccgtgtacaaatctctgccggacacaataaggaacatctggataaatgtattgaagcgtttattaaggtaggaaaggaattgggagtgctgaaataggaaatggggtgcacttgatgatttttttaggcacggattacacggaagaaaggataaagtaaatccgtgaattccgtgtaatccgtgcctgaaaataataaatgtttccgtattgcaacacattcctattcttgcaacattaccctatttttcatgcaggcacggtcattagctcgcgccctatttcacgtattgtttctattatttcatcaaaacgttatttagacggtttctttgttccactcacatattgcgcaaacaacgatagcagacagacaaaaaacgggtgataaagcccacgccttaccacccgttaccttaccggttatatttcttacttattttctttcgcccagcttcgcatcaataaagaagattccggctgcaccggctttcttcaccatatccacgataccggcagcggtagcttcttcctctacctgctcgcgaacgaatccccacaagaagtcttgggaagccttatctttttcagcggcagccacgtctacgagagcgtcaatcatcttcgatacgcggcattcgtgttcgtaaacctgctcgaatacttccagcggagtaccgaagtcgttgggaacaacgtcaaccttatccagtttggctttgccaccacgcttgataatatacgatgccagctcacaagcatgtgcatgttcttcaaacgactgcttcttcaaccaggaagccataccacaatacccctctttctccatatagaaagacattgccaaataaaggttggatgaccacatctcagcagtaatctgctcgttaattgcattctgtaatttttctgttatcataattgtatttattaagtaaattgaaatgattacaaatataacaagaacacatgaatattgtttatcccaataacattatttagtaaaaaaagcataacataacctttcacatataacaatcgcattacaatgaaaccggattagggggcaacggatcttgcagaatgatacagcatcaaaacaaggacacacttttatccattcttcgggttctatctcgccgttatgattgaagtcgggactaaggtcgcgatgcccgcagagacggctgccgggataaccacgcagtaacagcataacaagcatacgcaaagagtgtttctgaaaatcggtacgggtagcgacagggcgtccccgttcatccaacccgctctcgcagcaaatacctatgctgtgagcgttatagccgcggcacgctcctcggaatgtttcaaaggacggagcatctttatatcaccgttcttgcagatataatagtgataacctgcgccgaagaagccctggctcaggtggtctgttgtcaaatcatgttcggtatagctacggtcacagcaggtagcggaacagtggatgacgatgaggttggtaaatctcacgtaacttaagtataaggtataaaatatgaaacataattaagcaggcattgcttgtacgcctaaagcacagagaacggcagatgccactacgattacgattttaaggagcttgtcccaccagtttgattttgttgtcataagatttaaattaagggtttcatttttataagttatgttaaaaaaaacgggcacaaaggtatacaaaaaagcgatgtataatacgtatcgaatactcttcgggaacaagccgctatctgcaagtaaacaaatttcagaaaaatgcagtatatttatcgcgtgcggtaatggcgcacgcaaagactgtaaatattataaagccaacagattatgaaagatttaacaacctttacgctttcagtcatacaggaactggaa

SEQ ID NO: 4129 - DNA, 36806 bp, Unknown
  gut microbiota DNA sequence
gtgaccgcatctttgtagcgcgctttgccgagcttgaatttcatatcgtccagagttccggatatattcaggcccagtttgaacggaatgggggatttcaggatggagatgtgatagtcgaacttcatatccagcccttgtgtgccgcctaccgccgctctgtaacggtccattgatatttcgaacggatagacggttacatttccgtctttgatgccgatgtttacggatatgctgtctatcatgtttctcttcttgtttttgaagaagaattttttggagatttcggcgaaagtctcaccgtccatcagcacaaggctgtctcccttgacatgaatggccgaccgcatggtggggattttgatgttcagggcggagtccagggaagcggcggcagccacattgaaatcgaccgttccttcaaatgagcgcagcgtggggacaatcgtgtccagggaaggggcgaagtctaccagcttcccgatgttgatgttgtgcagccggaagtcgaaaccggcaaatccctcttccggagattttgcctgatagacgagggtggtgttcatgtcggaacccatgcctttcatgctgagctgtttcaggtagacggattggttgcggatgtccacagctccgcggacatcgttgaatgtgactttctcgtaatagactttcctgaaatcggtctgcagttcaaaatccaagttcttggggatgacgaacagctttacttcggtggagaccgtatcgctttccgcagccagcgtatccgacgggagcgatattgaccgtatcagctggttgcagtccaattgttcggacgatacgtccagtttggcgcgcaggagcttgtgatgccgcatggcgccgtacaggtcgtgaatcgaaccggtagcggtgatatcggatttgccgatgcgcatggtggcattgcgcagggtgatgacgcggtcgtttaccgtgacggaagttttctgcacctgtatgggaagtgcacattccggggtgcggaacgccatgcggtggaaaccgatgatgcctttgggtgtccatagcgaatcgcgtactttttcggctgttattccgatgcctgctttgtccattcccaggcgggtgtcgcccatgcggcagaacagtgtgtccacttccagtgtaagccttatctgcggattggcagggttgtgctctccaggttgcagcttgaggcgggcggatgattttccgcaaaagaggtcgagcgaatccgccagggatactctcaacttgttcatctctatcttgcattccgtcttggcagggcgcagtgtgtcttgggaaggataggtgctgattgccgccgtaaagctttccgtggctgagttcagggcaggtgagcggagcgtcatatccttgatttcaacacgccctccgagccattcgttgccggcaaagtccagcgtagcgttgcttgtgaactcgaaattcttttgggtatggcgcagcacgagtttgtctgttctgattttgccttgaacctttatccgtccccaatcctgtttcttgagggtggacaggcggcaacgcagtttcaggtcggcattcatctttccatccatgccgatgccttcctgaagagggaaaatctgcgccagcgtattcaggtcgacggtagagcgggtatgaaaggtgatgtccgggtcggtgagcaggttgtccactttcatatcggccaatatgtcggtgtcggcgcctttgaactggaagattttcaggttcaggcaagagggggtattccgcatgaggtctatccgggcggaaaagtcggcgtttaccttgtctatgccgtaaggcagcccggcgtatctggcgaaagcatcttttatcctgatgtccagcgtggcaaggggcatcttctgcttgccgtacatgcctttcagcgtgccgatgaaacttacttctcctcctgccgatacttccgcctttttcaggatgctctccggaatcatgtgcagtacggtttccagcgagggggtgtgcagcccgtattgccagaagagaaggttcttgttgcggaaatctactgccagcatggaatggcctttcttcatattggctttcagggtaaggtttgtgtcccataggttggcgaaaatgcgtgtgtcacggtcgtccatggttaccgtggcgtgctggatgaaaatttgccggatgtcgagctcgctgatgttcatggcgtctccggcaggtgaagaggtggactgtaccgtatccggaacggtgatgtcccagttggcaatgccgtctttgtttttataggcgtagatatcggcatgttccagcgccaggcggtggatgctgattttctgttgccgcaggtagtccatggggttgaccaccgctaccgcctttttgaatgataccggacagtttgagtattttcttggtttgacttttcattttgtaattcgttctgtaaatattgggcaaggagtggcttcctttccttaatcacatgcaaagttataactgtaatttgataaagccgtaagccggtattgttaaaaaatgattaaaggaatttatgaatgatttttccgctataatgaataattgagttctttttttatgttaaagcgtgaataaatgctgcttaaattttatatttgtaccgttggtatccggttacgctgccttatatataaggtgtatcgggatgccttaagtttaatctaataaattgatgttatgaaaaagtacattgcagaaatgctgggaaccatggttctcgttcttatgggctgcggcacggcagtcagtctgtcgtgcacatcggccgaccctaatctggcggccacggtaataggtacggcgcttgctttcggattgtcggtggtggctatggcctatactatcggtggcgtttcgggctgccacattaatccggcgataacgctcggttgcctgctttccggccgtatgagcggaaaggatgccggtatgtatatgctgtttcaggtaataggagctattttaggttctgccgttctttgggtgctgacttccaattcgggtgtgagcggaacaggcgccaatgcctgccaggaaggagtttccgtaacgggcgccctactggccgagattgtgtttacatttgtgtttgtactggtggtattgggcactaccgatgccaagaagggcgccggtaattttgccggacttgccataggtctctctttggtacttgtacatttggcctgcatccgttataccggtacttcggttaatccggctcgcagtataggccctgcgctctttcagggtggagaggctttgagccagttgtggattttcattgtaggcccgtttatcggtgcggtgctgagtgccggggcatggaagatagttgccggcggaaaggaatgagccggtgcctggcctgaaccgggccggtgatatttgaagaggatatttaaagaggatgtttcccgattgcggcagaacgcagtgtttggggaacatcctctgtttttttactctttcgactggtgtacggtgagttgcgggaacgggaatccgataccttcttcattgaatgtctggtagacgatttcgttgatatcgtacagtacactccagtagtcggcgctttttacccatacgcgtaccgtgatatcgacgctgcttgcgctcagtgaacctaagacgatgagaggagcgggggtgtccaatatgcggctgtctgcattgatgatgcgttgcagcacggctcttactcgcttcacatcctcgccgtactctacgccgaacacccattcgacacggcgcttgtcctgcttgctgtaattggtgacggcattgccgctgaggcttccgttgggcacataaatcatacggttgtcgagggtggacagtatggtgtggaaaatctgtatttcctttatcgtgccgcttattcccggtccgtctatgtagtcgcctaccttgaacggcttgaaaatcagtataatcagtccgccggcaaagttggacaggtttccggaaagcgccatacccacagccacacctgcggatgcaagcagcgccgcaaagctggtggtttccacaccgagtttgccgatgatggcaaaggcaagaatcatattcagtagaatctttatcaggctcttcaggaaggtctgcacgctggtttcaatcttccgcttttcgagtattctggctaccaacgcgcttatctgcctgatgatgaaacgtccgattacatagattaaaatggcgattaatatgtccttgccggcatccattccaaaatctatcagtttttccaatgcctgttcgagtttcccaccggtggcgggagtgttcaataaaagtaaattcatttctttttcgcaataaataaaataatattataaaataggtgtatattcagcatgcaaagataatcaaaatccgggcggttgtggcgtatgaaatatataatgcgtattatttcctaaatagaattaaaacattaattttgccgaatattacactctaacttaaataaattaataaaaaatgaacgtatgaaaaaagtattaactttattcggattgctttttgtgctgttgggtagtgcccatgcacagaaaggaaaacaggcgataggttttggcctgagttacggaacggaaatcgaaagtatcgggttgggtatcaagtatcagtacaatattaccaatcctatccgtatagagccgtctttcaactatttcttcgagaatgacaatgtaagcatgctggatttgaacgtgaattttcactatctgtttccggtggccaagagcgttaagctttatccgttgttcggtttgacattgtccaactggatgttcgacatgcacgactttgatattgatatggacgaaggccatgtgcatatcgacgataacggcaatcataacgaatgccggttcggtgtaaatctgggagcgggagcggaatttgcactgcctcgtaactgggcgatgaattttgagttcagataccagctggtaagcgatttcgaccagggggttatcaatataggagctgcatacagattctaagggagcagcgtatattttcgggcacggattacacggatttcacggaattcacggaagaagaataaagaaaatccgtgttttccgtgtaatttgtatttccgtgcctgaaaaaaatcaagtgcattttgcacgacctcttataatgttaaagagagagtctaatgccgggctcgggtttgcttaggagcgtgccttgattttatccgcgaattttttccagccttcggccgttttgtaggcttcgacggcttgtgcgggtacggaaatgcttgttatggtttccggaaatccgtaccattcgccttcggaagtggcaggcggtgtgagggcttccacaatgacctcttttatgccggtattgtcgaaagcggaaaaatcgatgcgggtgacgcgggcgggaatggtcagtgtatgtaccttttggttgccggttatcaggccttgccccaggatgcttatgctttgaggaatttcaaagcgggcaaggttggggcagcctacaaggcagtgctctttgattacggcatccggatggttgcttgaggcaggaccgtatgcggatacttccgtcaggttggggcataggtagaaggcacgtgcttctatggtggagatgctgttgggaagttgtacagtggtgatgccgcttccccggaatgcttccataccgatatgtgtgacgctttgggggattactgcggatttcagatgttccgtcatcatgaatgcttgtgttccgatggctgtgagtgcagacggcagtaatacttcttctactccggagcatgcgaaagcgctttcgggaatccgggtgatttgggtgtgcgagaggtcgacccgtttcagccggtcgcagtagtagaacaggtccggtgcaagttgcttcaaggtggacgggaatacgatttcctgtatgccggagttgaagaaggccatttcgccgatagaggtcagtccctcgttcatcacgactcgggtgatttgcctgttctgcataaaggcttccggtgcaatggctgttacgtgtgggggaagggtgatttcgctgtatcctttatatatttctgtcagtacgccttcctgtacgcggatgggagcaatgctgacggtgaaggttgcctgacggtcttctatgccgatggtcagtaccagccggtctgccggagcatcggaagaaaagccgctgacttgttccggagttacagtgacgggatattctttgccattactatatacgccggtcagcaggagtccgtccaaatcgagtggttctcccaaagtatatgcaattttatgaggcggctgtgcaatggacagcccgatgagtgttcctttgtcttccggctgctcttctccgggggcgagggcggaagtcaggcggatttcaagctgtatgtcttttccggcatctatcgttttcccaacggaccatatacggtagttgttcggaccgccgccttcctgtacgacaaatgtcaggaagcgctgcgattgtccggagaaccatacttcgccgggcagcgtgaacagggcgataccctgcgcattggcggttgcgccggcagtgggaggcgtgaggttatcttgctcgaatgccttgtagtctttttcgtcatacatctttacgggaatgccgggcatcgcttttccgttttcgtcataaacggttacgcttacacggctttcttttcctgtgtgctgttccttttcgcatgctaccgtcaggaagaccgcacatactaaaaaaataatcttattcttcatattcttacacatttttaatcgtttttccggttgcaaagatagtgaatacggctcttccgggagttacgatttgaatgcgtaagtctaacaggtacgtttttatactactgttttacagtgtattatgaaatgaggctttgcctttttctaacacggctctgacatctatccgaaaagggataagaacagatcggtatggggtgttccggcagttttgatgcgcgacttcaaccgggattttcgggcatatatgtttgccacgctctctttcgtgaacaagctgattacctgcggggagaatccggtgaagatgtagcagagcaggcggatgtcattttctttcattgccggaaagtcctgccggagtttctgcatgacgttgtcatggcaggtatctgccatttgttcgagttcccggagcatttcactgttttccgagaagtcggtgattatccgttttacttcctgaaacatggctgcctgttgcgatgatgtattctcgcgttcgtaataggtttttccgagtttgtcgaggatgtcgaaacgggaagcaaccaggcttttcagccgtttttccgtgttctgccgtccttccagttgccgggtgagcgcccggtattcggcacgggcctcttccgccagcagcaggtagcggtcgttgcgttcgcgctggatgcgcaggcgctggcggatgatataaacggctattccggcgaggatgaatatgccgcaggtaacggtggtttcccagaagatgcggttcttcatccggtattcggcaaaggcggattgttcctggaaatactctttctccgttataccggcggagacctgcatggtggagcgggtgagggagtccgtgagatagatatagcggtgtatatggtcggtcgctttccggaagtttccggagagggcctctatccggtaggctgtgtattgcagttcggccaggtcgagcacgtcattgtcttgcgcctctgccagttgcaggtagtggcgcgcgctgtccgtacggtgtttgaggagctggacgtccaccatggtgtgtgcgctgtagcgggatgccttgcgtgctgactgttcgatgcgttgcagcaggtcttggggaatttgttttctgcccgattttacatagagggaggcaaggttgctgagggctgctccggcaagacgttcgtctgcctgttcgtcggcaaggtcgagggcggcggaatacagcctgatggcacgttccaaatctttctggcggtaggatgaggctgccatatcaagcgtggcttccgtttccttacgaagactgtcggatacttgaaaattttctctggcctgcttgaagtagtggtaggcgcggacgtagttcatctgtccgtagtatatactgccgatgcgttcgtagagaagccctttattgtaagggtcttgccggctttgcagctgctcttcgatttgcaggaagatgcgcaaagctccggatttatcgccggcatcggtcagcaggctgtccgcgaactcaaggctggggagcggtttacgttcatggcatcccgccagcgacaggagcatacatataataggtatgataaggcatttcatgccgtgaatgtagtgataaaagatgttttgcacaagtgaaaggcgggaaatgaggagctttgtgtgaatttcctgcatttctttttttaggcttcgcggaacttcctatctttgcacttctaaatgtagataaaaccgtaacactttggaatggctatatagtttgtttgtcgaacactccgcattgcaggcggtggtggtgctctcgctgatttccgctatcggattagggttggggaaaatacatatttgcggtatttccctcggcgtgacgtttgttttctttgccggtattcttgccggacatttcggactgtccattgacccgcagatgctgaactatgcggaaagtttcggactgataatttttgtgtatgcactgggactgcaggtggggccgggctttttcagctctttccgcaagggcggggtacagttgaatatgctggcgctgggagtagtgctcctcggtacgctgatgaccgtattgggcagttataccctgaatatttcgttgccggacatggtgggcatcctctgcggcgctaccaccaatacgccggcgctgggtgcggcacagcagacattgaagcaaatggggctggaagccagtacgccggctttgggatgtgccgtggcatatccgctgggggtagtgggcgttatttttgccgtgctgataatacgcaaggcattggcgcgtaaggaagatctggagttgaaagagaaggacgatgcgaacaaaacttacattgcggcgtttcaagtacacaatccggccatcttcgataaaagcatcaaggagataggcggcttgaattatccgaagttcgtaatctcccgtctgtggcgggacggcaacgtaagcattcccacttccgagaagataatcagggaaggagaccgcttgctggtggtgacttcggaaaagtatgctccggcactgaccgtactgttcggtgaacaggaacataccgactggaacaaagaggacatagactggaatgccatagacagccagctcatctcgcagcgtatcgtggtgacacgtcccgaactgaacggaaagaaactgggttcgctgcacctgcgcaatcattacggcatcaacatcagccgtgtgtaccgtagcggcgtgcagttgcttgccaccgcggaactgactttgcagttgggcgaccgtctgacagtggtaggtgaggctgccgccatccagaatgtggaaaaagtattgggaaatgccatcaagagcctgaaagaaccgaatctggtagcggtgtttatcggtatcatcctgggtctggctttgggtgcgattcccatttccctgccgggtatcagtgctccggtgaagctgggacttgccggcggaccgattatcgtaggtatcctgattggtacgttcgggccgagaatgcacatgataacctataccacacgaagcgccaacctgatgctccgtgcattgggactgtcgctctacctggcttgtctgggactggatgccggagcgcatttcttcgatacggtgttccgtccggaaggcctgctgtggattgccgcagggttcgtgctgaccgttgttccggtgctgatagtgggagtggttgcctttaaatggatgaaggtggacttcggctccatggcaggtatgctgtgcggaagcatggccaacccgatggcgctgaattatgccaacgacaccattccgggcgataatccgtcggtggcttatgcaacggtgtatccgatgtgtatgttcctgcgggtaatcatagcgcaggtgctgctgatgttcctgttgaattgagagctgagaattgaaaattgagaaataacagaaagagcttaattgctgataattgaatatatatcataaatctaaaatcataaatcgtatcatgggaactattactccggaaagtatagtaaacgacttacgctatttgcaactgttgtcgcgcagttttcctaccatcgccgatgccagtacggaaattatcaatctggaagctattctgaatctgcctaaaggtacggaacacttccttacggatattcatggagagtatgaggcttttcagcatgtattgaagaatgcttcgggtgcggtaaagcggaaggtgaatgaaatcttcgggcatacgctgcgcgaaagcgaaaagaaggaaatctgtacgctgatttattatccggaagagaagttgcagttgataaaggaacaggaaacggacctggacgactggtatctcatcaccctgaaccaactagtgaaagtctgccagaacgtatcttccaaatacacacgctcgaaagtgcgtaaagccttgccggcggagttttcctatatcattcaggagttgctgcacgagtccagcgtagagcctaacaagcatgcgtatatcaacgtcattatcagtacgattatctcgaccaagcgtgcggatgactttatcattgccatgtgcaagcttatccaacggcttacaatcgactcgctgcacatagtgggagatatttacgaccgcggtccgggcgcacatatcatcatggatacgctttgcgactaccataatttcgacattcagtggggcaaccatgacatactgtggatgggtgccgcatcgggcaatgacgcctgcatagcgaacgttatccgtatgtccatgcgctatgccaacctggcaacactggaagacggctacggcatcaacctgctgccgctggctaccttcgcaatggatacctatgcggatgatccttgcactatctttgctccgaagatgaactttgccgatgccaattacaacgaaaagacactgcggctgattacgcagatgcacaaggcgattacgataattcagttcaaactggaagcggagattataaaccggcgtccggagtttgatatggacaaccggaaactgctgcacaagattgactttgaacggggcgtatttgtgtacgaaggcaaagaatacgaactgcgcgatgccaatttcccgactattgaccctaccgacccgtatcgcctgacggatgaagaaagggagctggttgaaaagattcatgcttcgttcatgaacagcgagaaactgaagaagcatatgcgttgcctctttacgtacggcggcatgtatctggtgtgcaacagcaacctgctttatcacgcatccgtgcccctgaatgaggacggaagtttcaaacatgtacgtatcggcaagaaagagtactggggacataaactgctgcaaaagaccgaccagcttatccgtaccgcctactttgacgaagatggttcggaggagaagaattttgcgttggattatatgtggtatatgtggtgcggcccggatgcgccctctttcgacaaggataagatggctactttcgagcgttacttcatagccgacaaggcattgcataaagagaataaaggttattactacacgcttcgcaaccgtgcggatatttgcgacaatatcctggcggagttcggggtggagccgggacctcattcgcatatcatcaacggacatgtgccggtgaagacgattaaaggcgagcgccccataaaggctgatggaaagttattggtgattgacggcggtttctccaaagcctatcagcccgaaacgggtattgcgggctatacgctggtatatcactcgcacggcatgcagttggtgcagcatgacccgttccagagccgtcagaaagcgattgaagagggacaggatatcaagtccacaactttcgtcatagaattcaactcgcagcgtatgatggtgaaggataccgataagggcaagcagctcgtgacgcagattcaggatttgaagaagttgctggtggcatatagaacgggatttatcaaagaaaaggagattttctgatatggctgtatgttccggtgcttgcattgcctggcttttcaggcacggattagtatttgaataataccacaccgccttctacaatggctcccttgtcgaagttggcatttctgttgtagtatctgtcccaaccgtaaccgcccgtaacgaatactcctaattttgccgtcagacggtattcgaggttgatacgggtttggagagaatagaggcgggcagggaagccatagtctttattcttgaaggtttctacgtgctggtatcccaaatcgccgctgatgaacagttgcttgcagacgggcaattccagtccggcgcggtagaaaagcgcaccggagaacttatcgctgaagtcgaggaaatgcgtaccgccgccgaggatggtatagaacagtttgttcttgaagcgggctgcaaggttcagtttcgtggtgttgccgccgaaaaacatcatctgtactttggtgtccgggttggcattgaccagtcccagttggaaaccgtccagcttctccttgtagtagtttaccaaacctatctgaaggcctttggcacggacggctacattcaggggagagagctgcacgccggcagacgtaccgcctgtaatattgcccagaccggaaatctggagccctttcatatcatcgcccaccacattcagcaggccggatatggtgacaccggaaaaattgccgcccgatatattggcgagtcctgaaagctgtacgccggcagtcttttcgcctgtaatgttcagcaagccgcctacaatcattccgttgctgttatcgcccgtgatattggcaaggccggagaaaaccattccccgtgcgtgattacccgtgatgcccacaaggccggaaacggacagaccgctgaggttattgccgttgatattggtgatgcccgctacctgtacgccccgcatacttccacccaccatattggatataccggagatttgaactccgttcatgtctctgcccgtaacagctcccaaaacatttactcccaagccgttcaaacggtttatcgccgagaagataccgagattgaagaatgtgcttccgaccgtatccgtacgctgtgtggaaagattcttccaaagggaaaggttgataccggttttttctttatgggcagactgttgcctgcctgtccgggcatggcctgtccctgccaatagcagggacagacagataagtggaaatatacgtttcataattctttataatgtttcatcgggccagggcgccagccggttggtggcacgtaatacaggacgctgcgcatccaccgaccgcagatagttgctcagcttttttgatagtttctttacaagtttggggttctcggcggctacgtcatgtttttcgctgatgtcggcagggatattgaacaattcgtgcttgccgctgtcgaagtagtacaccagtttccattctccggaacggatggagcaggtggcgcctatacccggaccggaagggccccaactgtgcgggtaatgccagtagatgtcacgggcgggcattttacctttgcccgtaagcaggggcaggaagttgatgccgtcgcgtttctgtaccgtattgtagtgctccacaccggctatttcgagaatggtggggaagaaatcttctatcatcagataatggtcgcatttggtttctgccgctactacgccgggccagcgtacaatcatcggttcgcgcactccgccttcgtaggcggaaccttttccgctgttgagcggatagttctgcctgtgcagctctcctgcacgggtgtgtgcagtcagtccgccattatcggacatgaagagcagtacagtgttgtcggtgaggttgtttttgtccagatagtccatcaggtcgccgaggcttttgtccatgccttcaatcagggtggcatacgctgcttctatcgggggaagtcctttgtccagatatttttggtagaaacgcatgtcgggctggataggcgtatggatggcataatgggccatgtagaggaagaaaggcttgtccgttgtccgggcgttgtccaaagctttctcggcttctatggtaagggcttcggagaggaatacgtctttgccatgatatttttccagtccgggtacggcagccagcgggctttttccgccgggtttgtttccgaagttctgcatgccgtagtagctggcgggagagcctgccgcatggccggctatgttcacgtcaaaacccattttcagcggatcggctccgggcgtgtcattagctccgaagtgggctttgccgcaatggatggtgtggtaaccgttgtccttgagcacttgtaccagcgaggtgacttgcgtggtgcgttccacacccggttcctgacagataccgttgacattccattcggggtatatcataacggagtccggctgttcgtgggtggtattcttgcgtaatgtccagcttgtcacccggtgacgcgcagcgttcatacccgtaaaaaggctgacacgcgtaggcgaactgatgctacaggcataggcttgcgtgaacatcttgccctgctttgccagacgttccatattgggtgtatggtacgtgtcgttgtagcgggtgcgttgtgtccagaaaggcagggatgtgtcctgccaacccatatcatccaccaagaataaaataatgttcggacgcttgtccgtaacaggagccgtttcatttgacggccttgtgtgtacttctcctgccattccacataacggaagcagcgcagcagataataacaattcgtttttcatcgggaaaagaggggttagggttagagattagtgattagcggttagtgattaacattaaaaatagcggtaaataattagcgcaatatgctgcatagcttactaatcactaaccgctaatcactattttatcatccttttgcttcctgatacaggaagcgtttgatagattttttgggtgtcttttcaaattcttcgggatatatcttcattttggaaatctggctgtaagcaggcagttctgcattcagagccacacgattctcttccatgacacgttctatatcgtcgttgttgaggccgtgggcaaaggcatcgtcaaagtcgggatataccagtcccacgagcttttcgttctgctgtacgatgatgctttcagctacgtacggcaggttgttcagcttgtcttctatttcttcggggtaaatgttctgcccgtttggaccgaggagcatattcttgctgcgtcctttgatggtgacattgccttcggcatccatcagggcaaggtcgccggtgtgcagccaaccgtctttgtccacaacttcggcggtagcctcttcattcttgtagtagcccagcatgacgttgggaccgcggcagacaatctcgccggggatattctccggatcgggagagagaatcttcacttccatgcgcggagcggcttttccgcaggaaccgggtttgaagcgcgtccagtcttcgtaacagatgataggaccgcattctgtcataccgtaacccacggtataggggaagtctatcatgcgcaggaactgttccacctcctgattgaatgccgcaccgccgacaatgactgtggcaaaattgccgccgaatgcctgtaccatttgctcgcgtacggtggcttttatcttgtcgttgatgataggcactttcagcaacagtttcatggtaggcgtttccagcttgggcaatacgctcttcttgataatcttttcgataatgagcggtacggctacgatgaggttcggctttatgtcggcgaatgcctggaagataatcttcggacttggcatacgggtgaggtagtagatgtggcaacctacggagaactcatacaggaattcgaatgccaatccgtacatatgagccatcggcagcatgcataccagtttgtcgccggctttcagcggcagtacttcgaaagcgaatcgggtgttggaccacaggctgcgataggggagcattacgcctttcgagtaactggtagtaccggaagtatagttaatgaccgccagctcttcgggttggtctttgtgatagtcgatgtgttccttacggaagttcttgggaaatttcttgccgaatatctcgttgaggtgatcgcgggcgtaagtaacccgttcgttgcgcgagaccagcaaggtgaagtccgtcatcatgaagataccttcgagcaacggcatggcgctttcgttgagattttcccacacctggtcgccgacaaaaagaagcttggcctcggagtggttgacgatgttatgcacattgtccgccttgaattcgtgaagaatgggcacgatgaccgcaccatacgtcagggtagcgaggaaagtgactccccaatgcgaactgttacgtccgcagacggcgattttatcgccttttctgatgccgctcgcttcaaaaatgatatgcagtttttctattttgcgggctacatccttgtattgcagggtggctcccttataatcggtcagggcatccaggtcccagttttcctttatactattctctatataggcgataaaactttgttccattatatattgcacatttagttgaaaattgtgcaaatataagggtttatgtagagaatacaaacttttagggggaaaaagcattttatgcaaattccccctttgagcctatttattgttatccaggtaccagcggtacatccgctctacaccttcttcgatgtctattttatgatgccagcccaatgcgtgcagcttactcgggtcggtgagtttgcgcatggtcccatcgggtttggaagtgtcgaaggtcagctttccgcgataacccacaacgttgacaatcagttcggcaagccggcggatagtaatttccttacctgtgccgatgttgatgtggcagttgcggatgtccttgtctccgggttggcaggtgtctttgaagtctacgtgctccatgacgaatacgctggcatccgccatttcctcgctccagaggaattcgcgcaacggagttcccgtaccccaaagccggacttcttcttcgctgatgccgtatttggaaagtatgttcagtatctctccgttgctgttgctgccattgattccttctaccggacgcaggttcatgtcacggcgtacggcatcccagtcgccttgttgcaggcagtgggccaggtgtatcttgcgaatcatggcaggaagtacgtggctgcgttccaggtcgaagttgtcgttgggaccgtagaggttggtgggcatgacggcaatgtagttcgtgccgtattgcaggttgaaactctcgcacattttcaatccggcaattttggcaatggcgtacggttcgttggtgtactccaggggcgaggtgaggagtacgtcttctttcatcggctgttcggcatcacgcggatagatacaggtgctgcccagaaagagcagtttcttgacattgtggcggaaactttcgcctataacattctgctgtatctggagattcttgtaaatgaaatcggcacggtagatgctgtttgccatgataccgcccacgaaagcagcggcaaggaatacgtattccggctgttcctcatcgaagaaacggcggacggcaacaccgtccagcaggtcgagttctttgtgggttctgcccacgagattggtatagcctttctcttgcaggtttttccagatagcagagcctaccagtccgcgatgccctgcgatgtatatttttgcgttcttgtgtaacattgttataaaacgaattggtttcagacagaagaacaaaaggacatattcggtttatactcttttattttctcatatatatgttcttttgttcttctgtctgaaaaattaaattatctgtttcagtcttctttgcttctcaaatgcagtttccgtacaaacttcatgtcatgttccgccatgatgtgtaccaactcctcaaagcttgtctgctgcggattccagcccagtaacgttttggctttggtagggtctcccagcaactgttccacttcggaaggacggaaatatttgggatccacctctaccagtaccttaccggtttggctgtcgatgcccttctcgttcacgccttcgccttcccagcgcagttctatgccggtttccttaaaggcaagtgtggcaaactcgcgtacggtgtgcatctctccggtagcaatcacgaagtcttccggcgtatcgtgttgcaggataagccacatacattccacatagtctttggcatatccccagtcgcggcgtgcatccagattgcccaaatacagtttgtcctggaatccttgtgcaatgcgggcggcagccagcgtaatcttgcgggtaacgaaggtttcgccgcggcgctcgctttcgtggttgaagagaatgccgtttacggcgaacattccgtaactttcgcggtagttctttgtaatccagaaaccgtattgcttggctacgccgtagggactgcgcgggtagaaaggggtagtctccttctgcggcacttcctgcaccttgccgaacagttccgaggtagatgcctgatatatcctggttttcttttccagaccgagaatgcgtacagcttcgagcatgcgcagcgtacctatagcatctgtttcggcggtatattcgggtacatcgaacgagacctttacgtggctctgtgcagcaaggttgtatatctcgtccggttgcacctgctggataatgcgtatcagcgaactgctgtccgtcatatctccataatgcaggttgatagttcgcttctgcttcatgtcgcgcacccactcatcgaaatacaagtgctcgatgcgtccggtattgaacgaagatgagcggcgcaatatgccgtgtacttcatatcctttttgcaacaggaattctgcgaggaacgaaccgtcctgtccggttattccggagattagagcttttttcattgtttctggtattatactttttttgattgttgcatatttcgtcctgcaaaaatcgtaatttattgtgagacaacaaagccaatgcggtaaatgattttgagattatttttgctttataccgagagttgcgtccggatgattgctggaaagcggatatgacatcgtttttctgtgtcaatcctttatgaaaaaatgaattaatttcaaatttgatacgaacaaacagacgttattttttgttttaataacaaagataaattatacaagtatatggagaatttaaataaaacagacattggactgatagggctggccgtgatgggcgagaatcttgcattgaatatggcggacaagggctggcgggtttcggtttataaccgtacggttccggggattgaagaaggtgtggtagaacgttttataaacggacgcgcacagggtaaaagtattgaaggatatacggatatagctcgttttgtggagtctgtagccgttccgcgcaagataatgatgatggttcgtgccggtagtgcggtagacgaactgatggagcagcttttcccgttgctctctccgggagatatattgatagacggcggcaattccaattatgaagataccaatcgccgtgtggcattggccgaagcgagaggcttccgttttgtgggagcaggtgtttccggcggtgaagagggtgcattgaatggagcttctatcatgccgggcggttcggtaagcgcctgggaagaagtgaagcctgttttgcagagtattgctgccaaagcatccgacggcacgccttgctgccagtgggtgggaccggccggttcgggacattttgtcaagatgattcataatggcatcgaatatggcgatatgcagcttatttccgaagcctattgggtgatgaagaacctgctgaagctggataacggagaaatgtcttcggtcttttcgcaatggaatgagggcaaattgcgtagctatcttattgaaattactgctaatatcttgcagcataaagataagtcgggcggttatctgatagataaaatactggatacagccggacaaaaaggtacaggcaaatggtcggtaatcaatgctatggagcttggtatgccgttggggctgattgctacggctgtttttgaacgcagcttgtcggctcagaaagaactgcggaagtcggctgccgggcattttacctgccggcgcacggaggtggtatacaacaaatccgaaatggtaggagatatttattcggcgctttatgcatccaaactggtgtcttatgctcaaggctttgctgtattgcaacgtgcttcggactctttcggatggaacctcgatttggcttccattgcccgtatgtggcgtggcggttgcataatccgcagtatcttcctcaatgatattgcagcatctttcgaggggaatgagaaaccgcagcatcttcttcttactccttatttcagcaatgagatgaaacaactgctctctggctggaaacatctggtggcacaggctatgaaagaggaacttccggttcctgcattttcatcggcattgaattatttttattcactcgtctccgccaacttaccggcgaatatgattcaggcacagcgcgattatttcggagcgcacacctttgagcgtgtggacggactgcgtgggcagttcttccatgaaaactggacaggacacggcggagaaacgaagtcgggaacctataacgtgtagtctttctttagtgtgaagattactgaaattcccctacaaacataaagctatgagtaaatttgtgatgataattttcggcgcttccggtgacctgacaaagcgcaagttaataccggcattatataatctgtacaaggataaccgcctgccggaaggttttgctgttttaggcatcggacgtaccggataccgggatgatacctaccgtacttatatacggacggaaatggaacgttttgtggcttcggaagaacatgccggcggacgtatgactgatttttgcaatcatctgtactatctttcgcttaatccggccgaggctgccgattatggaaatctggatgcccgtctccgggaactgacgggtgagcaggagccggatggcatgttgtactatctggcaacaccgccgtcgctgtatggtgtgattcctcttcatcttaagactgcccgcctgaaccgtcctcatacgcgtatcatcgtcgagaagcctttcggttatgatttggaatctgcccgtgaactgaaccgtatctatgcttccgtattcgaggagcatcagatttaccgtatagaccatttcctgggtaaagagactgcgcagaacattctggcttttcgttttgccaatggcatcttcgagccgctttggaaccgtaattacattgactatgtagagattaccgcagtagagaatttgggtatcgaacagcgtggagggttttatgaaggaaccggagcattgcgtgatatggtacagaatcacctcattcagttggtagcgcttaccgcgatggaaccgccggcagttttcaatgccgataatttccgcaacgaggtggtaaaagtatatgaatctctctctcccttgacagaagaagacctgaacgagcacattgtccgtgggcaatataccgcgtctgcgaccaagcccggttatcgtgaagagaagaacgtagcttccgattcccgtaccgaaacttatattgccatgaaaataggcattgacaactggcggtggagcggcgttcctttctatatccgtaccggaaaacagatgccgaccaaggtgaccgaaatcgtggtacacttccgcgagacacctcatcagatgttccgttgtgaaggcggccactgcccgcgtgccaacaaactgattctgcgtttgcagcccaatgagggtattgtgctgaagttcggaatgaaagttccgggaccggggtttgatgtgaaacaggtgatgatggacttcagttattccgatttgggcggtctgcccgccggagacgcgtatgcccgtctgattgaagactgtatacagggagaccagacactctttacccgtagcgatgccgtagatgcgtcatggcgttttttcaatcctgtgctgaagtattggcaggaacatccggatgcaccgctttacggttatcccgtgggaacgtggggacctttggaaagtgaagctatgatgcgcgaacatggggccgaatggactaacccgtgtaagaatttgacgaatactgatgagtattgtgaattatgaaaagttatgtatatcctgctgcaacctcgactgcacgtgctcttatccggtatataatcgatatgatgaaccgggagccggagcggattttttaccttgctttcagtggaggaacgactccttcccttatgtttgacatttgggcgcatgagttcagagaagagactccttggatgcggatgcggattttctgggtggacgaacgttgcgtatccgtcagcgactcggacagtaattacggtactatgctgcgtttgctgctgcaagaggtaggcatgcccgatgaatatgtataccccattcatggtgattgccgtagtccagcgcaagaggcgaaacgttattcggatttggtttccagtacggttcctttgcgccggggtttccctacctttgacatagtgctgttgggagcaggtgatgacggacatacttcttccatttttcccggtcaggagtatctgctctcttcttttcatccgtatgaaaagagcataaatccttataacgggcagccgcgtattgccatgacgggatgtctgctgttcagtgccagaaagcttatattcttgataacgggcaagaacaagacggaagttgtttatgacattctgaaatcgggcgatacgggtccggctgcctacgtggcgcatcatgccgcggatgtggacatctttaccgacatagaaattgacggataagcggttatccttttgaggttccgctttccagtatgcttacgatggagaagagtgtgaagcagataccgcccaatcctgccagtacacgtgccggtacaaagtagacttcgtgtatgcttgccatttcaaaaaggaaagcagacaggaacagacagagcagtgcggtaaatacgggtatcaagggaattcggtttgccagtttgaaagtgttgcgccatattgctgccaggagtatgactttgcttgaaatgctgtagcaaaccaatcccaggcctatcattatataccctatggaagattcggcagggttcgggtttttcagtatcagtagcccccaaaggatgctgagtgttcccatggcaagtaccattacaggccaccatttacgttctgcatgcgagtagctgttacgtatttggcgtacgatagttgccaccagtgccacgaggcttgtacagatgcaggctattcctgccatgacatgccctgctacataataggcgttgtgcacatcgctttttgcaagcagaaggaatgtccatatccaagtggcaagtgccagcaatgccgcaacaactataagaagcttaccttgtgtgccgttaaaggcttgtgggagcacattgttttccgtcgtttgggaattggcaggtataagggtgaaccgggtggaagaagtggcggtcgttgccacacaggcagtgatgaaagctacgccgcagattacatgtccggctacgaaatgactggcggtggcagcttcgctgatatattcccagccgcagatgaaagtcagtagggcagccagatagccaagcacgggcagagcgtaccggacaaccgtattgtatgtgtgaataatctgccggataatggtagccgctgttgcaaacaaggcaatgcaaatcattcctaatgacattactaccggaccggcaacgttttttgccgggtccgttcccatatcaagtacaaaagctccgtaaccaaaacaaaacagggccatcagcagagagatggtgcgaaagagaacactgattccgtaattcataattattttctattaaagttttcccctctaacagcagtattatgactttgtttctcattttaaactttattcataggatataatactttgacagtccggtttagggtgcaaggcggtttatctcccatttttcggagtttggacacgataggccggaagcggacttttcttcgtggagagtatattcgaaacggtcgtgcagcctgctttcccgtccctgccagaattcgaagcgggtgggggtgacggcaaaaccgccccagttgtcgggacgtggtacggtctgtccggtcagcctggcagcttcctttacaaaagcgcggattatttccatccggctgctgatgacgtgactttggggggatattcttgcgccgatccggcttttgtagggtcgggtggagaagtaagcgtccgattcttgaggagtgcatttctccgcttttccttcgatatgtacttgtctttccagcttatgccaaacgaaagagagggagatgtagggattggctgtgagttgccgtcccttacggctttcgtagttggtgaagaagatgagtttaccattttccacgcctttcagcagtacggtgcgggtagagggccgtccgtccggtgagacggtggctacaatcatggcggtcggttcgttctcgccgcaatgcagggcgtcgttgagccagcgggcgaattgctcgaagggattctctgagatagtattccgggtgagcttgccttttttatattcttttcgtatgtccgagaattgggaattcatataattactgtttattattataacaatgaaagagcgaaagggttgaaatacggatacgttgaccgctaaaaatatctttttttcttctttttttataattgtaatgataattcttctcagtttcgttatgtgtttccgttctataggacgattttatgtaaataatgtttatatttgtacttcaattacaaacattgtttatatgagcgacagacaacaattcattatagattgcacatctcttattcctgttataggaactttggttttaataaaaatagctaacgaacaaatggttaccatggttgctgcttatgtactttgtggcgaacttttgggtgtgttgatcagtaggatattgaggttatattatattgatgtggctttcgtctggttgggtggaattatgctttggctgtggtattggttcggagtacagcccagctatatggggtgatagagcatcagctgcaagtgtggataggacgtcttgtaattcaagttatcaaatggacagacgattaatcggaagaagttgatattcataaaattagtatttaataggtctataataaaagcacttccaacgttcgcttacggaggaagtgctttacacaaaaactaaactagacttaactaaactattctattgggggagtttcacaactcctatctgttcgcggcaaaggtaaaaaaacatcttttaatatgcaataggatattattagaaatagcccgatttcaataaaatataaacctataagggtatttttaactccttttattaagaaaatcttggaatatttgtttataactgtcactgacggggatatagttcttgccaaagacaatacgtccacggtcgatgatacgtattttgtctttttggacgatataggaacgatgcacgcgtatgaagcgtgaagcaggcagaagttcttctatggacttcatgctcatgagcgagagaatgggtttgggagagttctcctcatagattttgatataatctttcaagccttcgatgtaaagaatatttttgagctccacttgtatcagtttgtaatcactttttacgaagatgctttcaatttcctcttggggctgttgcagcagttcgaaccacttcactgctttattggcggcttgcagaaagtctgcatacgagatgggtttcagcagataatcgagggcgttgaccctatacccgtctatggcatattggtcgaaagcggtggtgaaaacgatacgggtatgtgtatctaccattctggagaattccaggccgttgagttcgggcatttggatatcgagaaaaagaaggtcgacacgtttgtccggcaggtcgctcatcgcttgcactgcactggagtatttgccggtaagctccagaaacggggttttgttgacgtagctctccaaaaggttcagggccagcggttcgtcatctacgattgcgcacttcagattcatgttgtcagtaattgattgttaaaaccgatttatattcttttccgtcctcacttatgccgtgcttccattcgtaccggccgggataggtcagttccagacgcttgcctacttgttccagtccgatgccgctgccgcttttgtcggcttcgctcttggggtggtagctgttggtgatttcgcaacgtacttcatgcacattctcgctgaaatatatacggatatggctgggctcggtgggagagatgccatgtttgaaagcattctctatgagggagatgaatatcagcggggcaatctccgtagggctgtcgggacgaatatcgaaacgcgtttcaacagtgacgttggacgagagacggatgcgcatcaaggcgatgtagttcttgatgaaatccatttccttgcctaaagttacgaagttctgctgattgtcgtaaaggacatggcgcaataaacggctcagttcctgtacggctgtttgtgccttatccgtatcaaaggcaatgagtgcgtagatattgttcagcgtgttgagcaggaaatgcgggttgagctggttgcggagattctttaattcggcttccgtgcgacttttttcggcttcgcggcgggcggcttccacctgcacccaacgtccgctgaggcgaatggccgcactcaaccctacagtaagtatcatggaaaagaaatcgcgcatgatgaatatccacttcggcggaccgatgtgtctttggccctcaccgtcggcttttgcgtaggtgtggaatgcgtactcctgccaaaagtgtacaccggctgtaacgcaagctatcagcagtatgttcagcaggagatactgccgtatgcgcccctcgaacagataacggggaatgaggaagcagtaattgcagtagaatacgataagaaaagatagcggaacaatgctgccatgacgcaggtattccatccatgtaatggtgaaaccgctgcgtgtcatcatcacgaaaggaaaagcaaatacaattccccagccgatgatatgaatcagggcttcgatgatgcgcgaccgtgagtagagaatttgtttcatacaaatgcaaagatagttttttttagcgataagcgattatcactcgtatcgtattgcttctatcgggtctaagtctgctgctttctttgcaggataccatccgaagaacactcctgtcaccgtacagacggcaaagctgaggaatacgctccatgcctgtatataaataggccaatgggctgcgctcttcacaatccagcttgcgccgcagccgatgatgacaccgatgagaccgccggtaatgctgatgaggatggcctcgatgaggaattgcgacaggatgtccactcctctggcacccacactcatgcgcagaccgatttcgcgggtgcgctccgttacggatacatacatgatgttcatgatgccgatgccgcctaccaccagcgatatgccggcgatgcaggcgaggagagtggtcatcaggtcggtggtggtgttcagcatcgagctgagctcctgctggctgcgtatggtgaaatcatcgtcgtcgctgtccttcagtttatggttccggcgcagaattccggtgatttcttcggtggcgttgtccgtcatgtcctcggtgagtgcggatgcgaagataccttgcagataggtctgtgcaagcaggcgtttcattacggtggtgtagggggcaagtacaacgtcgtcctggtccatgcccatgctgttgtatcctttggctttcagtacgcccgtcacgcggaaaggcacttgattgaagcggataatgcgtcctacggggtcttctccgttggggaaaagattatcctgtattgtcttgccgatgacacatactttggcggaagtctgtatgtcggtttccgtaaacatcgtgccgttctccaccgtaagctggcggatttcaaggtagtccgtgcctacgccgcttacggatgaggggtagttgttattgcctgcaatgagctgtcccgatgaggatacgttggggctgacggcagccaggaagttcgtttcgttgcgcaatgcctcgtagtcggtgagcttcagcgtctgcatggcgctggggtcttggcggacgccgccgcgcatatccgctcccggatgaatcattatcatattcgagcccatttcggagatttgcgcctgaatgcttttttttgaaccctgtccgatagcgagcatcgtgatgacggacgccacgccgatgatgatgcccaacatcgtgaggaaggcacgcagtttattgttggcaagtgcccgaaaggctattttgaaaaggttggttccattcattgatttgtagttttatgatattgtttttcttttttcatcctgcaataaagtaatttacgtactgcgtcagtcatcctcctgcttgggcagtgctgccagtgtttcggcggcattcagaatgtttcggttgggcttgtcgtccttcacttgtccgtcgcgcaatacgatgttgcggctgctgtattgggctatttccggattgtgcgttacgaaaatgatggtgcgtccttcggcatgcagtttctggaagagcaccaggatttcgaatgaggtacgggtatccagattaccggtggcttcgtccgccaggattacggcagggttgtttaccaatgcacgggcgatggctacgcgttgcatctgtccgccggacatctggttggacttgtgctccagccggtcgcccagccctacggctttcagcgcttcaatggcgcgtttccggcgttcggctgccgatacggacgagttgtacatcagcggcagttccacattttccacggctgtggtttttgccagcaggttatagttctggaacacgaagccgattttatggttgcggagtacggcacgctgggacttgctcatggtgcgtacggagatgccgtccagcagatactctcctacggtgggcgtatccaggcagccgagtatgttcaacagcgttgatttgcccgaaccggacgtacccatgatggtgacgaactctccctcgccgatagagaatgatacgccgcgcagtgcatgcaccgtttcgtctcccacctggaagttccgctttatgttttgaagttcaattacggttttgctcatgattaatgatgtatggtttactttgtactgtacttttatactcagtctctgtacgctgtttcatcggccgttgtttttcttcttgcttcccggagggcccggcatgaacgggcttttctcaccgcttggttcctgcggcatgtccgccgttgggccttcgcccggcaggcgccctatggtggcttcggtcactactgtcgcaccttcatcgatgccgcttacaatctccgtattcacaccgttggagatacctaccgttaccggatgcgcgatgaatgtattgccctcgcgtgtccagagtttgtgttcgctttcgcaatctttcacaatgtcattctcgccgataagcggcttttcgggtgtgaaacggagcgcacgtgccggaacggaaagcacattcttgcggtcgagtgtgtaaatcgtgacgttggccgtcaggcgcggtttcagtttcaggtcggggttgggagcggatatgacaacttcgtaggtgacgaccgtaccggatgtgccgctgctgccggaacttgtagagctgtcctctcccaagcggatttgtgttactacgccctcaaacgtgtcattgggataggcgtctacgctaaacgtcacgcgttgcccgtctttcacgccgcctatgtcggcttcatccacgtcggccacaacctgcatctgcgtcaggtcggcagcgatggtgaacagggtaggagtctcgaaaccggatgccaccgtttgcccttcctctaccgcacggttgatgaccacgccgtcgatgggcgaagtgatggtggcgtacgacaggttgcgctccgcttttgccagcgatgcctgactgctttcgtagctgcttttcgctttctcgtaattgtagacggactgctcgtagtcggtatcgctgataagctgcttttcgtgcagtccccggttgcgttcgtagttcttccgctgatattcgtattcggctttcgcaccgttgtaggcggcgcgttgggatgccacttcgctttgcagggtcacacggtccatttcggctatgagctggcctttggtaactacggaattgtagtcggcatatatcttgtcgatgatgccgcttacctgcgtgccgacttccacttccgtcaccggttcgatggtgccggtggcggttatggattccgatatctcgcctttgattacggtggctgtctcgtaggtcactttatgtttggccgtggagctgccgaaaagccggatgcttatgccggctaccgccacaacggctacggcgataaggataatctttttcttgttcatattctgtatatcattattgggttttaagtagcgttggtctataccgcaagagatagttgcgtatgggggttattatattgaataggtcaaagcgtaatctgttctccctggtagaatttcagcagttgcgtgttcagtattgccatgtatttggcttgcagggtttcctgttgcgcgttgagcaggttgtttttctcggtcagcagttccacggtattcttcatgccgaggttgaattgctcttggatgaggtcgtagctggtctgtgtgcttcgcagcttctctatggcggcaacgtagcgttgctgtgcgctgttggcatccagccataacccttcgatggtcttgtacaggtttttctgattgtccagcaagtccagttcgctgttctgcttctgtatcttggctttctgtacggcgctcttggtctgccggttgttgaagatgggtacgcttacggttactcccaaggagttgttccagttctgcttgatttgttcgccgaaggtgaagtcgttgccgttggtgttcgtgctccctatgcctgcactgaggctgatggtggggatgtaaccggagcgggcgatgtcgatgtcgagttccgaggctttgacattcagccggcctgcttcgatttccgggcgcagggtgagggcggagcggtagacatcggtctttgagggcagcggcgacaacacattctcatcgccgagtgtggggatgtaaagcgtcatctccttttcgccgtccagttcgaggagttgtttcagttgcagtttgtaatcttgcagggtagcttgtgccgttaccaattgatatttgtcggtgctgacctgcgcttccagttgggcgaggtcgctcctggcgatgcttcccgctgcaagcagggcgcgtgcccgttcgcattccgcccggctgacgtcgagggttgcttcatttaccttgacggcttcggctgcatagagaatctgtacgtaaatctgcgtaatgctctcttcgatggtgttctcgctttccgccacgcccagttcggcaatgcggttgttcatccgctgctgtttcaaggtattcagccgtttgctgccgttgtaaagcgtccagttggcatcgataccatagctgccgttgtagctggtcttgctttggctgctggtgatgttgtcgccgtctattatcgtattggtctggctgttgggccggtttacgatacgttggcttacggatgccgtgaggctggggaagagggctgccctggcggtctttacgtccacttcggcgctcttggcgttgagacggttcttgcgtatcgtgatgttttgctgcaaagcatagtcgatgcaggcttgcaggttccattgtgcgggaagcgtctgcgtgctgtcctgctgttgcgtaccgatagcggtttcctgcgtttgcggcattgcgttgccgacacaggtgcttgccgcacagagcgatattacggtcaatctttttacatttatcatattaccttgtttctatggttttaccattgcaaaagtatgcgcagcctcttgaaacggcaaaaacaatagaccattgccgggattgtgccgacggattactttttcctgccgataattaagagtttgctttgctgtttttatgaggtgtcaaaatacacttgctgatttctattaggtacggatttcacggaaaacacaggttttctttattcttttttatcgtgaaaatccgtgaaatccgtgcctaatagaaaccaatagtaagcgaattttagttttgaccccgtaaagacagtagatatcttcccaaagaacttctttatagaataccggacaaaaatcaagctggctataacttttcagttttttatttgttatttatataaaagtattttatatttgtaatgattataatttgaactttatgaaaaaccttgttaccagtatctggcaattttatgtcgatggcttccgaagcatgacattggggcgtaccttgtggctgataattgcaatcaaattgtttatcatgttttttattcttcgtcttttcttctttccgaactatctgaatgaagctgccggagaaggcgataaagaagattacgttagcagtgaactgattatgcgggcgggaagataggggatagtgataagcggttagtgattaaggagggaggtattccttttccttatttataccttatactttaatttcatacttaatatttattctcatgcttgaaaacattgacacttctctgattgattggtcgagagcgcaatttgccttgaccgctatctatcactggatttttgtgccgcttactttaggattggcggtaattatgggcatcatggaaacggtgtactaccgtacgggtgacaagttctggaaacatactgccaagttctggatgaaactcttcggcatcaactttgccataggtgtggcaacgggactgattctggagtttgaattcggtacgaactggagtaattacagttggttcgtgggcgacatcttcggtgcgccgcttgctatcgaaggtattctggcattctttatggaagccacgttcattgctgtgatgttcttcggttgggacaaggtaagcaaacgtttccacctggcttctacctggcttacgggacttggtgctactatctccgcctggtggattctggtggcgaatgcctggatgcagaatccggtaggtatggagttcaatcccgatacagcccgtaacgagatggttgacttctgggcggtagccacttcgccgatggcagtcaataagttcttccacagcgtgctgtccggctgggtactggctgcggtgttcgtggtaggtgtgagttgctggtatctgtggaaaaaccgtgagaagaagtttgctttggcaagcataaagatagctgcctgggtaggactgtgcgccgctgtgctttccgcgtggacgggcgacggttccggttatcaggtggcacagaaacaacccatgaagctcgctgccatggagggttactatcaggggcaggaaggagccggactggtggctttcggcattctcaatcccgacaagaagacggccgatgacggtaaggatgctttcctcttccgcatggagattcccaagttcctttcattgcttgccgagcgcgattcaaaggctttcgtaccgggcatcaacgacctgctgaaaggcggctatcccttgaaagacggtacaaccgcgctctccgctcaggagaagattgaaaagggaaagacggctatcggggctttctccgcttatcgtgccgccaaagctgcgggcaacgatgccgaggcgcaggtggctgccaaagtgttgaaagagaatgtggcgtatttcggttacggttatatcaaggatgtgaacgaactggttcccaacgtgccgctcactttctatatgttccgtgtcatggtgatactgggcgggtacttcatcctcttcttcatcgtggttctcgttcttgcctacaagaaggatttgtcgcagatgcgctggatgcattgggtggcaatgctgaccattccgctgggctatcttgccgggcaggccggttgggtggttgccgaatgcggacgtcagccgtgggccattcaggatatgttgcccacaagtgccgccatttccaaactggatgtcggctccgtgcagaccacattcttcattttccttgtactgttcaccgttatgctgattgccgaagtaggcattatgctgaaagccatacggaaaggaccggaaaaagaactttctcatcaatcataacttataactcataactcattacatgaatacctatatatttcttcaacattattggtggtttatagtatccctgttgggagccatccttgtattcctgctgtttgtgcagggcggtaactcgctgatattctgtctgggcaagacggaagagcagcgcaagatgataataaactctacggggcgcaagtgggagtttacgtttactacgctcgtaacgttcggcggtgcgttctttgcatcgttcccgttgttctacagtacgagcttcggcggtgcgtactggttgtggatgattatcttgtttactttcgtgttgcaggctgtaagctacgagtttcagtcgaaagcgggcaatctgttgggcaagacgacgtatcgcgcttttctggtgataaacggagtggtagggccggtgctgctgggcggtgcggtggcaacgttctttacgggttcggagttctatatcaacaaaggtaatattgccgatacggtgatgccggttatcagcagttgggccaatgcagggcacgggttggatgcgttgctcaatccgtggaatgtagtgttgggactggctgtgttcttcctggcgcgtattctcggtgcgctttacttcattaacaatatcggcgatgcggatttggtgaaacgttgccgtcgtgcgctgtggggcaatacgggtctgtttctggtgttcttccttgcattcgttatccgtacgctgcttgctgaaggctacgcggtaaatccggaaaccggagaagtatttatggaaccctataagtatctgacaaactttatcgaaatgcccgtggtgctgctcgtattccttatcggtgtgcttgccgtgctttggggaattgtccgcacagtgtggaaaccgtctttcgacaagggtatatggtttgcaggcgcaggcactgtgctcacggtattggcgctgttgctggtggcgggttataacaatactgcctattatccctctaccgccgacctgcaaagttcgcttacgctggcaaacagttgttccagccagtttacgttgcgggtaatggcctacgtatctgtcctggttccttttgtgcttgcctacattttctacgcatggcgcagcatcgacaggaagaagatagatgccgcagagatgcaggatgaaaaaggacacgcctattgattttataactccggggatttgctcccggtttccctggagtttctttgaaaatgccgggggatataagagaaaactcctcacgtttgggttgcaaacgtgaggagttttctttttgttcttatgttcttatgtccgaaaaccggattatcattttcccgcttccgcattcttaatcatctgctcgctggcatacatgaatattaccacacggcgattttcgctggccgacaggctttcgtcgtattcattgtagcccacaccttccacttgcttgaactgagagggagatacgccgcaatcctgcagataattctctacggcataggcacggttcttggacaccttcatgttggcttcgtacgtaccgaccttgtccgtatggcctatgatggcgatgtccgtagttgtgtcttccttcagaatcttggcgaggtcgcgcaaggaagctttcgcatcgttgctcagcgtagaggagttgaaagcaaacagaataccggagtcgaacgtcaccttgacggcatccagattattggcatctttcaccatttccacctgtgcgccttcaatcttggcggcttcggcagcctttttatccatcttatgaccgatagccacacctgcgcccgtacctaccgctgcgcctactgccgcaccgatagcagcgcctttacccttaccgaacagtccgccgataatggctcctgccgcagcgcccgagccaccgccgataatgccacctttcgtcgtattgttcattgtaccgcaactacccagtagtatggcgccgctcagcagaaatgctgtcattttcatctttttcataccttt

SEQ ID NO: 4130 - DNA, 31530 bp, Unknown
  gut microbiota DNA sequence
tttttttctcgtctttaaaaacagcaggaatatgtaacacattatcttgaatcagattatccattaaataccacataacctcatggtacaaaatcaccattgctgttttttcatcacttatattatattgggttgctatattgctgcaattacttttaagttcagaagaaatggagtcaaccagctttttgataatgtgatgaaaacggtcttgctgtttttttataataggaaattgtatatccccgttactgtttgtcaagccataaggtatgagtttagaaataagttgtggattgtttattttcccaaatttggatatttcttcaacactttcatccatcgttttactgcttggtgagacttcgctgttgagataggttagtataaaattcatatcaccaaagccatttgttccgaatttaaggtctttgcgtggctcatataaaacccagtagcaaccactccaaccagcatggttgtttatctcatcgaataagaccagtttagtccacatcctaccatccaaaagatatgaaaacaccaatgagagtgcgttattttcaaatcccatctccttgattgtatgtacgagagagacaaaatcactcttagtgtttgaatacatagatttcgcaatctccttactgatatttcttaaagaggttgtctgttcttcgtcaagaataggaattgtgcatttccattttcctttggttctgtcaattagtcctcctacttccaataataataattggctgtcagaacacttaactcccattttaagaagttcatttagggtgtgaggcgttcgtagattatatattatttcccaattattatctgcaagaacatagtcttccggttgatgtccacttacagcaacgaattgcgtagcttcccacttctcataagctcggacattagtctgagcttgtattcttggtaatgagattgatagcaaaaagattgttaaaacagaaagtttgaatttgttcatcataataaatttaatttataattcagtgtttacgtatatttttccgaaagtttttgctcgtcacgtatccggcatagctcccgatgtactttggacccgtaaaaatctactgacccacgatttgtgttataaatgtgtcatatataaaagaaaaaggagctaagtttatcacttaactccttcatttttaccagtcggggtgactggattcgaaccagcgaccacacgccccccagacgcgtactctaaccgggctgagctacaccccgaattgcggatgcaaaagtacgtctttattttgaaatagcaaatacttctgtgattttttattgcctttattttacctttattttaaaattcgctgtttatcagtgctttcttattgttaaataaatctgaaatagtaggtgattgcaatatccggccggaaaaacagatgattctttggggcatattaccttttttttgtttatttatattagctttgccatttcccaaaagcagttataaaccgtataaacaatatatttgatgatggatatacctaaattgcgcttgttgaaccagcagttggcgaatcctttgtttcattctccgaaagagttggtgtcctggatgggagctgtccaggcacaggattatgcaatggctaaatgggcggtgggtatgcgcctggcttcggccactgtccggacggtggaagaagcgttgcagaaaggagagattttaagaacgcacgtaatgcgccctacatggcatctggtggcggcagaagatattcgttggatgctgaagctctctgcccggcgtataaaagctgccaatgaggcatacgccaaaggcagggaagagatatccgaggaactttacagtaaaagcaatcgtgcattggaaacgattcttgccggaaagaaaaggctgaccaggctggaaatagcggaacacttccggcattcggggctggtggcggacaactatcatatgacccgctttatggtacgggcggaagtggaaggcatcgtttgcggaggagagtctaaaggcggaaagcatgcttacatgcttctggaagagtgcgtgccacctgtgccggacataacgaaggacgaggctctggcacgtttggcaaggaattatttccgtagtcatacccctgccactttacaggattttgtgtggtggtccggactatccgtaacggaagcgaaacaaggtatatacctgataggcagtgaactgacggaagagcagtggaaagggcagacctggtatcttcatgagtccggcagaacccgcggcagcataaaagggcatatacggtttctgccgccgtacgatgaactgctgctgggttataaagaccggacggatgtgctcccttccgaacactattccaaagcttttacgaggaacggactgttctttccggtaatactttacgaagggcagattgttgggaactgggacaggaaggttaaaagaaacggatgcggcccggggtgttctctcttccggcaggaaagccgcatagatgaggctttattggacaaagcacaacagcagtatatgcagtttttgggaaagtgagggatttatacccccatacattcccggtaaaagtcgaacacctcgaaaatcgtttctttgtccgccgtctggttcaggcagatatcgcctacctctttcagcagcgtgaaattgatgatgccggcagtgtttttcttgtcatgtaacatcagttcgtaaaggctgtcgtattgcttgcagctaaaggcgaaagcaccgtaattctctttgataaattggatggtctggcgcattttatctttaggaaagccggctttgaggtaggagaggtaaagttcgcacacaagtccccacgccacggcataaccatgcagtaccggacggttttcggccagggcaagactctcgaaagcatgtcctatggtgtgtcccagattgagcgccttgcgtatgccgtgctctttggggtcttgttccacaatatcttcctttacctgtacggagcgccctaccattgtcctgagtgcggagtagtctatgttttctgtatcgaaagacagcagttccgccaggtggtcggaagtgctgatgagtccgtgcttcaacatttcggcatagccggagaaaaagttgcgggcatcgaggctgcgcaggaacccggtttccagcaagacggaggaagcaggggcgaagacaccgatttcattcttcagtccgttgaagttgatgcctgtttttccgcctacggatgcgtctaccatggcaagcagggtggtagggatgttgatgtatgcaatgccgcgtttgaaagtggcagccgcaaagccgccgaggtcggtgaccattccgccgcccaggtttatcaagagcgaatggcgggtggctccctgttcgctcagagcctgccacacggaagccagagtctccagatttttgtgcacgtcttctgctccgataatgatttcggcggcattttccagtgcggggatgctttgcagttgcggcaggcaaaggcggtgtgtatgttcgtcggtaaggatgaaaagcttgtcgtgaggacattttccgatggcatgcgtcaggtcgttttccaactccttgcagaggattacttcttgtttactcatttgacttattacggattagaagttgtaaattatggaagggagcattgctctctttatttattatgctacaaagatagttctttcaacaataaaacgttatctttgtttccgaaaatctatgtatttgtaaggtgtccgcaccgtaacctttaatttgtatgtaagaaaatgaaagctttacttcccgtatactgccgtccgttgggctatttcgtaattgcgctggccttgttccttccgttcctgatgatgctgacgggcagggttacagatgccaatctgctgttttataaagagtgctccaaactcctgatgatgctgggggcattgatgatactctttgcgctgacgaaaggcgaatgcaaggcgacagaggagatacgcaacaaagccacgcgcaatgcgatgttccttaccgtgctctttattttcggaggcatgctgtacagggtggcgcagggcgatattatgtccgtcgattcttcttctttcctgatattcctgattatgaatgtcctttgccttgaattcggcataaagaaagccaccgtggacaacctgttcaagcggaataaccggtaattaaacaaaatcattctgtagcccgttaaaccttttgcctgtacttttgtcaaaagaatcagttacaaataaacagtgttgattatttagaagacagggcatgaaaaaaattatcactgcggcggtgctgttgctggcaacggcattgtctgctttttcacaaaccaaaaacatcaccgtatccggccgtgtgcttgaagacacgaacgagcctgcggtgcaagctaccattcaattgctatcgttgccggacagcgcttatgcagccggtgttgccactacgggaaacggctactttaccctgccgaaggtgaatgcggggaaatatgtgctgaaagtttcctatataggttttaagaataagtttctaccgctgcatctctatgccaacgtgcgcagtaaaaatgtgggtacgataacgctcgaaacggatgccattatgcttgccgaggctgtggtagtggcggaagcgccgcaggtgcaggtggtggaagatacgctgatgtacagttcctctgcctatcgcacgccggaaggggcgatgctggaagaactggtgaagaaactgcccggtgcggaaatcgatgatgacggtaatgtgacgattaacggcaaggagctgaagaaaatcatggtggacggcaaagagttcttcgggggcgatataaagacgggcttgaagaacttgccggtggatataattgataaactgaaaacctacgataagaagtccgacctggcacgcatcaccggtatagatgacggtgaagaggagacggtgctcgaccttaccataaagaaaggtatgaataaggggtggttcggcaatgcggatgtggcttatggtacggaagaccgttatatggcacgcatgatggtaaattacattgtcgataagacgcaattctctttgattggttctgccaataatgtcaacgaccaggggttctccggtggcggcggcggtccgcgctggcgcaggaacaacggtttggtagccacgaaaacactgggagcgaactttgcgacggagacttcaaaactggagctcgacggtagtgtccgctatgattataaaggtgcggacattatcagtaccaactcttcggaacgtttcctgcagaacggaagttcatactccaattcgaacgctgtcaacaagaacaagaattcggatgtctttgccaacttccgtctggagtggaagccggattcgatgacgaatatcattttccgtcctaacttctcttacggcaagacaaacggtacttccggttcggaatcgggaacattcaactcggacccgtatagcctgattgccaacccgaacgattttctcgacttcgacaagttggaagacgaccctttggaaaatatccgtgtcaatgcaacgaatgatgcttctctgaccaaaagcaaaagcatttcgacatccgccacgctgcaactcaacaggaagctgaataaccgcggacgtaacataactttccgcggacgctttagctacggcgacaacgacaacgaccagtacaggcagtcggaaacccgctattaccagatattgaacgcgttgggcggagactccgtgctgtatcgcaaccagtatatcacaacacctaccaacaattataattatagcgcccaggttacgtacagcgaaccgattgcacgcgccactttcctgcagttcagctatcagttccaatacaagtacagcgagagcgacaagaccacattcgatatgctggactatccggagtgggacatcaacgggcctttgccgtccggatacgagtcgcatgccgtggatagcctgggcaaatatgcggagtacagatactacaaccacgatgcgtccgtgtcgttgcgcttcatccgtgagaagtatcagttgagtgcggggatgtctttccagccgcagcattcggtattgtcctataagcgcggggattatatgattgatacggcccgaaacgtattcaactttgccccgaacattgatttccgttaccgtttttctaaagtgagccagttgcgttttatgtatcgtggacgcagcagtcagccgggcatggagaacctgctgcctattgccgacaactcgaatccgctgaacatcagagtcggaaatccgggactgaagccggcatttacgcacaatatgcgcctcttctacaatacttataatggggagttgcagcgcggaatgatgacacatctcagcttctcgaccacgcagaacagcatcagcaacagtacggtgtacaacgagcaaaccggcggacgggccactacgcccaagaatatcaacggcaactggagcgctttcggtatgttcggattcaatacggcgttgaagaacaagaagtttacggtaaactctttttcgcaactcagatacaataacaacgtggctttcctatacgatcagaatacgaaacaggataacaagaataccactaccgaacttatgctgagcgagcgggtgaacggggcctaccgcaacgactggtttgaattcggagtgaacggttcggtttcctatacggcagagcgcagcaaattgcgcccggagaataaccagaatccctataccttctcctacggtgcgctgaccaacatcacgatgccctggaagatgacgctttccaccaatatcaccaatcaaagccgccgcggctatacggacagcagcatgaaccgcaacgagttgatctggaacgcgcaactttcgcaatcgttcctgaaaggtgcggcgactgtgagcttcgagatgtacgatatcctgaaacaacagagcaacatcagccgctcgttgacggcggatggccggtcggtgtcgtcttataatggtgtcaacagctactgcatgctgcatttcatttaccgtttgaatatttttggcggtaagggtgcgcgcgaaagcatgcgtggcaggcaaggcttcggcggtcctggtccgggcggccaccggggtggcgggcggcgtccgttctaatgttaatcaatgtaataggtcgtaaaacttccttcctttttcatatatttgttttaaaatctgttttgatttttattcgggacttatttcttcttgtgacaaatgtatgcttgattggaacttcatagccggcctgattgccacagtagcattcgatattatctattttggcgcaattatcggaacaatcacggttatcattctcgataaccgtaatccggtaaagacaatggcgtggatattggtgctgatgttccttccggtggtgggactggtgttttacttcttcttcggccgcagccaaaggcgggtgcgtgtcattggcaagaagagttacaaccgtctgttgaagaagccgatggccgaatatcttgcccaggattcctgtgcgcttccggcaaattacggacgccttatctctctgtttcgcaacaccaaccaggcttttcctttcgatggaaaccgtgtggaagtctatacgcggggactttccatgattcaatccttgttgcgcgaattgcaaaaggcgaccaggcacatccacatggagttttatatcttcgaggatgacgccgtaggccgtatggtgcgcgatgtgctgatggagaaagcgaagcagggagtggaagtgcgtgtgatttatgatgatgtgggatgctggcatgttcccaaccgcttttatgaacagatgcgcgaggcgggagtggaagtgcgcagtttcctgaaagtacgttttcctttgttcaccagcaaggtgaattaccgcaaccaccgcaagattgtagtcattgacgggcgcgtgggctttgtaggcggaatgaacctggccgaacgttatatgcgcggcttttcatggggcatctggcgtgatacgcacctgctgctggaaggtaaggttgtgcatggtctgcaaacggcttttctgctcgactggtattttgtagaccgtaccttgattacgtctgcccgctacttcccgaaggtggatgtctgcggcacttcactggcgcagattgtaacggccgagccgataggtccctggaaagaaatcatgcagggacttgtcatggcgataaccggcgcccggaaatacttttatatacagactccttattttctcccgacggaagccgtgctcgtagccatgcagacggctgcactggcaggggtggatgtgcgtcttatgctgccttatcgtgcggataacaggctgacgcatctgggctcctgctcgtatctggcagaggcgttgcgtgcaggtgtcaaggtgtacttttataaaaaaggtttcctgcactccaaactcatggtatcggatgacgaattgtccacagtaggctctacgaacgtggatttccgcagtttcgagcataattttgaggtgaatgcctttatatacgacaccgagaccgcattgcagatgcgtgagatattcttgcaggaccagcgggaatgtgtgcaggtattctccaagaattgggagaaacgtccctggcaccgtaaggcggcagaaagcatagtgcggctgctggcaccgttactgtagctttcagccttgaatgccgaagaaagagaaattgacactgccgtagattcttctttccaaaaagcaaggatgttcttcgaagttattggtttttccatgttccagcacgaacaggccgtcttctttcagcaggttgttgtcgaaaatgaggtcgggcagggtttcaagctctttgagcccgtacggcgggtcggcaaagataaagtcgaaccgttcgcggctgccttgtatgtatctgaatacatcgccgcggacaggcaggcatttatcggtcttgagctctttcattaccttgcagatgaaagcgtaatggtcgcggtctttctctacgctgattacctggtcgcagcctctggacacaagctcgatgctgatgctgcctgtgccggcaaataaatcgagtgcgcgtacgccttcttcaaagtccatgtagttggacagtacattaaacagattctctttggcgaaatcggttgtggggcgtgccttgaaagtatggggcacgtcgaaacgccttcttttgtatattccgcttattactcgcataggttgatggcttgtaggtcgagattggcggcagggttcatgatgaatacctgccggataaattttttcagttcggacagcagttgctctttgtcgtacagttcgccggtgaggtggagctcgtcgcgttcctgcgccatgccgagctgcttccatacacagagaatgtaatagaggcggtcgtttgtctccttgcaggcaaaggtgttggcgaatgccagccggccgcgttcgtaggcgtatatctctgctgcttctttgcgcaggtgcacatacattttccggcaattgcccaggcggctctttgccgcaaagtactctatgagagggcttgcctgcgcatagaaacggacgtcgggatactgttcgcgtaaaagggagcaggcgcttttgtccattccaaacagtacgactatattgttcttatgcaagatgttgtattgcaccagttcgttgtcttgtctggagtgattatgatagaatacggtttccgcctgttcgtcctcaaagaattccaacggaatgaatgtaaagcgtttgcctgccataaggacattgatacggcggaaaggattcttcagccagtccgtttcgcggaaagcctgtttcaggttggcagtgagggacagggaatcgtccactccgtgctcgtggaaagaaaatctgccttcgccgagcggattgaatatagaaaaagaaaatccatccgtactcagacggatggataaggtatattgttccgatttactaaaatcagtcgtttctatcatacgtattgtgtcggtggattattcccagttaccggcgttgttgttggctgtttccaggctaccgatcatcagacctgagtatttgcccaacttggtttgaacatctttcaggttagcgatttcctgtttgtcgagaccgttcagatatacttcatacggagtcttgacttcgagcaggcagaaaggagcaccggatttggcagtatcgttcttgatagccatttcaaactgtgcaccgttgccgaaaggaacatatctcatagagtcggcattgaagcctttcgggaagatagtgtccagcacggctacccacatggtatcgcgtttgaagttttccaatccccattttttgacttctgcatagttgcccgtctttttggccttattgatgatgttgatagccttcttttcagtcaagccgtcttccaactgcttgtcgtccaattcaccctgcttgaagataaacggaagtttctgattctttacgaagtcaatcaacgtatcgaagctggcagtatattgctggttgtgcaaaccacggtattccaactgcgctttacgaatgtcgataaggcgggcaattactgctgcgtctctttgtttcttggctttttcaaagtttataggacccatgatgctggcatagcagatgtaaaccaaagccagggcacacaagcctaaaacgatattaaaaactgttttcatgataaatatgttttttagttgttatattcgcaccgcaaaaataaaagaaataaatttaaaaacgacagttcccgttacttttttctcttacaaaaatgataaataactatttagaaaggcaaattaaggaaaattttccttatcaaccaactccggagcaggaaattgctataaaatctttgtcggacttccttctcgcgccccgtagtgagacggtttttctgctccgtggctatgcaggtacgggtaagacctcgctggtgggcgctctggtcaggactttggacaagctgcaacagaagtcggtattactggctccaacggggcgggcggcgaaggttttctccgcttatgcgggacatccggcgtttacaattcataaaaaaatttatagacagcaatctttttccaatgagacgggcaacttttcggtgaacgataatttgacaactcatacattatatattgtcgatgagtcgtcgatgattgccaatgacggtctgtcgggttcggcattcggcacggggcgtttgctggacgacttggtgcagtttgtctattcgggtatgggatgccgccttttgctgatgggagatacggcacagcttccgccggtgggcgaggagcagagtcccgctctgtttgcagatgccttgaaaggctacggactggaggtgcaggaagtggacttgacccaagtggtacgccaggagcagcaatcgggtattttgtggaacgctacgcgcttgcggcaactgattgccgaagatgcctgcgaggctctgccgaagataaaggttgcggggtttgccgacatcaaagttctgccgggcgatgaactgatagatgcgctcgaaacgtgttacgaccgcgacgggctggacgagacgattgtgatatgccgctccaacaagcgtgccaatatctacaataacggcatccgctcccggatactctggcgggaagatgaactgaatacgggcgacttgctgatggtggcgaaaaataattattactggacggaaaaacagaaggagatggactttatagccaacggcgagacagcggtggtgcgccgtgtgcgccgcacccgcgaactgtatggtttccgttttgcggatgtcacgctggaatttcccgattacgacaacttcgaactggaagcaaatcttctgctggatacattgcacagcgatgcgcctgcactgcccaaggcggataacgaccgccttttctataccgttctcgaagattatgccgatatcaccgtgaagcgggaacggatgaagaagatgaaagccgacccttattacaatgccttgcaagtgaagtatgcctatgccgtgacgtgccataaggcgcagggcgggcagtggaagaatgtttttctggaccaggggtatatgacggacgaatatctgacgcccgattatttccgttggctttatacggcatttacccgggccacgggcactctttatctggtgaactatccgaaagagcagatctgctgaaaaagagacggataatgatgcagtattccgttattttctgtatttttacagatagaacaattgttatctgacgattatgaagaaacagtattttcttttgattttggtatggttgctgtttgccgtttccggctgtaaggacgattatcgcagtgtggtgctttttgagggtgcggaaccggtttatcaggttggaacatgtgataacctggtctcgtctctggctttcttcctttccgaaaccgaaggggaaacggtgctcggcatagacggtggcgatggtgcttataccttgacgaatgagcatgaatcggtggctgccgtaacgtttgcaggtgatagcaacggttacaggcgtataagcatacagcctttggcggcgggagaaacggtagtgcgggtgatggacggttccgggtccggtgcgcaattgcgcattacggtgaaagagcgtcgggaatataagatgtcgaagcagggatttgaatatggaatcagcggcgatgcgcccgtggaactgttgggtaaggtgtcggaagaactctccggccgttcctggctggaagattccggatattatgtgttgatacccgacaagggctcttcctattacctggataagggagtgctggaaatctatcctacggggaaggaagatgcacctcttacgggaagttacgagacagttccgatggcaggggaagacggggacgtacatgcgctgtggcggtttacttatgacggagagcagagaatctttacgcgaagccttgccggaagtgaaggagtggctacggtgatatgcgtgcttgcagagaatgtaaccccgttctgttcgcccggactgctgcctgagggggtgacggtcatttatcgcgagcacttcctgttgaagttggaatagaagccgggccctttcgggcaggagttgcaagcgggaaaaacaaaaggagaagcgatggcttctccttttattgtaaattgaagttgaaatatctgtctctccggcaatcttacggattataatcctgccagttccaggactttgtctacggctgcgctcaagccgtcagggttctttccgccggcagttgcaaagtggggctgaccgccgccgccgccttgtatcagcttggcggcttctttcacaaggttaccggctttcagtccgccggctacgaggttgtcgctcagcatcactgtcagcatcggtttgccttcgaataccgttcccgcaacgaagaaaaggttttccgtaatctctccgcgcagttggaatgcgatgttcttaaccgtgtcggcgggtatcatggctgcacagaacttgataaccttcgtaccgttcacctcttggatattctgtagaagtttctctttcagttgtgcttctttctctttcatgaaatcttccacctgtttcttcagaccggcgttctcttcgatgtatttgcggatggcgcctgacaggtcgggggcgttgttgaagagtgctttcaaatcgcgcatcgtatcctggaaggcatcgagcatctcctctacgcgtgctccggtataggcttcgatacggcggacaccggcggcaacggaactttcggatacaatcttcatcattccgatgtttccggtagcggctacgtgcgtaccaccgcagaattcaatggaagaaccgaactggatgacacgtacacggtcaccgtacttttcgccgaaaagagcgatggcgcccagttccttggcttcttcgataggtatgttgcggtactctttcaaaggaatgttggcacgtatcttggcattcacgatgtgttccacctggcggatttcctcgtccgtcactttttggaagtgcgagaagtcgaaacgcaatgagtccggagtcaccaaagaacccttttgctctacgtggtcgcccaatacctcgcgcaatgcggcatccagcaagtgggtagcagagtggttggcggcgcaggcggcacgtttgtccgtatctacacatgccatgaacggtgcttccaggtgttcgggcagcttcttggtgatgtggataggaaggttgttctcctttttggtgtcgatgacttcaattgtttcgaactcattgaccagtacgccggtatcgcctacctgtccgccgctttcggcatagaacggagtcttgtccagtacaatctggaacagtgtctggttcttttgctttatctggcggtagcgcagaatggatgtctcatattccgtataatcgtagcctacaaattcggtagtgccttcctgcagtgtaatccagtctccggtttcaacggcggcggcattgcgtgcacgttgcttttgctgctgcatttcggcatcgaactctttgatgtcggcggtcatgccgttttcgcggaggatgagttcggtgaggtcgagcggaaagccgaacgtatcatagagcgtaaaggcgtctttaccgctgatttcggtcttgccggctgccttggcatccgccatggtcttatccagcagacggataccggtctccaaagtacggaggaaagaatcttcttcttctttaatgactttggctatcagttctttctgtgcattcaactcggggtatgcgccgcccatgttctcgatgagtacgggcaacaacttgtacatgaaagcctgcttctgtccgaggaacgtgtagccgtagcgcactgcacggcggaggatacggcggattacgtaacctgccttggcattgctcggaagctgaccgtcggtgatggagaaagcgattgtacggatgtggtcggcaattacgcgcatggcgatgtcctgctgttcgtttttgccgtatgtggctcccgtcatgtcgccgatggctttcagtatcggttggaaaacatcggtgtcgtagttggaagtcttgccttgcagtgtacgtaccaggcgttcaaagcccataccggtgtcgattactttggcgggaagtccttcgaggctgccgtctgccttgcggttgaactgcatgaatacaaggttccatatctcgataacctgcggatggtctttgttcaccagttgcgaaccgggtactttggccttttcttcttccgaacgtgaatccacgtgaatttcggagcacgggccacaagggccggtatcacccatttcccagaaattatcgtgtttgtttccgttaaggatatggtctttcggcaggaactgttcccaataggaagcggcttcgttgtcgcgttccaggccttcttcggggctgccttcgaatacggtggcgtagaggtctttcggatcgagtttcagcacatcgaccagatattcccatgcccaggagatggcttctttcttgaagtagtcgccaaacgaccagttgcccagcatctcgaacatggtgtggtggtacgtatcgtgccccacttcttccaggtcattgtgctttccgctgacgcgcaggcacttctgtgagtctgccactcttttatatttcgccgggtgattccccaaaataatatctttaaactggttcatacccgcgttggtaaacatcagcgtggggtcgtccttaatcaccataggagccgaaggcacaatctggtgacctttactttcgaagaaactcttgaacgagtctctgatttcatttgcagtcaacatacttcttatttatgatttatgatttccgatttacagcttgcgatttatgacttacgcattctatgacccatctttctatgaaatcataaatcataaatcataaatcttataattcttgaaaaaactgtgcaaagatagcttgtttttcgtatttttgccgcattgataatgaaatatttactctcgatgcgcaaagtttactacatttataatccgcggacacagacttacgaccgaatttatcctaccgtccggcaacgggcgttgagcatattgcgccggttgtttttcggtatggggttgggagccggcggctttatcgtactgttgctgattttcggttcgccgtccgagaaggaactgcggaaagaaaacagccggcttcaggtgcagtataacgtcctttcgcggagaatggacgaggctatgggagtattgcaggatgtgcagcaacgcgacgataacctgtatcgcgtaatattccaggccgaccctattccctcggctatccgtaaggcaggatacggcggtacaaaccgttacgaacatctgatggatatggccaattccgatttggtggtgaatactacgcagaaaatggatatgctcacgaagcagctttatatccagtcccgttcgttcgatgatgtggtggagatgtgcaagaaccatgatgaaatgctgcgttgcatccctgccattcagcccatttccaataaggatttgcgcaagaccgcttccggttatggaacgcgcatcgaccctatttacggaactacccgttttcatgccggcatggacttttcggcccatccgggaacggatgtatatgcaaccggtgacggcactgttgttaaaatgggatgggaaaccggttatggaaatcttatcatcgtggatcatggcttcggttaccagacgtggtatgcccacttgcagggattccgtaccaaactcggcaaacgggtggtgcggggcgaggttatcggtgcggttggaagtaccggcaaaagtacaggacctcacctgcactacgaagtgcatgtgaaagggcaggtcgtaaatcctgtgaattattactttatggatttaagtgccgaagactacgaccgtatgatacagattgcggcaaatcatggaaaaatgatggattagcggattatgaatgtttaactgacaggctgttatgctgaataccgataaagaactgaaactatattactccatcagcgaggttgccagaatgttcgatgtcaacgaatcgctgctgcgtttctgggagaaggagtttccgcagctcagaccgaagaagggagggcgggggatacgccaataccgtaaggaagatattgaaacggtgaagttgatttatcatctggtcaaggagcgcggcatgacgctgcccggcgcacgccagcgcatgaaagacaataaggaagccactctccggaattttgaaatcgtagagcggctgaaaagtatccgtgaagaacttatcggtatgaaagaatccctcgatgcctttacttatgaggatgtagaggcattgaaagagaatcttatgaaggaacagcccggataggggttatccttctattcttgtcacctgtttgatgttctgtatctgtttcaggttgtcgcagatgctgcgtacatcgtccacatcgtgtacgtaaagttgtatcttaccttcaaaaataccgtcggtggtttcaatcgtcagcttgcgaatattgacattcagctggcgggagatgacctgcgttacttcgttcagcaatcccatactgtcgatacctttcagataaatcgtcacgaggaatgacaactccttgtgggtgtcccattcggtggcgatgatacggttgccatagctgctcttgaggcgtgcggctaccggacattggcgtttgtgtatgattatccggttctgctcgtctatatatcccaatacatcgtcgccggggatggggtggcagcagtcggccatgatatagttcttctggatggtctcttccgtcagtttcaatatctgcttggtattgattttttcttgcggaactttctcttcggactgctccttcgtgtctttgttgtctttattgccgaacgagaaagtcaggaatttcttccagttggtgctttgtttttccttgaaggcgttccggtccgcatcacccaatacgagtttcttgctgcccacggcaacgaacagctcgtcgcgggtatggaaattgtgcaggcgggtgagcttgtctattgcggagtcatccatgcgtatatcctcgttcctgagaaagtctgcaaggattgcctcgccctctttctgatgtgctttcgcttctttgcgcaggatggatgcgattttggcacgggcacgggcggtagtggcataagcttcccattccggttgcacgcgttgcgatttggatgtaagaacctctacctggtcgccgctctgcaacttatggctgaggggaacaagcttgtggtttactttggcgccgatgcaatggctgccgatgtcggtgtgcagggagaaggcaaagtccagtgctgtggagttctgcggcatggtcttgatttcgcctttcggagtaaacacaaagatttccgaagcaaacaggttcagcttgattgtatccagaaaatcaatggcatccggttgggggtcatcgagtatctccttgatggtacgcaaccatttgtccagctcgccctcatcctcgctgccgccgccttccttatacttccaatgtgcggcgaatccctgttcggcaacgtcgttcatacgttcactgcgaatctggacttcgatccattgcccgttattgcccatgagggtgacgtgcagggcctgatagccgttggctttcgggtggctcacccagtcgcgcaggcggtcgggatgcggtttgtatattttggatatggatacgtatatattgaagcagtcattcagctcttcttccatgttacggggctcgaagatgatacgtacggcaagcaggtcgtagatttcctcgaacggcacatgctttgtctgcatcttgttccaaatggaatagatggatttgatgcgggcaaggatacggtatttcaatcccattttatccagttgggcacgtatcggagcggtgaactctttgaaaaccttgtcgcgttctacggctgtcgcttcaagtttcttttctatctcgcggtattcttccggatgctcgtaacggaagctcaggttttccagttccgtctttatcttgtacagccccagccggttggcaagcggtgcatagatatacaatgtttcaccggctatcttgaactgcttgttgggcagcatggaaccgagtgtgcgcatattgtgcagccggtcggctatctttatgaggataacgcggatgtcgtcggacatggtaagcagcagtttcttgaagttctctgcctgcgccgaggcgcggtcgccgaagatgccgcccgaaattttggtcagtccgtcaacgatttgggcgattttggggccgaagatgttttcgatatcctcgacggtgtaatcggtgtcttccaccacatcgtgcagcagggcggcgcagatggaagtagaccccagccctatctcattgcacacaatcttcgctacggcgatggggtgcatgatatacggttcgcccgagcggcgtttgattcccttatgtgcctgattggcaaaattgaatgccttggttattatttcgacacgcttgcggtgtttggttgccaagtaatcgttcaacagttcctggaatgcctgttcaatcattgcttcttcggctctctctttctccttctggcttacgctctcttccatatactgtttctcctttcttcttcactttttgcaaaaataagcaattttcaacaccggacaagcatttatgtttttatttgtaaatcttcagcctctttcccgcattgattctggtgcttctcaatccgttccagctttttatctggttgacggtgacgccatatttgcgggcgatggtcgacagggtttccccattgcgtattctgtggtaggtgacgtcgccctgtgaagaacttttccctttgctgctacgtgctgtgctgcgggtattggccacggaaacagttctgcggtttttaaacagttccgcactgcggtgggcgtaaatcgtgtcttggctgtcgatgaaagtgctgatgtagtttataggcagacggagtgtctgaggcttgctgtctcccggaatgatattcttcttgtactggggattcaggcttttgacctcatccattccgatgccgcaaacatccgtgatttgttcgaaatgcaggttgcggttcacctgtatggtatctgtggcgtccggaatattggtttccatcgggcagatattgtgcttgcagtagtacgtcattacgtagttggcggctataaaagcgggtacgtatccgcgtgtttctttgggcagatagttgtatatttcccaataatccgttttgccgcctgcgcgccggatggctttgttgatggtgccggggccgcagttgtaggcggcgattaccaggttccagtcctggtagatggcatacatatctttcaggtagcgtgcggcggcccaggtagccttaatcgggtcgcggcgttcgtccacaaggctgttgctttccaggccgtatatcttgccggtgttcagcatgaactgccacaggccggaggctccggcacgggatacggccgagggattaagcgcagactcgataatcggcagatatttcagttccagcggcagcccgtaagtgtcgagcgcctcttcgaaaatgggcatgtagaagttgcaggcactcagcatgaaagccacctggttgcggaggcgtccggtatacatgtcgatgaatttgcgtacaatctcgttatagggcatctccataatggtcggcatgcgcgagagccggtcgatgtatacggaatcgctgaattggggattgacggtagaggtgctgcaatcctttcctaaatctatgtagttcttggctttccagtcgctgagcaggctgtctacagggtaggtcatgctcttgggcaggtcgatgacttcccgccgttccgttccgttttcgcggataatgacatctacgctttcttgggcgtatgcttgcggagttgccagcagtatgctgaacagaagtgaggaacccgcgattattcttttcatatatgtaggtttatttgtcatggataaatctgtttatttgtttttaaaatcggaaactgcactgcaaccccacggagcggttggaggagttgtttatccggttgtcgatgacagctggctccactttcatgctgaggtcgggggtgatgtcgaaattggacagttcggcatccacataggcatcgatgacggacagcaggtatactccgatgaaggcgaagatacttaaatcgcggtatctgcgataggtgtccttgcgcttgcgcaacagctctttcaactgggtttcggaaatcttgtatccgggcggcagcaggtcggtgatgctgctggactgcatattgccgttcatcgcgtctttatatgcggtggagtagtccttgtacattttgctgttccacgtcaaggcataggcacatccggcaaagccgccgtagaatatgggcaatttccagtatttccggttgtagatttgtccgccgccgggaattacgagcgccagccaggtggcttttgtagggttgggaacccatattttctgatcgatttcttttttgaggctgtctgccggcacttccgattctttcaggacgggagcggaagtcatttccagcagctttttcttgttctcggcggcaatgctgtcggcagtggcaatgctgtctgccggggcaacggcctggagaggcggcacttcttccatagtccggttcaggctgtcggcctgcatccgcgctgcttgccgtacggcggcaagagagtctgcctgcaacctgtgtatcctctttgcagcggcacgcggacggctctgaccatacatagcaatccctgccgtctgcatcaggcaaagcagcagggcgatactgatttgatatattcttctcttctttgtcatttattttttcagcgtatcgagaataccgatgatacgttccagttcttcttcgttactgaacgggatactgatttttcctttgcctttttcggagcaggtcaactgtactttggtgctgaagaaactggaaagctgctgcttcagcatattgaactcttcgggcagtttggcgcgcttgggggctatcttgcggccgccgcttttcacggcttctccttcgctcagggatttcacgatttcctctactttgcgtacggaataaccttgttcgagtatctcttcaaaaatcttcacttgcagtttggggtctcccagcgttaccagtgcacgggcgtgccccatgtctatctgcttgttttgcaatcccatctggacgggagccggcagtttcagcaggcgcaggtagttggcaatggtggtacgcttcttgcctatgcgttcgctgaggcgttcctgcgtcagtccgtattgttccagcaggtgctggtaggcaagcgctatttccacggagttcaggtcctcgcgctgtatgttttcgatgagtgccatttccatgacattctcgtcgtcggccgtgcggatataggcggggatgctcgtcagccctgccatttgcgaggcgcggaagcggcgttcaccggcaataatctggtattcatcatcggacagcttacgcagggtgataggctggatgataccaatctctgcaatagaatcggcaagctcctgcaacgctgtctggtcgaactcgcggcggggctgattggggttgacggcaatcttcgacaattctatttcattgatagaggaagagccttcggtttgcacctcatccatggagagcagggcgtccagcccacgtcctaatgcatttcttttctgtaccatctattcttttctgttttacgatttactgtttactatgtttgccatgcgggcggttagtcctcgttgtggctgattaactcttttgccagtgcgatgtggtttttggctccggtggagtccgcatcgtacaggattgtggggagtccgtagctgggggcttcgctcagttttacattgcgctggatgacggtgttgaacaccagttcctggaagtggcgtttcacctcgtcgtatatctggttggcctggcgcagccgcgagtcatacatggtcagcaggaatccctcgatttcgagtgcggggttcagcttggacttgatgattttgatggtgttcagcaatttgctgatgccttccagtgcaaagtattcggcctgtacgggaatgataaccgagtcggcggccgtgagcgcgttgattgtaatcaatcctaacgacggtgagcagtctatcaggatataatcaaactcttcccgtagcggggcgagtacctctttcagtatcttttcccggtttttaagattgagcatttctatttcggcgcctaccaggttgatgtgggaggaaataactttcaatgtatcaatctccgtgtcgtggatagcgtcgcgcacatcggcgcggtctataatacattcatagatagtacattctgcctgcttgatgtctacgcccaaccctgacgaggcatttgcctgcgggtctgcgtctacgacaagcactttcttttcaagtgtggcgagagaagctgcgaggtttatggttgttgttgtttttcctacaccacctttttgatttgccaaagcaattatttttcccataatttcaatgtttattggcagcgaaataagtgataattccgtatagcacctactaaaaaagagaaagattgcaaaaacggttgataagtcaccctttttgttaataactcccggatgcctttaccgttccgttgcctgaagacgtgtgtctcaggcactctttttcctgattagtggggcaaatatacgtatttatcttgaaaaggaacagcttttttgtctcacttgcagaagattaagatttctaaagcaatgagatggcgggcggcgggatgttccggtgataagctgccgcggctgccgtgtccggggaaatgcgtgccgtttctccggagtttacaatagtttgtccgaattaaactcggagtttattcctattaaacttcgggttcattaggattaaacctgaagtttaatggggataaacttatgttaaagcagtgccgatgcaaactcccatgcgaagtatccgcacaacacgcatttcagtaccgtgccgaagaggaagccgaacagggagcccagtcccgacttcagagcctgccgggtttccctgccgccgaaaagttcgccgataaaagcccctaaaaacgggccgagtacaatgccccagggcatgaagaacagcccgatgagggttccggcaaggcatccgcgtgttccccagcgcgttccgccgctgtatttgctgcccagcatggggacgaaatagtcgagcacctgtacgatgacgacaatcagcagccacagcaacagttgggtggcagagtactgcaccttgtcggtgaagtgcagcagcaacaaaccggcataggccacgggcggaccgggaattacgggcaggaaacagcctgccagtcccgttatcaggcagaggatacccatcagaatgagaaagacgtctaacatatctttttgtgtattggtggttaatatgtggttctcttttgctaaatttgtagcaaaattaaaaagaaatatggaaaatcagagacctttgatattgatttccaatgacgacggtatcattgcgaaaggaatcagcgagttgataaagttcctccgtccgctgggggagattgtggtaatggcgccggatgcgccgcgttcgggtaatgcgtgtgcgcttaccgtgacggaaccgattcattatcagttgattcgcaaggatgtaggactgacggtctataagtgttccggtacgcccgccgattgcgtcaagctggcattccatacggtgctcgaccgcaaacccgaccttgtggtgggcggcattaatcacggcgataactcctcggtcaatgtgcattattccggaacaatgggggtggttatcgaaggctgcctgaaaggtgttccctctatcggcttttcactgtgcaaccacatgccggacgccgattttgagccggcgggagagtatatccgcgagattgcccgcaaggttctggaaaaaggcttgccgccgttgacctgcctcaatgtcaacttccccgataccaaagagttgaaaggggtgaaaatctgcgaacaagcaaaaggacagtggaccaacgagtgggagaacttcgcccacagaggcgatgcgcactactattggctgaccggagagtttgaggagtcggaaaaggagaatgaaaagagcgaccattgggcgcttgccaacggttatgtagcggtgactccgaccacggtggatgtaaccgcctatggcctgatggacgaattgaagacctggttctgacggatttacaggatattgaaacataggcgcttatgaagtattatctgattgtgggcgaggcctcgggcgacctgcatgcatcgcacctgatgactgccttgaaggcggaagacccgcaggccgagttccgcttcttcggcggtgacctgatggcggctgtgggcggaacgttggtgaagcattataaggaactggcgtatatgggcttcattcccgtcttgttgcacctgcgtaccatctttgccaatatgaagcgttgcaaggaagacattgcagcctggcagccggatgttcttattttggtggattatccggggttcaacctgaatatcgccaagtttgtccatgcccgtacgcaaataccggtgttctattatatttctcccaagatatgggcctggaaagagcaccgtatccggaatatcaaacgggatgtggacgaactcttctccattcttccgttcgaggtggagttcttcgagggcaagcaccattatcccatacattatgtaggcaatccgacggtggatgaagtcactgccttccaagccgcttattcggaaactgcggatgagttcaaacgggccaacggcctttcgccgaagcctgtcattgccttgctggctggcagccgcaagcaggagattaaggataatttgccggatatgattcgggcggccgcttcatttccggagtatcagttggtgctggcgggagcgccgggtatctctccggagtattataaggaatatgtcggcaatgcggacgtgaagataatctttaaccgtacttatcctttactccggcatgcggaagcggcattggttacttcgggcacggcaacgctggaaacggcattgttccgggttccgcaggcggtgtgctaccatacgccgatagggaaggttatcgctttcctgaaacggcatatactgaaagtcaggtacatttctctggtaaacctgattgccgaccgtgaggtggtgaaggaactggtggccgataccatgacggtggagcagatacgtgcggagcttcaacgtatcttatgcgatgaggcgtaccgccggcagatgctcgatggttacgaatatatggcatcccgcctgggcgaggcgggagcacctgtgcatgcagcccgtgaaatggtggctttgcttaagaaacgttttaaaaagtaggacgatatttaatttcttgttaaaaggaataaagccggtgcagtaaatgcccggcttttgtattttctatacagaaagaaataaacaaaagaactttgattatgagaaagctacattggttatttatggcagtttgtctggctgtgatgccggtactgcattcctgtgatgacgatgaagggtattcgatcggtgatttcactccgccgctgtgggctacggtgcgtgttaccggcaatgctttttatttggactgtgatgtgtggggaacgctctggcctgtgaatacagacttgtggtggtacgagccggttgacggaaagcgtgtgattaccatgttcaatcctttgtccgatgagtttgacggttacgaccatgctgtgaagatcctgagtttgcaggatgtgttgacgaaagaggtcgagacgctgactcccgagaccgaggaagagttcggcaatgaccctgtcctgatatttgaaggcgatataagcatcagcgggggatatatgaatatcatatttatgcagaatctgccttccggcactaaacatcgtatcagcctggtacgtccgcaagatgatgcggagttgtatggagaagacggttatatacatttggctctccgctataacgactatgacgatttgacggggttgcgcaagcccggtgcggtgtcctataatctgaacagtctcaacgtgacctctgaaaccaaaggtatcaagctgaaaattaattcggaaaagaatggcgaggtggaactgacgttcgacctggtggttaccggtgataatacgaagaatatacgggaccttgatttgtcggagatgcaattgaaataagtgtttccttataccgtatatataggccaaagggcatagaggctacagtatctttcctctatgccctttggcctatattcgtttaagatttccgtcaaatcattgtcattacatacaggtagactaccgctgcgggaatcgccatgagagcgctgtcgaaccggtcgagcattccgccgtgtcccggaagaatgttgccggaatccttgatgcccagttgacgcttcatcagcgattcggtgaggtcgccccaggtgccgaaaatcactacggtgactgccagtcctgcccattgccatgtagacatgaatgggaagaaatgggcaaatacaaaggatgaggcgatggagaaaaccgcgccgcctatgctgccttcccatgatttcttaggcgaaatgcgctcgaacaggcgatgttttcctatcagagagcccacgcagtaagcacccgtatcgctcagccagatgaatacgaatatggaaagcggcaggatggggttataggttacgctgctcgtttcaggtgaattctggaaagcgagtacattcagcaatgcgaaaggcaaggctacatatagctggctcagcattgcatacgcccagttgccgatggggttctcctttttcaggtataactccgtaatcatcaaatagagcaataagcccagatagggaaggaatacgcgcgcatcgatggcggatgtgcagaatcccatgagtgcaagaaacagataggctccgcctaaagcggtaatcgtcttgttgatgctgactccgccattcctgtttaccagatgggcaaactcgtgtacgctcaatgcgccgatgatagtgaatagaatcccgaatgagagggggctgtaaaggatacagcccaccagtataactacaaataatgcacctgtaacagcacgttgtatgaaattatttttcaaggtgttttcgttttaattgttcgagccggtgttatggctttcttcttcttttacctctttttccgcttcctttgccttggcagcctctttttcttcggcttctttcagctccctggaagttttgcttgcgctgataatctcttcggaacgggaagcccacggacgcttgccgaagatttcttccacatcttctgcaaagattacttccttgtctatcaacagttgggccagcttgttgtgcccttctttattgtcggatagtatcttcttggcacgctcgtactgttcgtttaccatacgcttcacctcttcgtctatcagttcggcggttttctcgctgtacggacggttgaacgagtattcgtcgttattgtaataacagagattcggcagtttgtcgctcatgcccaaataggcaatcatgccgtatgcctgcttggttacacgctcaaggtcgttcatggcgccggtagagattcttccgatgaacagatcttctgcggcgcgtccgcccaaagtggcgcacatctcgtccagcatctgttcctttgtggtaatctggcgttcttcgggcaggtaccaggctgctcccaaagcacgtccgcgtggaacgatggttaccttaatcagcgggttggcatattccaacagccaggagatgctggcgtgtccggcctcgtgtatggcaatggaacggcgttcttcttcggttgtgattttggttttcttttccagaccgcctacgatacggtctaccgcatccaggaagtcctgtttctctacaaatttctttccatgacgggcggcaatcagggcggcttcgttgcagacattggcgatgtcggcgccggagaatcccggagtctggcgtgccagtaactctacatccaccgtattgtctatcttgatggggcgcaggtgtacgccgaatacttctttacgttcattcaggtcgggcaagtcgacgtgtatctggcggtcgaaacgtccggcgcgcagcagtgccttgtccaatacatccacacggttggttgcggcaaggatgatgacaccgctgttggaaccgaatccgtccatttccgtcagcagttggttcaaggtgttttcgcgttcatcgttaccgcccatggcggcagcttttccacgggcgcgtcccacggcatcgatttcatcgatgaatacgatgcaaggcgctttctctttggcttggcggaacaggtcgcggacgcgggaagcacctacgccgacaaacatttccacaaagtcggaaccggccagtgagaagaacggtacgttggcttctcctgccacagcctttgcaagcagggtcttacccgttcccggagggcctacgagcaatgcacccttgggtatcttaccacccagatctgtatacttctggggttgtttcaggaattctacgatttcctctacttcctgcttggcctctgcaagtccggcaacgtccttgaaagtaacctttaccggagagttcttttcaaacagttgggctttggatttgccgacactgaagatgccgctgccgccacccatgccgccaccgctgctccaacggcgggacaggaatatccagaagccgataagaaatgcaaacggcaatatctgccagaggattgcaccgaagtaattgtgtttcttttcgtagctgatagaaccgtcgaaacgtgtctcgtccttttctttctgcaggaagtcgcccaagctttcgcgtgagggagcttctgttgtaatcaggggattcttgcccacacggcttgaatctgctttgaatacattgggcacatattgcggcttgacgtatgcctctacggagttgtcgtcataaccggtcactttgcttatatagccgttgcgcacatactcctgaaattcatcataagggatgtttttactggccgaaccgctttcattggtgaggtacagtcccagcaacatcatggctataatcatatacaaccagttcaagttgaacttgggcatattggtttttgtgggctttttattggtgttattgtccataagtctaaattaatcgagatcggggatttgggttagtttggcatctgcccataagtgttccaagttatagaattcacgcgcttccggctggaaaacgtgaaccagtacatcagagtagtccatggctacccactcggcattgcgcagaccgtctatcgcaaaaggtttgctgttcgctcctttgcgggtgaagtctttaacggactccactatggcgcttacttggcttggggagtttccttgacagatgacaaaataattacatattgtgtcgtctatccgggtaaggtctgctatgacgattttttttccttttttatcttgaataccttctgttatttgttgaattaattttttagcttcgttcattacacattattaatattaaacaggcgacaaatatacgttgatttatcatatcaaacacgcaaaaggggaaaagtctttcattttttgtttttttttaggtatataattctttgtgtcatggtatcttatcagattttaatgaaaaaaatagcgaaaaatgttttggattaaagaaaagtttgtatctttgcaccgcaaaacagaaatgaaatgctcaattgggctatggtgtaatggtaacactacagattctggtcctgtcattcctggttcgaatccaggtagcccaacacaacacaccgataaaaacccactaaaatcgcaagttttagtgggttttttattgcttttcgaccatgtgcaaatttttcataatcggtattcgggttcagtttgaaaactcggtggtcgaatcggtggttgtgtcaaaacaagaatatcagcgagttcgttttgacacaaccactttttatatgcttattattataagattatcacatctactcccggctttagcttttcttgattttgcggatcggcaatctgcatatccgtcaccttacctttgcttttctttatttgtacaacacagggcttcagggcttttaccgggtcaacgtaaaaacctgagggattcata

SEQ ID NO: 4131 - DNA, 185 bp, Unknown
  gut microbiota DNA sequence
ctctcttgcagcatttccagatggcagtcgtattcctgcagtttgtccctgtgttcttccagttccttcagctgtttgcgtttctttttcagctcagtcttttcctctttcgcggatggctcggaaacctgttccagtgcatgacgcaattctcctgccatttcagtcagcatggccggagtgaa

SEQ ID NO: 4132 - DNA, 23562 bp, Unknown
  gut microbiota DNA sequence
cgcaccaaattcctctgaaaagcaagaacaagctttcttgcaacactcgcacaatattttttgtactatccgtgcattgcctattcgtttcatcaaatcaacccggtagggcaaaggcaaatgccccatactgttttgattgattatttctttcagtttttctacttgctgtatcatgctggtttctattttcgctaatggtttagcggggaacgctgtaaggcgttatcacgcttcgttaacatcatattttattctcattccagtgtaccatgtcgtatggatagtagggcaatcctttcaagctggtatcatctagtcccaagaccttgactaacgcaccgctttcaaagctccaatagccgtcatgtctgataccatatttatggtcgtcatgccaagcacaatcagaatgacctcgataccattcctttttaagatacttctctaatttctgaatggacaattctttactttgattgttgctggaaattatagacaatgtactttgataaggaactggaaacaatactgtgtcagaacatctttcccaatcagttaatctgtattttattaaaaaatcatataaggcatcattaacattttcattgtcaatcatgcttgataatatccttatattttgttcatctgtatctaacataattccaatagacaacatccataacatctgtacatacataccggtaatcgtccaatgatttgttagcgttttcactaaattattgtaatcatcttttaattttgccatatcttccccaactgaatacttggttagaaatgaattcaatttacatccaaaaagtgtaactgttttattgtaagcaacattagaatttggagcagagtataattgaatatgctctttctctgcattgataatttccataatactgctttctaactgtttacaccttttggaatatccagcaagttgtttcctatactgttcttcagtaaaaagtttatctcttgtttccatatatggtacactgtttttgatgttaatggttggcagggaacggcttgtccgttatcctgcgttgttactgacattttcttaccaattatctatgttagcagaaaacgccttattattcgtttgttcttctatatctgtaattccgtatgtttccagtatatattcatagtcgcctatactcataacatttattcctttgtatactgatattctaagactatagcgaacagccaaaagttctccaaccatactatacaaggcatcatagacaggaagtccaccgtctttgtgttcagcccatatttgtattacatcttcattcgctcctttgataattttaattgtgggagagtaagataggttttcggctaccacctgattgctttggtaatattgcaagactggttttatcaattctgttgtatcttcattatggattaagaaaagatgatttctaccatttacatgctttgagtaaatagttatgtccttatactgcaatacgttttctgctttcatcttattcatgtaaagaaataagaggaagaaagataatatgtaatactgaatattcatattccgttgcttttgtcagtaatggtttggtgaggaacagcgttcagctgttatctcgaccttgttaacgattttatttcacaatcataaattcatttccatatggataaaagtcattatctatccatagtttggagtagtctgataatttgtaaatttcaggtttatacagattcaatactttatccaaaattctttctcggaatattataccatctctatattctatactattcaaaacaaagaaattctgtttgattgaaatgtctttcagtttcatatcaggatatactgtaaaacaagtacctagttttttctgaaagtcactctgatatgttatgccttttccgaaatgaaaagaatcgttgtcaaaatgatttatacgtagagcatagtatttcttatccgttagagattcgtttttcttgtttactaccttgacagttgcaatatcatatttatcgataaaaccattttcttgaagtaaagacaaaaactcttccgatacgattttgagttctatactgcttttgtcaagaaaatcaaattgcaggattcccggtttcttgttgcatacaaggtataagacgggaggtaaattctcgcgccatccgtcattattttgccacatccattgcccgagattctgaaacttctgccttttactttcatcatagatatcacaaacatcagatttgccatactccaataatcctttaggaagtttatctatcccatatcgccaaatataaagttcttctgtcttcataattattatcgttaatattatttgtaaaaacacttgtttggtatcttctattttgataactgacacctgacaggtgtgtttcctaatctctaatagctacaccctacaaatcatccagcatatcaagtggattgggtatgcttgacttgagggcattcgttacatgaagataaatattcgtcatctttaatattgttgtatcccagcaaattttgcccatgatgcgtacctgtatccgttcactgacaacgccttgtgaggtgagattcagtagtttcagatagtcttccggtaacatgtatgtctgttgtgaattgggatgctgcacgtacgtccggctgtaatctatgtaggcgtagggagaagagcggtcggagaaatccggtagtttaaaggcggtaactgttatgtaggcggaagcgttgtccgccatttgtatgccgctctcctgggaaagcagtagggcaattgccggattatttgcatactttatccgtatgtagtgttcaccgttccctttttctctatacaggacgatgcttgaccgttgcttctgtatcttgtccatatctttggcggttgctttatacctcaaagataaagcaaagtattgaaatctgaacggttgttcagaaaatgtttttatcgaaatattttaaatattgctaaaagaagtcaggctttcaggagcgagtatagataatctaatttctccttcaattcgtctacatccagaccattcaggaacgattgctcgtaggacatgcccaggaatatttgacggaacaacgaggcggtctttttcacatccgtatcttgctttatttcaccgctctcttttgccttctgtatgaccgccttccatagttcgtgttccttgcggaatatttcttccattttttcacgggctccgggataatacatcctcacttgggaaaggaaatggaaataatagaagttgggacagcattcattatcatctacacagcattgtacctgtttgatgatatggttcatgactgcactcactcctgccacatactgttctataaattcagccagtgtttccgtcggcccggcaaacttgttggccggtgtctgcatctgtatgacatacttgtctgctaccgccataaacaagtcgagtttatgaggaaaataatatactacccccgtctttaccaccccgcaggctttcgccagcgtgctgatactcgctttctcgtagttcatcctcaaaaacaccttgaatgccttgtctatcacttcttcccggttggtaatcatatcggattatcctcttttatgtttctttttgcgaaggtgtgctttttattttgaagtttttacgttagttcgtttacatcaaagccgtcaaatcgcagtatatacaaaagaaaaaagcagctatctttttagataactgcttgattttcaagtgatccgcttggggttcgaacccaagaccccaacattaaaagtgttgtgctctacctgctgagctagcgaatcaatccttattgctgttaagcgagtgcaaagatagatacttttttgaaagttgcaaaagattttcgctttttttcttatctttgtaccgaaatttcgtgtgcaggagtctcacacttcatctcgaacattatattttatactttatattttatacttaactcacatggcaacagtagacgataagaaaattatcttttctatggtagggctgaacaagaccattcagcagaacaataagcaggtgttgaagaacatctacctttcgttcttctacggagcgaaaatcggtatcatcggtttgaacggttcgggtaaatcgaccttgctgaagattatcgccggcttggacaaatcctatcagggcgaagtggtgttctcgcccggatattcggtaggatatttggctcaggagccttacctcgatcccgcgaagacagtgaaagaagtggtgatggaaggcgtacagcccattgtagatgcgctggcagagtacgaggaaatcaatcagaagttcggactgcccgaatactacgaagatcaggacaagatggacaagctcttcacccgtcaggcggagctgcaggacatcattgacgctaccgatgcctggaatcttgacagtaagctggagcgtgcgatggatgcgcttcgttgtccacccgaagaccagtcggtagaacatctttccggtggtgaacgccgtcgtgtggcgctctgtcgtctgttgcttcaaaagcccgacatactgctcctcgatgagcctaccaaccaccttgatgccgaatccatcgactggctggagcagcacttgcagcagtacgaaggtacggtaattgctgtaactcacgaccggtacttccttgaccatgtggcaggctggatacttgaactcgatcgtggcgaaggtattccctggaaaggcaactactccagctggctcgaacaaaagaccaagcgcatggagcaggaagaaaagactgccagcaaacgccgcaagacgctggaacgcgagctggagtgggtgcgtatggctcccaaagcccgtcaggcaaagggaaaagcccgtctgaactcttacgacaaactgctgaacgaagacgtgaaggagaaagaagagaagctcgaaatcttcatccccaacggtccccgtctgggcaacaaggttattgaggctaagcatgtagcaaaagcttttggcgacaaactcttgtttgacgaccttaacttcatgttgccgcctaatggtattgtaggcatcattggtcctaacggagcgggtaaaaccacccttttccgccttattatggggctggatacgcccgatagtggcgagttcgaggtaggagagaccgtaaaagtagcctatgtggaccagcagcacaaggatatcgatcccaataagagcgtttatcaggtaatttccggcggcaacgacctcatccgcatgggtgggcgcgatatcaatgcccgtgcctacttgtcgcgtttcaatttttccggtgcagatcaggaaaagctttgcggtgtactttccggcggtgagcgcaaccgtcttcacctggctctttgtctcaaggaagaaggcaatgtgttgcttcttgacgaacctaccaatgacattgacgtcaatacactgcgtgctctcgaagaaggtcttgaggattttgccggatgtgctgttgtcatcagtcacgaccgttggttcctcgaccgtatctgtacgcatattcttgcatttgaaggcgattctaatgtatttttctttgaaggctcctattcggagtacgaagaaaataaactgaaacgtttgggtaaggaagaacctactcgcgttcgttatagaaagttaatgaatgattagtccgggttttaaactgaaagtatacctgctttatctgtaataaaaagaaactctgcaagatatttgtggagtttcttttttttaaaaagtttttagaatactttattaggctgaaaaaatgtagtgcaaacgtaataattatttgatatataaatagtatatttgcaactcaatatcattttaaactttaattaacactatctattaacaaaaagcagaattatgagaaaacatctaattcaatttctgttggttgccgtgttgttggtatttacttccgcagcatgggctcagaccacagtgcatggtcagcttgtcgacgctgaaaccggcgaacctttggtaggtgctgccgttatggtagagggaaccactcaaggttccgtgaccgacattgacggctatttcaagcaaagcgttgcttcgaatgccacattacttttcaaatacatcggttataaagaccagaagaaaaagattacacagaaaggcgcttccgtagagttggggaccatcaagatgcaacctgatgcagtgatgctgtcggatgtgacgattacatcgtccgttgcagtggctcgtaaaactccggtagcggtatctaccgtagacccggtgttcattgaagaaaaactcggttcgcaggagtttcccgaaattctgaaatccactccgggtatctataccactaaagacggtggtggttatggtgatgcccaaacacgtatccgcggtttcaagagtgagaacgtggctatgatgattaacggtgtgcctatgaacggtatggagaatcagaaggtgtactggtccaactgggccggactgtccgatgtaacccgtagcatgcaggtacagcgcggtttgggtgctgccaaagtatctgttccggcagtgggcggttctattaacatcgtaacaaagagtacggaagccaagagaggcggattcgtatcttacggcatgggtaacgacggttacaataaaatccttttcagcgtatcgtctggtctgtccaaagatggctgggcattcacgttgctgggtggtaagacctggggcgacggatacatccagggtacggatttcgaaggttacaactggtttgccagcatcgctaagcgtttcaacgacaatcaccagttgtctcttactgcgttcggtgctccgcagtggcacaatcagcgcaacaaccagaacggactcaccatcaaggaatggcagcgcgtgcagaaatatatgggtgagaaaagcccttatagatacaacccgactttcggttacagaaatgggcaggcatacaactcgtccagaaactcctatcataaaccgcagatttcactgaaccacttgtggcagatagaccgcaaatcaagtttgagtacggcattgtacgtatccatcggtcgtggtaacggttacagcggttcgggtgacgctgccaaccgtagccgttggtatggtgcaagtaacggattggtgaacaatgatttccgcgaagcagacggaactttcgcttacgacgaggtagaagctttgaatgaaaccagcaccactggttccaagatgattatgggtaagtctatgaacaaccacatgtggtacggattgctttctacttataccaccaagtttggtgaaaacttcgacttctatggcggtatcgatttacgctattataaaggtttgcatcagaatgtcattgtagaccttttcggcggcgactattttatcgatgctgaaaatcgtggtaaaattttggccgagaataatccggcagctgctgaccccaatttcaagaaccagaagttgggtgtgggtgatgtatattaccgcgactacgatggttttgtaatgtccgagggcgcattcgcacagcttgagtacaatcgcgacaagctcagcgcattcgtttccggtggtctttccaacaccggttattggcgttacgatcgtatgtactatagcaaggacaaggctaaatccgataccaagaactatttgggtggaaacataaagggtggtgttaactacaatcttaatgaaaagaataacgtgttcatcaatgctggtttcatcacccgtgctccaatgttcgatacctctttcgttaattcgcaaaactctcatgcccgcaacgaagatgccaagaacgaaaaaatcatgtctttcgaagttggttacggctatcgtagcggcatattcacagccaacctcaatgcctattacacccgttggatggataaggctttgtatgattctggcgattttgactataatgtggatggacagaacatcaaggatcgttataccttgaatatgactggagccaatgccaaccatttgggtgttgagcttgactttgcaatccgcccgttgagatggttggacatcaacggtatgttctcttggggtgactggcgttggaacggtaatgccagcggatattattacaatgctgccggtcagttgatgacagacttcaagggtggtacattggctgatatgtcacaagcttccaactacaaggccaatattaaaatggataatgtatacgtaggcggttcagcgcagactacggccgctctgggcgtgaacatccgtcctatgaagggattgcgtatttcggcagactggaacttctttgcgcgtaactttgccgactatgacatcgatgcaggcaatgccggtttcggcgatgaaatcgtagtggttagcccatgggagattccctcgtacagcacgttcgacctgagtgcgggatactctttcgactttggtaaggtacgcgctacactgagcggtaacgtcaacaacctcttcgaccaggaatacatcgctgatgcccgtgatggcggcagccacaactgggagacggctacacgtgtactctacggctttggacgtacttactccgtaagactgaagttcaatttctaaacctttaagaactacgattatgaataaaaagtttatatacagtttgtgtgcggccgcttttctgatgacgggctgcgattacaacgaggacaacttccctggttacgatgaaggtgggcgtcctactgatgttgccaagattgtttacacgcttaccgatgccgattacgatgcgatgggcaaggatgtgaagaagaacaaatacttctctgctgatgccatgcctgatgattacataccggactggttggccaaaacttacctgggagcggatttgaactcctcggcaaagattacgtatcgtttcaagacggtatacgccaagtataacgatattccgtatctgcaactcacagaagaagattatactattattcatggagaagggtattatggagcctatctgaatgaggatacagaaagtaaaatgtataagatactgaatgaaaagtatgctgatgccgaggacggtgcattctctttcatagagtatcagtacaataaggatgctaaaccggaaaaagtggaaacccctattgccaaatacgattttgaagatttgaccaagggtgatttggagaaaatatccggttggtacatcagtgctaaaggtaataaatggactgtaggcgaatacagtaagaataagtatctgcaatttacagccaacaaggctgacggtcctgcggaagcttggttggtaactcctgccattaaagtagaaggagccgacaagaagtttgcatgggatgttaaagtaggatattggaaacatgacggcttgcaagtactcatttcaaccgattttgacggtaaggatgtaactaaggcgacttgggatgatgtgacaagtaagtttacaattcctcaagaacctgcaaaaaactggggagactttggtcaagcaggcatcatgaatttggatgattatgcggataagactattcatattgctttccactatacaggagatccggaagaaggtaaaactaccagttatcagattgacaatatcgtagtgggtaaggacattcctactgtagtcaatactgaactgcgttttgctttgtatgaacgtaaaaagaacaagtgggaactctttaaaaactctgctgaggcacaatttattgcattggatgattatacgagcatgggtactgatgacggacaaccgggtaaggactattctttcagttctaccgtcaaggcagaaaactacattccgcgttatttgactaatgccgatgaactgctttacccgataggcggcgacacttgcaccgtaatctaccgttattatgcaggtagtggtaaataccaggccaatgccgaccagtacatctacaacgacaccgttaacgtatggcaatactgtgacaacatcgttattgaaacaagaccttacgcttacaacggtacggaatggttgtattctccgagcatcctcatcaatctgcccgtagagaaaaataatgctgaagtatctgcattctatcaggccattacggattgggtaaaagagaatcattctgaatacgtaacctcttatggcaataatgattactattacggcggttcggcttatcagaacaacttcgacttccgcgtaagcgcatggcaaggacagggcacgtacgatggcatgtcttccgatgaaatcactgcactgatgtgggagcgtctgcccgaagccttcccgcatgcactggaagtcctttatgctgatgctgcaccagccgataatggtgtagacgtaatttatacgataaacttcggtatatacgatggtagctctaccactacctataccatacagtataaagtgattggcaaaggaaagttcgaatacgttgaagactctttgcagaaagcggctgtatagcatattgctgatataagctgtcagacagagatttgaaaaggcgcggattacgcggatttcacgagatgtttttattcgtggagtcggtgtagtccgcgtctctttttgaggatatgtttgttgccgttacctttcgggttaggatttggattgtgatatatcactacttgagcattgagatagttcagtagtaaactttttacgagtactcggagtggatgatattgttatacagtgaggtgttcttgctcactcttagcaaattcggtacaagctgttgctgcggtggttacaggcttcaaaatttgataacgataagtaagatcaggtaatgtttctgtcatgcgggtcatttcttctttttattgtattatttatccataatcatgcaaataatagcaaaaagtgttatctttgagcatctttctttccgtaaggggagtgaggtgcattttttcgatgcgggtgtttcccaaacatgtttttgtaaagcagataagataaccccttacataaccccaaaaaataaactaatggataaaagtcctctatgcacctgcctgataaagcaggatttggaagaagccgccgatccttatgagtttcttgataaaaactactcgatttccggtattctcgacaatttggataaactctccccaagagaattgaaatgtgcttgctgcctgttcggtgtggcattgcagaaagcctgcaagaagaaaaggcggtggtagaggatggcatagtattgtttgtctttataagaagcatggcgggtcggttatgcgacaaataaaatcaggcttaattcttaaaaaatgtagcatgattgtaatgcatttatatattattttgcttatctttgccaatgttttcaaaaatataacattttaagaaactaattaaaagctattatgttaaaagtgttaagacttatttttacgtttatgctggttctgacggctgcgggcgtaaatgcgcaggttacgacttccgctatcagcggtaaggtgaccgacgaacagaatgagacggtaatcggagcgacgattgttgccgttcatgagccttccggtacacagtacggtgctattaccaatgtggatggacgttacacgattcagggtatgcgtacgggtggtccgtacaagcttacagtgtcttatgtaggttatcagagcgcagtgttcaccggtatcatgttggaattaggtaacacttatacacaaaatgtaaaactgcaccccagttcggaattgctggatgaagtggttgtcgtagccgatgccaaaacacaaagcggtgctgctaccaacttctctgccaactctattgaaaatactccgactgtagaccgtaacatctacgacatcgtgaagaacagtccgttggctatgacttccaaaaacggcggtatcactttcgtaggctccaacaaccgttacaacagtttccagattgacggtacggtggccaacgatgtgttcggtctttctgccggtggtacgaacggtgctcagacaggcgccaatcctatttctatggatgccattcaggaaattcaggtagtggtggctccctacgacgttcgccaaagcggatttacgggcggcggtatcaacgccatcaccaagcagggtacgaacgaaacccacggttccgcttacacttatttcaacaaccagaatatgtatggcaagtatagtgccgtacgcggttacgaaaagtcgccgatgtcccagcagttcgaccgtacctacggtggtacgttgggtggtgccattatcaagaacaaactgttctactttgtcagtgcagaaggtaagaagaacagctatccttcaagcacttatccgggatataccactaattacatcaccagcgccactgccaagcagattgccgaccaatacaagaagctcaccggtatagaagaaacttacggtgaacgtgatatcgaacagaaatctttcggtcttctggcacgtgtggactggaatatcagcgaaaagcataaacttgccgtacgctaccagcacaacaactcttataaagatgtgtacggagcaaattccaccacttactatttcggcaacagcggttatcgcatgaataacaagatgaattcggtagtggccgagttgaactctcgtctgggagataacctctacaacgagttgcgtgcgtcgggtacgtttgtccgcgacttccgcgatacggaatattcaggtccttgcgtacaaatcagcaatgtcacaggcggtgacggtgaaactaagattacagccaatatcggtacggagttctcttccggtgccaacaagctgaatcaggatgtgtatagctttgaggataacctctcttggtatcttggcaaccatacactgactttcggtactcacaacgaaatctacaaaatcagcaacttgtttatccaggcttcggaaggtgcatggtactataactctttggattacttcctgcaagacaagccctacaagtttacttacaagtacagcgaccccgacatgacgggtggtaacctgaaatatgctcctgttatgaaagctggccagttcggtttctatgctcaggacaaatgggtagtgtcaagagacttcaacttcacttacggtatccgcttcgatattcctctgctgttcaacaaacctactgtgaatcctactttcaacgactttgcagccggacgtaatatgggtgtgcgcgtaggcgaaactccgagtgccaagctgatggtttcaccgcgtgtgggctttagctggtataccgacgaagaacatcgcacgcttatccgtggtggtgtaggtatctttaccggtcgtgtaccgtttgtgtggctcagtaactcgttcaacaatacgggtatggaacagaaaggtactactctccagcccaaggatgaatcgggcaagaacgataccaatgaagctccttcattgggagaatacaaggataatccgctggctgccgctacaggaagcatgaagcaggatatcgtgactaccgacaagaagttcaagtatccgcaggtattgcgtgccaatctggcttgggaacagttcttgccgggtgatgtgaagatgactctcgagggtgtttactccaagaccatgaataatgtattcttcgagaatcttgctcttgtggaaaacggacaggtgtatgccgttccgggtgtagaggcttccgcttctccttcttataaggtacaggcgggtgactattactctattatcaacctgaagaatacaaacaagggttatagctatgctctttcggccttgctggagaaacacttcgggttcggtcttgacatgtctgcatcttataccttcggacactccaagtctgtaaacgacggaacttcttccgttgcctactctaactggaagtacaactactcccgcgacaccaacagcggtaatgaactgggtttctccaagttcgatattcctcaccgcgtaatggctcaggtggcttatactactccgaaatactggaacaactggatgagcacttctatctctgttatctataacggattctccggaaaccgttacagcctgaccatgaatgaaacttccgacttcaacggcgacggacagaagggtaactccctgctgtatattccgactgacgaagagttggataagatgaagttcgtggacgctacaaacaaaaagggagaagtaaccatgactgccgaagaaagccgccaagctttcaaacagtggattgaaggtgatgcttatgccaaggatcatcgcggacagtatgccgagcgtaattccaacctcaccaagtgggaacatgaaatcaatctccatctggctcagaccatctataatcctaaggggttgggcaaactggaatttactttcgacattatcaactttgccaatatgttgaacaagaaatggggagcaacctatggttcactctataacctttcaccgatttccgttacaaaactgacaacggtggacggtcagaccactcctaactatatttacaacaagtccgaaatcaccaagagtgatgtttcctcacgctggcatgctcaggtgggtatccgcttgacgttctaaggatatttttgttcatgtttatttttacggtagagctgttccgggaaaccggggcagctctatttttttattgtaccttgagcgtaagaggaaatacggtatagcagagtggagggtgtttggaatcgtcttttaatacttcaccgtaaatatcaccgggttgtggtcactgcataaatccagattaggagagtagtagtcggtgcattccagctccggtgagtggaaggcatagtcgatgcgtagcatgcgcttgccgtaacggtaggtgtacatataaccgtgtccgcctgtcttgaagccgtccttgaggctctcggagaaccggtgataggtgtaggatgagggtagggagttgaagtctccgcacaccagtacggggtgagggctggcagtagcgagctgacagatgctgtcggtctggaaagcacgtttcacgaagttttcatgcagggtttccgctgcatcctgtacggcttgcgcttcacggcgtgtattgtcggcggcaagttcgcgttcccattttttacggttctggctgacgctggtagtttgcaggtgattgttcagcaagcggatggtatctgtattcagaatgatgtcgcacagcatgctgcaattggcgctgtgagggtaggtgatgaaacgtccgccgataagcgggtagcggctgaatacggcgatggggaggatgccgcggatggagtcgtctgcggggataatggcatattgccagtgagaaagggcacgacgcagactgtctgccgtgaagtgtttgttttcgccgaattcctgaaagcagagtacatcgacgtgttgttgctgcatatacttggcaatctgtttgcaggagtagccggtaatttcgtttccgaagttatggacgttgtaggtggctacggtgaggtaaccgctgttttcgccttgccggttcggtgccggtgcgatggcgggtacttcctgaggagaaccgaaacggataacagctgtgaggtattcccagttgaagaagaaagccgtcagcgtgacgaacgcccatttcctgcgtgccaatgcccagcagagggcaacaatcaggcaggacaccagcagtaccggtacggcaagtcccagcaagggcatgatggtggaatgttccggatggtaatgcccggaacgggatgcgatgatggtgacaacagccagtgcaaatgtggtagctatcagtatcagatgaaacagacctttgacggcggtttttcccatgattaacgcaggtgtgttttataaaagtgtggcgaaagccccggctacaagcttgccggagctttcgtcacacccttttgctggttattttattactgaattaatcggctttccgtccaagaaagcttttatattatccagcatgatttgcatgaggcgttcgcgtgcggcggcgcttgcccaggctatgtgcggggtgatgtagcagtttcgggcggtgagcagcgggttgtcggcacggggcggttcctgcgaaagcacatccagtccggcggcaaagatggtgccgttgttcagtgcatcggcaaggtcttgctcgttgaccagcggaccgcgtccggtgttgatgaggatggcgttgggcttcatctgtttcaagcgggcggcattgaccagttcacgggtggagtcggtgagggggcagtgcaggctgatgatgtcgcagttggcaaaaagttcatcgagctccgttttcttgatttcgggaggaagctggaaaggcgatttggatgtgtatgcatgtacttccatgccgaagccgatggcgatgcgggcggtgttgtagccggtttgcccaagaccgatgataccgattttcttgccactcagttcgatgagcggagtgtcccagaagcagaaatcggggctgttggtccaacggcctttgtgtatctcgtcggtgtagtgctgcacccgttgggtgatgttgaggatgtgggcaaaaaccatttgcgcaacggacggggtgctgtatgccgggatgttggtgaccgtgataccccgttctttggcagcggcggtatcaatgatgttgtatccggtggcaagtacgccgatgtatttcaactggggcagggctgcgatggttgttgcatcgagcactactttgttcgtcagcaggatgtctgctccggcagcacgttcaagcacttcggcaggggcggtacggtcgtaaacggtacattcgcccaggctcttcagttcgtcccaggagaggtctccggggttggcggcatagccgtcgaggactactattttcataagtgttattataagttgtttctaatgttgttctgcagaatttccatttctaaaatctttcctttccccacagggcctgcatcctttctttatgcttttgttcggcggcatttgcttgcggctcccagatgcggcggtctttcagttcgtcgggcaggaactgctggcgcacgaagttgccggggtagtcgtgggcatatttatagttgtcgccatagccaagctgtttcatcagtttggtgggggcgttgcgcaggtgcaggggaacgggcaggttgccggtttgccgcaccagttcgagtgcatcgttgatggccatataggccgagttgctcttgggactggtggcgaggtagatggtcgtctccgccagcgggatgcgtccttcgggccagcccactttcatgatggtatcgaaacaggcgttggccagcagcagtgcgttggggtttgccagcccgatatcctcggaggcggagataacgagacggcgggctatgaaagcagggtcttcaccgccctctaccatgcgtgccagccagtagatggctccgtccgggtcgctgccgcggatggacttgataaaggcggagatgatgtcgtagtgcatctccccgtctttgtcgtaggcgaggggattttgctggagacgttcggtcaccatctcgtcggtgatgacaacggggtctgcggtttcggactgcaccacgaggtcgaggatattaagcagtttgcgggcatcgccgccgctgtagcggagcatggcggtagtctccttgagctctatctgccgttctttcagttgcacatccgtggttatggcgcgctggagcagttccagcaagtcatccttctccagtgatttcagtacgtagagctggcagcgggagagcagcgggcggattacttcgaacgagggattctcggtggtggcgcctatcagcgtcaccgttccctgctccacagcgcccagcagcgagtcctgctgcgacttgctgaaacggtggatttcgtcaatgaacagtatcgggcttgcctgcgagaagaagcggttgctcttggcgcggtctatcacatcgcgcacatccttcaccccgctggttacggcactgagtgtgtagaacggcgtctccagcttattggctataatctgcgcaagcgtcgtcttacccactcccggcgggccccacagaatgaacgaggagatacgtcccgcatcaatcatcttacgaagcacagcccccggtcccaccaggtgcttctgcccgatatattcgtctaatgtcttgggtctgagtctttctgctaaaggttgcatggggttagcgattaggggttagtgattagtgattagtgattagtgattagtgattaggggttagtgattagtgattagtgattaggggttagcgataggctttttttacgggtgatgatggaagaggttatcatcttcatcagttccgtacagtcagtatccaaggacacatattgctctgtggtgatgtagtttgttttatttagcaattcgagccagtatagggtttctgaacattccttttgagcaacggaatatttgtgtataaagtcggcaggggactcggcaaacagtccttccctgatattggctcccaccgacgtaccgcttcttaagatttgtttagacataattctttcctgtttggtttcattcaagaaattatataaattcacaatgcgtatagcaaagttcattgatttgttttttaatattccctctcccatataaccgctcctcgctcatcactaatcactaatcgctaatcactaactaaaaaatcatcaatatcatgaagcgcactccgcctttcttcacccccgggatgtcggtataggtgaggcggcgcacatattctatatgcagcagcttgaagatgttgtagatgcctacgctggcttcgatgtaaggggtcttgcccatgacatggctggtgggcacgccgtcgcgcatcgggaagaggaagaggtcggggttgctgcttttgtaggggttgttcctgtccgtgagcgtgccccacatgccgcggatacggaacatctctctccatttcagttttttgatgagggggatgcggttgaagagcttcccgttcatgtcgtagctgagggcgagcgaggcgtagcggtcgttcaggaactccatgttgtcgatgaggttgaacgattcgttgttctgggtgatgtatgagaggttcgccatgggcaggttcagcagcgggaaaggaacggtgttccactgcgcgccggcacgggcggtaacatccagcttgccccacgaaccgaaccagaaacgtttacggatgctggcttccgtgaggttgaagttatattcgccgcccagcacgcctttcagaccgacggtgtgcgagagggtgaacgtgggggcgtccagcgacacgggaacacggcgttgcttggtgttgacaaacgtttcgccgggagagtagcgcagggtcactccgagttcggtggtggtgatgtcgtgcaccagggtattcttctcgtcccattcgccgggggtagtgccgttgttcttccagtattgcagcatgccggcgggctggtcgttgcggtggcgcgccatggccttgacggagaagccggtattggtttccagctcgtaggtcagggtggcgtcgcgcatgtacgacatctggtctacggtagtccatttccagcccacgaacatattgtccttgtccgtagccagatacttgtccataggagacatcacgtcgtaggtgtactggaaggcgaggtagtgcttgggaaattcccaaaggacgtattcgcgcttgttgaaggagtaggcagcctgtccggagtagaaccacttcttgtcgcgcgtgccgtaggcgccgtaaccgctgaagctccagtgcggatgcaggttaccggtggtcatgccgctgagacggaaacgggttccgttcacatagttgctggtaatcatggtgttgatagggccgaagtcgaacttgctggggtgcttcttgctgcccgtctccacgaagttctcgataagcgcctttgcaccgaaaatgacgtacttgaagcccggtatctgctcgatgcggttcatgaacacgtccatggaactttcctttttggtgagcggcacctggcgcactttggcccagtattcgtcgctcttggcaagcatgttggcttccttgatgacgctgcctttcaggcggaacaggcggggttctatctcgtcaaatttatagtcgctgtatttggtggtgcgctgcacttccagaccttgtatgcctttcatcagggcgagctccacggtcatgtcgtcgtcggtgagcacccagttgctgtcgggcagttgctcaaactgctgcacgatgtcgaggttctccacgaaattgacacccgtcttcttgggcaggttcattacggctttctttacggcataggtggagtcctttactacgtacagatgtcccgtgaaaccgaagtcctgcgggttctgcggcacgaaggtgaggtgcacgcactcctgcttgtccaccatgagggtgtccatcaggtagaacttatagaagctgatggctccgcgtccgatagggcttacgaagcggcgttgcagcaggcggatgtcatcgtcatagatgttgacatcggaaaagacatcggtaaggatagtacctaacatatcgcccgtgttgaagaactcctcgatgccgttggagttcattccctcgatgatggtcttctcgcttttgggacttttgcggtagatggttctggaagccgtctccttgatggagatgggtagaatcatcttgttggtcttgggcgacacttccacctggtccttgaagaaagagaatttcttgtagatgcctttctccattttctccggcgtgacgtcgttgatggacatcttcatcttttcgtacttctggtactggtagaagtcgttctcctcgagcttcagggcttttttgtgctcgatgaccttcttcataaactccacggcaggattgttcttgcgcgaatacttctctttcttgggcttgacgacgacttcggaaagcattacatcggcaggcgccagcgccacgttgagcactttcgtaccgggggcgaacttcactttcttggtgatgtagccgatggcggaaaaggtcagttcattccaccccttgcgcgtctccacctggtattctccgtcggcattggagatgcctcctacgccttttccttcgtattgcacggtgatgtacatcaacggttcgtgggtgagtgagtccgttataacgcctcttatctgtgctgatgcgccggcagaggcgaatagtaaaagtaagaggatgagggtaatgttatatagtcgtttcatacgtttcataatcaagctgcaaagttaacaatttactgttaatcaagaagcaaatatattttaaagaatgagagggatgtttaagaggcagagaaacgggcaaggtgatggaccggcaggagaacgctgcctttttcttccttttatttatcaatatcggcaggataggtcgggatttgtgccgtataggaagaatggggcggattggaactttgagcctttggtataattggatacttttgtcttgccgtacagtaacgtacgatacggaatgactccgaatgataatatatggacagacttgcttaaactattcttcttttttacaatactgtgtttagtgtggggagatgtgccggaccagcatttttttgtatgggcacatctccttttttatgcggttttccgaacgcgggtcttatagcttctccccgtttatcaacgtctgtacgatacgctcggcggtgcgtccgtcccagcggtcgggcagggtggtgtgcttccattcgccgtgcagcagttggtcgagggcggcggagagggcaaaggagttctccccgacaagctcgttggttccgatacgccaggtttcggggtgttcggcataggtgttgagcgtgatgcagggcacatcgaggaaggtggcttcttcggctatgttgccggagtcggtcacgatacctttggcctggttgatgaggaagccgaagtgcaggtagctttgaggcggcaggatgtgcaggctgggcatgtcaagccccaatgattttacggcacgctccacgtacgggtgtatgggggctacgatgggcatatcgcccgctttttcggccactgtctgcatcagcgaaccgagtacggctttcttttccagcaggtcgtggcggttcagggtgagcaggagatagttgcccttgcgcagtccgaggctggagaaccagagcggctgtacaaggcggtggcggttgtagcggatggtgtcgatgaggatattgcctacgtagtggatatactccggtatcataccctcctggttgaggttgcggttggccaccatgccggcggtgaagagatagtcggagatggcgtctacaatcgtgcggttgacctcacgcggcatgttcatgtcgaacgagcgcgtgccggctatgacgtgcgccaccttcagtccgcgcttcttggctacgatggcgcagctcatggtggcggttatgtcgtccaccacaagcaccacttgggcggggtgttcgtcgagctcccgctcgaaggccagcatgatggcggctgccacctgggagtggtcgcgtccgctgatgcccagataggcgtcgggcttgcgcatggcaaggtcggagaagagcgaggcgtccagggtggtgtcgtcctgcggtccggtgtagactatgcgataggatatatttttacctgcctctctggctgcgtctatggcgcggcagaggggagcgattttcataaagttggggcgtgcgcccgatacgatggttattttcattgctgatataaattggcggtacaaaaatacactttcttagggaaattatttgttactttgcaaaaaaaagaaatgctctcatgccaacatttgttcagatactcgactttatcggtacatttgctttcgccatcagcggcatacggctggcttcggcgaaacgtttcgactggttcggcgcttacgtcgtgggtttcgtaacggccatcggcggcggtacgatacgcgacctgctgctggatgtgactcccggctggatgaccgaccccatttatctgatatgtaccggactggcattgctgtgggttatcttcttcggaaagcaccttattcatctgcacaatacattctttatattcgacaccatcggtctggcactgtttacggtggtgggcgtgggcaagagcctggcgctgggctatcctttctgggtggccattatcatgggcagcatcaccggagctgcgggcggtgtgatacgcgatgtgtttatcaatgagataccgctcatattccgtaaggagatttatgcgatggcgtgcgtagtgggcggtacgatgtattggctttgcgggcttgccggcatgcagtcttacggctgccaggtgataggcgggatatctgtgttcatcacccgtattctggccgtgaaatataagatttgcctgcccatactctcgggcaacgatgaggaagggcaggagaaagaggggtg

SEQ ID NO: 4133 - DNA, 33648 bp, Unknown
  gut microbiota DNA sequence
taaaatccctcagattgttacgttgatccagaattacttcccttttttgataaaaaaagatcggaaagtacccccatactttccgatccgaaacagtcaaaaatcgaccttaatcaatttattaacttaacacagtgacaaagatatgagaaaaatttctttgaatggacttttttgtccaaaaagttttgaaaacaagcaattattgcgtactatgaagaccacactattccttcttctgtttgtaacattccaagcatactgcgggaatagctactctcagaacgccaaagtaagtatccccgattctcagctgagagtagggcaaatactttcccaaattgaatcccagacagactatctgtttgtatacaacaaaaagagtgtcgatgtacggcgcactgttaatgtagatgcgaaaaacaaagccgtagccgaacttctggatgaaatatttgccggaacaaacatcagatatgtaatggaaggcaaaaatatagtcctgaccaaaagaggtgaaagcatcgaaaacgtagccggaacacaacaggaaagagtcactgtaaagggggtcgttaccgattccaagggcgaaccgattatcggtgcaaatgtattggaaaagggtacgaccaacggtatcatcaccaacctggacggagagttcaccctcaacgcacctgccaatgccactttagtcatttcctacataggctatgaacctataaacgttacgctcaacggccgtacatcgctaaaaatccaaatgaaagaagaagcgctggcattggaaaccgttgtcgtaacagctatgggcatcaagaaaaaagaggcctctctcacctactctacccaacaggtgggcggcgatgaactgacccgcgccaaagaccctaatatgattaacgcccttgccggtaagacagcaggcgtatccatcacccgtaactcctccggtctgggcggctcagccaaagtatccatccgcggtatccgttctgtcaatgccgatggaaacaaccaaccgttatatgttatcgacggtgtgcctatgctgaacaacgtagccgagcaggcattctccgccatgggcggtaacaacgatgccggcaaccgtgactcgggcgacggtatctccaacttgaatccggacgacattgaaagcatgagcatactgaaaggtgcttccgcagcagccctctacggctcacaagctgccaacggcgtaatcctgattaccaccaagaagggtaaagccggcatgcaacgtatcgtattcaactccaacctgaccatagaccatgccatttgcctgcccgaattccaagacaaatacggcgcaagcggagctacaagctggggtacggttccggaaaatgcaaactccacacccatcaaagcttacgataacgtaggcgactatttcagcaacggagttactgcaaccaattcactatccatcatgacgggtaaagagaaaatgcagacctacttctcttatgccaacaccaccgccaaaggtattgtcgatgtaaacaaactgcaaaagcataatatcaccttccgtgaaacagcctctttgttcaacgaccgtctcacattggatgccaatgtaaacctgatgacccagaaaatcaagaaccgccctacttccggcggctactacatgaacccgctggtaggtttgtacaccttcccgcgtggtgaagacctcaatatctatcgcgacaataacggattcgaaaaatacgatgaaaacagatccatgccattgcagaactggtatacggacatcagcggattcagtcagaacccctattggctgacgaacagagttaccagtaacgacaagcgtttccgtaccttagcttccttaagcgcgaacttgaagataaacgactggttcagcgttcaggcccgcggtaatgtagactatatcaatgacaattacgagcagaaaatgtatgccgggacaacggccgatgtagcccaccagaacggccgctatatcaaaatgaaccgtcaggacttcatggtttacggtgattttatggccatgttcaacaaaacatggaacgactggagcttgaatgcagccataggcagcagtatcaataccaccaaagtcaactccttaagtctcgactccggtaaatccggcttgtacaaggctaatgtcttcacagttcctaacatgaatctcagcggtgcaggcacttcatacattgatgaaacagccaaccaaagacgtaccatccagtctgtgttcgcaaccgcacagctcggttggaaagagagtatctatctggatgtaaccgcacgcaacgactggtcttccacacttgccaacaccaaaagcgaagactccggctttttctatccgtcggtaggtctctcatggattctcaacaaaactctcaacctacccgaatggataagcttcggcaaggttcgtgcttcctgggcacaagtcggcaacgaccttcccatcggcatcaccagcccggcgcagaccatcacggcaggcggcgtagtgaaacccatcgactactactttgcagaagatttgaaaccggaaatcagcaactccatcgaagtaggtactgagtggaagttcttcaacagccgtctggatttcgacttcacattctaccgcacggataccaaaaaccaactgatccgcgtaaacactaccgccgaacaacgtccttaccgttggataaacgcaggtaagatacgcaatacgggtgttgaaatcaccttaggcgctacgccactgatgaacgataatttccgctggaaaacccagttcaactttgctaccaacaagaacaagattgtatccttgggcggcacacccaacttccaatacgcttcgggcaatgtaagcatgccctataaaatgatggttgtagaaggcggttcgctgggcgacatctacggcaacgtatttgtacgcgatgcaaacggtaaaatcctgctggaaccggcaatagacaaagacggtaaccccaacgcaaaagccggcctgcctcaggttacaaccgacaaagccgccaagataggcaacttcaatcccgactggacactgggctggagcaataccgtgacatacaaaggtttctcgctttactttctgattgacgcacgcgtaggtggtgacgtaatttcgctgacacaagccggactggactatgccggtgtgagcaaggcaaccggtgatgcccgcgacgcaggctactatatgctggaaggacaaaagattaatgatgtacagaaattctatcaaatggtaggcgaccgcggcaacgggaccacggaattctaccgctatgacggaacaaacatccgcttgcgcgaagtatccttgggttactccttcccgcagcaaatgcttgaaaagaccggattcatcaaaggagtagacttgtcactggtggcacgcaacctgttcttcatctacaaagatgcaccgttcgatccggatgccacaatgtcggtaggcaatgacaaccagggattggacaccttcggcatgccttcaacaagaaacataggattcaacattaaatttactttctaaatacccgaacgatatgaataagataaaatatacaaccgcattgctcctcggcggtctcctgagtttttcatcctgtaccgacaactttgccgacttcaacagtaccgacggagcttatacagaagaattgcagaaatacgataaccaaaccaacctcgtacctttcgccaccattcaaaagggtatcatctaccagaccggagtggacggtacggactggcaataccaggttatacagaacttagtggcggacatgttctgcggatacttccacgacatgaacggttcgttcaatgccaacaactccacctataatctgaacaacggctggacaagcgccatgtgggtatacacctacggatacgtcatgccttccatcgccgatgcagaagcgctgaatacagaaaaggaatggcctctttaccacgccattaccaagattctgaaagtagctacccttcatcgtgtgagcgactattacggccctatcctttacgacggattcggaacagccgaccagaagccgcagtcacaggaagaagtctacaaacgtttctttgaagacctggaaacagccgtgaacatactgaaagattataaaggcggcgtatcctttgaaagcgccgacttcatgatgccggaaggcaaacgcactcccgcacaatggctgaaattcgccaactctctccgcttgcgtctggccatgcgcgtatctaacgtagctcccgaacttgccgaaaaacaggccaaagcagctttggatgctgccaacggcggcgtactggaaacagccaacgaaacggtaggcgaatacggcatccgcaacccgctgggtggtgttgccggatggagcgaagtgtatatgaacgcaagcttggagtctttcctgaaaggctacaacgatcctcgccttaaatcctacttcaacccggcacaagacggcagagacaaagacggcaacattaacagagaagttgccggagtaaaacaactcagcagcattgaagatgaatacaaaggtgtccgccaaggcacaggcgtagccgataaccgctactccacacactcgcagactaccgttacaaccgccagtaaaatcattgtcatgagcgcggccgaagtatggttcctgcgcgcagaagcagccttacgatataacaccggcgatgatgtggaaaactgttataagcaaggtgttaccgtatcctttgcacaatgggatgccaatggcgtcagcgattatctggaaagtgacgatagaccggctgcctacgtagatgtattcgatgctaagttcaatgcggatgcaccttcaacgatcactccgaaatgggacaatacagccgataaggaagaaaaactggagagaatcatcacccagaagtggctggccctatatccggaaggttgtgaagcatgggcggaacaacgccgtaccggttatccgcggctcatcaaggttgcggtgaacaacagcggcaataccatcagtaccgacgatatgattcgccgtgtattcttcaaccaagattacaagacggacaacaaggcattgtatgacgctttagtcagcaaactgggcggtgcagacaacggcggcacacgtctttggtgggataccggacggaataacttctaaaaaacacaaaggcatattttttgattagtgatgttttctccgtattagttattacgggaaaaggttgcaaggagcaaagtcggggggctttgctccttcttttcatatataagagaccgaagcggttctcctttttccataaggcataaacaaactgtcttataacagcacccggacagttgcaagagcttgtctgcctaaaggccgggagttattcggataagtccgcaggttttgaggtgtaccagcggctggtatggcgtgtaccaacaagtggtacggcagctaccaaaggttggtactccatgtaccttaggttggtacggcaagtaccactgcttggtacaagacataccaaagggcagtacaaacctggtacatatatcttattgattataagcgctatgatacttatttatattcctgtatcggaagctcccccctcaatgctccaagcgcattcagcgccaatgcttccatttcatcctcacccggataaacatgaaccggtgcaaggaacgaaatgcgctccttcagacgggaaatgatataatcggaatgtgccatgccgcccgtcagcagaatggcatctatcttaccgtacaacacaacggaagccgcaccgatgcttttggctatctggtaaatcatggcatccaacaccaacccggcatgcttgtccccttcctctatccggcggacaatggcaggcacatcggtcgtgcccaaatgggctgtcagcccggcacgaccggagatacgctttttaagttcgtcttttgtgtagcgaccggaacagcaaagatctatcaactgcccggcaggaagcgtaccggcacgttccggcgagaatgggccttcaccgtcgagcgcattatttacgtcgacagccttgccatgatgatggacgccgacggagatgccgccacccaagtggcagacaatcaaatccagctcttcgtagcgcgtatgatgctcggcggcatagcgacgggcaatggcgcgctggttcagcgcatgccagatagtgatgcgaggcataaggggagaaccggtgatgcgggctatctcgtccagctcatccacaacaccggggtcggcaatgaatgcacggcagcccggaagcagcgcggccagttcggaagctatgaggcatcccaaattgcaggcatgggtgcgcatggcatgaagaatatcatccagcatggcgtcattcacctcatatacgccgcccggtatgggctttagcagtccgccgcgccccactatggcgtcaaactcaaaaggtatattattggcttccaattctttcagtaccagattcttgcggaattcaaactggtcgatgatatgagaaaaggaagacagttcgtctaccgtgtgacggatgcttcgtaccaagcagggtacttcgttctcgtatacggcaatttttgtcgaagtggaaccggggttgatgacgagtaacttcatcgatgtatttattatttacgatttacaatttgatagttgcgaaatatcattcgcagtttccgagccgcaactggtgaggcatgccatagcaatgctgtaatacttggacaagccggaatcactgcgtgaaggtagcacaacagggcatataggtccttgaagcaaccccgccatatcggcatgagagaaaagggaaacagccttatagaaagcattgcccgattcgatattcgggaaaatcaagacatcggcctcgccgttgatgggagatacaatgcctttgatgtcgccgctcgtcttttcgcaggaagtctttacatccaacgggccgtcgatgatgacgtttccgaactcgcctgcctcggcaagttccacaatattgacataatccaacgaatgagggaacttggcgctcaccttttccgtacaatggataagtgcgatacgcggctgttcgataccgaaatggcggcaggtatggatggcataccaaatcatctctatgcgctgctgcaaagtgggccggggaatgactgcggcatccgaaaagaacagcagcttatcataagtgggaatctgcatgacagccagatgtgtcagaatctttcctttgggcagcagtcctttttccttgtcgagaatggcatgaagcagattatccgtattgataatacccttcatcagaatatccgcaccgccctcacgcacgatgcgtaccgcttcgcgcgccgcttcatccttgtcttcaatatgcaacgtctgcacatattcgggatatttctttaaagtaggatatttctccaagatggccgaatcgccgatcatcagaaattcggcaatgccttcgtccaaagcacgggctatggcatattcagtattggggtcattggcacagactacggcaatgcgtttccttttatttaaggtcttgagatgagaagttaattgatcaaagttccgaataggttccataacgttagatttttagcaaatatctaaaaaaatgtcgagaaaaagaacggtatacttcattttatttctatgttttatatcattttgacaggttcagtacggagagcacagagtttcacggagttttcggaacaaaaaaaacatatttcttcatcacatttttcagacagaagaacaaaagaacatattccgctttgtctttttgttctttttctttaaaaaacatgccatgtcgcaagactgaacatgccgtgatttgccgcaataccccttaaagaaataaaaaaaactccgtgaaacactgtgccctctgtggtgaattatgtacttttgtcacaaatacagagagatatacaatatgaacagccttatttttccgccatacgtgcacgagggcgaccgggcgataatcctctccccctccagcaagattgacaagtccttcctgaaaggagccaaaaaacggctgaagtcatggggactggaggttatcattgccaagcatgcaggcagtgcgcacggcacttacgccggaagcatacagcaacggttgaaagacctgcaggaagccatggacgacgagaaagccaaagttatcctttgcagtcgcggcggatacggtgctgtgcatctggtggggcagctcgacttcacccggtttcgccagcatcccaaatggcttatcggcttcagcgacatcaccgccctgcacaacgtgtttcagcaaaacggcttcgcttcgctgcacgctcccatggcacggcatctcaccgtggagccggaagatgatttttgctgtcaggcattgaaagacatcctgttcggcaataaactgcaggaagaaacctcgttcagctatacctgcccggcacacaagctcaaccgcaaaggcgagggaacgggcatcctccggggcggaaacctggcggtgctttacgggctgcgcggcacgccttatgacattccggcagaaggtacggtactcttcatcgaagacataggcgagcgtccccatgccgtggagcgtatgatgtacaatctgaaactgggcggcgtactcgaaaggctgtccggactgattatcggacagtttaccgaatacgaagagaatatgtctttaggcaaagaactgtacggcgcattggccgatttggtaaaagaatacgattatcctatatgcttcggatttccggtgggacacgttacgatgaacgtaccgatgattaacggtgcgcaggtcatgctggaagttggaaaaaaagaagtgaaactaacatttaacacccacaaagaatgaaacggaattatacaattatcccactgtcactgctgttgctcatagcgatggtagcgtgcagcaataaaagcaaaggcaatacggacagtgagggaaaacaacccaagagcacggtcagcgtaccccaattcgatgcagacagcgcttaccggtatgtcaaggagcaagtagacttcggtccccgcgtacccaatactgctgcacacaaagcctgcggagaatatcttgcaaagaagctggaacaattcggcgccacggtatacaaccagcaagtggatttaaccgcctatgacggcaccctcctaaaagcccgcaacatcatcggcagctacaagcccgaaacgaagaaacgcatcgtgctactctcgcattgggacagccgtccatgggcagatgccgactctgacgagaaaaaccgtcacacacccattctcggcgccaacgacggtgcgagcggggtaggcgtattgctcgaaatagcccgccaactgcacaaacagctacccgaactgggcatcgacatcgtactggtagatgccgaagactacggccctcaccaatcctatacaggcaaccataaggaagagtattgggcgctcggttcgcagtactgggcacagaatccccatgtccaaggatacaatgcgcgttttggcatccttcttgatatggtaggcgccaaagacgccactttcttctacgaaggatactccgaagagtttgccaaaggcatcaaccggaaagtatggaatgcggccaataacctgggctacggacgttatttcgtaaaagaaaaagggaatatcgtaaccgacgaccacctttttgtgttccggaacgcacgcatccctaccatcgatatcattcaatacagcgaggaaaccggattctacgaaaactggcataccctgaaagatgatatggacggcatcgaccgcaacactctgaaggcggtaggccagacggtcatggaagttatctacaatgaaaaataaatactaaagataaaattattatgagtatcaacgaagtacaagatgaagtaatcgccgagttcaatgatttcgacgactggatggaccgctatcagctcctcatcgatttaggaaatgaacaggaaccgcttgatgacaaatacaaaacagaacagaatctgattgaaggctgtcaaagccgtgtatggctgcaggcggacgaggaaaacggccgaatcgttttccaagccgaaagcgatgctttaattgtaaaaggcattatctcgctgcttatcaaagtgctgtccggacataccccggacgagattctgaatgcggacctctactttatagacaagataggattaaaggagcatctttctcccacacgcagtaacggattgctctcgatggtgaaacagatgcggatgtatgcgctggcattcaaggcaaaaagcgctaatgattaagcagactgttgctatttcgagggtgtgtcaaaactaacattcgcttgctatttgtttctttttaggcacggattacacggaaaacacagattttctttgttttttttccgtgaaatccgcgaaatccgtgcctaaaagaaatcatcaaatgtattttgacacactctcatatatataccatcggtttacttttcttctccctccacatactccagtatatctcccggctggcaatccaataccttgcaaatagcttccaatgtggagaaacggacagcctttgccttaccggtcttcagaatagaaagattcgccggcgtaatgtcaatcttctccgccagttctcccaaagatatttttcttcgggccatcataatgtcaaggtttactataatcattttctttttcccaatattcggttaaatagtcaagtcctgttcttctttcatcttcaatcctattgcgaatacctcggccacaatcaatgtagaaatacctaataccaaagtggttgtattcaccgtatccgaaagatgcaactcgtaaccatgaacggaaaaaacattgcctacactcctaaaagtaagatatgccggaagaagcgccgtacagaaactgataatcaatgccgcccctaacaggcgcaagcggtggacgttcttccagttgaagatatcggacttgtttatagaaatgaccaagcggacaaacagcacaatactccagacacatataactatatggagaaaattcaacaaagtaaaagcagcctgctccaaagttgtggactccgtatcgacactgaccatcatcgagttgaaagagaccggtacatattcaccgctcctttcattataaacggaatcttggaaaagaccgttatcgcccaaaccggaaaggtgctccggcagcaggctgatgtacttcatgttcatcagttttttctggcttgcctcggaagcattgccgtcaatcccggcttccacaccggctttcacccctacgataaaatagtagccggtctcaaaaaccgaatagctcaacacgagcactacaatcacacaaagaatattcagtcgtcttttcatattttaaaagttgtatcagttgccggtaaccgataagaattcattactttacaagagacggcaaacaacactgccgctactgccaaacagcaccaataggccggttctccaagcaaatcggatgtatatttcacatcgggataatgcaaactgaggaataccgacaggctgttgttcagaatatgtattaaaattccaggaaccagactgcccgttttataatagagccaggcaaacaagcctcccgataatatagcacctgccacctgtgccgggttaatatggaaaattccgaaaacaagggcggaaaggataatagccttcaccggactgtacctttgcagcaatactttcgtaatcgccccccgaaacaacatctcttccaagacaggccctaacaccgagatacagattatgcccagccaacccgattgcaacacatcgaatgtagctcccatccaatcaggtaggaaagacagtctggacatcacaaagtctatcaggaaaatagtagaaaggcctatgatgatactccatcccaaataagcaaccgacaccggagaccatatccgcccgtcatctttcaaatagcctttcttccacaaatagccacccataccgacaaatcccagcaacatactcggagccaaagctataacgcttgcagcatctatcgtaccactgactgcatacgaataaagcatggcaaaaggcatcaccaacaatgcagccaaaatctgcattacaaaataaatcaaaaccagttttattgctgttttcatcgttccttcttttttaagagcgtgtaaagatacacattttcctgcaaacccgtcaagccgctgcagcaactcccattaacaacatcatcaccatagaaagtgacagtaccaacaatgtaatactcataaatgctctcttcataaccgtagactttttataatcagcacttattcttatctacctattctgtttttcaataagaatttatcgtttttcgatatgcaaataaaagagctttttctgaaaagacaaagagaaacagcatgtttttatcgaaaaacaataaaaaagatatgtttttcaataaatatacaagaaagagctcaataatgaaaacctgaaaagcagtgttatgaaagaatcgcagtgatttcagcctcgtccttatggagctgcgctatcagttcgtctatggaatcgaacttcagttccggacgagtgcgacaaacgaaggacaaccgcatgggttgattgtaaatgtcagcatcaaaattaaagatatgcacctcaatgctacggtctatgccattattcaatgtcgggcggtagccgatactcaacatccccgcatgcttttccccgccaaggaaaacataaacggcatataccccgtcagccggaaccagtttttcacaatcgccaatgcgcagattagcagttggaaaacctatcttacgcccaacgcggtaaccgttcacaaccgtaccgtccaaaaaaaattgataacccaaacagtttgccgcctccgaaacgtttccttgcagcaaaaggcggcggatagctgaagaactgaccgtcattgcatcagtgtaataagcctgcgccaatagcacttctattcccaactcctgtccataacgcacataatcctcaaatccttcactccgattatgtccgaaacggtggtcgtaacctatcattaaaacctgcacccggtaatcttgctttaatatagccataaattgtttggccgacaggcacgccaaatcaagtgtaaaatcgagcatgatgcaataatctatcccggtaccggcaagcagagacactttctcatcgcaagtggtaagcagctcaggacgaaaatcgggttgcatcactttgcggggatgaaccggaaaagtaattaccgatgaagcaagcccacgttcagccgcaactttacacacctgttctatcaggaaccgatgtccccgatgcactccgtcaaaaaagccgatagtggctacattgggcaggagttcattaccagatgttccggtacataattgcatattcacctcatgcggtttggttcatttaaataaatggctccagtcttcaccggctttcggaacataagtggaaatacctaatgaccgggcagtcatacaattggcttccgaatcgtcgataaagaaagtttctttcggatccagacccgcatcatccagcactttgcggaagatttcttcatcgggcttcgccatcttcatttcataagaaagaaaaatatgttcgaaataatcttctacgcggaatgtcttataaggaaaagcatgttcgcaggaccatttccaatggatttcgttggtattgctcaacagatataccacatagtccttacgcagggccagcaataaatccagtttataggtcggtatgctcaccaaaaagctgttccatgcagcatcaatccgggcatcgtcaacgtcttttcctatcttttcccgtatcacattccgaaaatcggcactggaaataaggcctctctcatattgctggaaaaaatcctgctggtgatataggtcgagggtgtgttctacatccggcaaccccaattctctaaagttctccaaacaacgttggcggtctaaatcaatcagcacaccgccaaagtctactataaggtttttaattccttttcttttcattatctcatttttgcattagacgtcggacaaggcgaataccttcgcccacccataataccaaagaagtagaagcaatgattatcatccatgtcgtaaaatcaagcggctccgtacggaatacagccccaccgaactgtacgatgacaaactgaccgcccagaatggcaagtaccaccaactccatgccgtaagatttggatattcccttaaaagcggagtccgatgttccaaacactctcgcattgaacaggttccagaattgcagcataacgaagaaagtgaagaagattgtaaggcgttgtaccgtcataccgccttcttcattgttaaaccggaacaacatgcccataagcaatgccaggaaaaccactcccatgccaagtatataattccgcatggatttggttataatgaaatccgtacttttgcggggtttctctttcataacactctcactgggcgggatagacgccaaggccaaagcggcaaaggtatccataatcagattcacccacagcatctgcgttacggtcaacggcaattcagtacccaccagcgaacccaacagcacaatgaacagtgccacgaagttaatcgtcaactggaatacgatgaagcgctggatattcttatacaatgaacgcccccacatcacggccgtaccgatactgttgaaagagtcgtccaacagcgtgatgtcacttgcttctttcgccacagatgttcccgttcccatagacaaccccacctgtgcatggttcaaggccggagcatcattggttccgtcacccgtcacggctaccaccgcgcctttctgttgcagtagctgaacaagacgttgcttatcggtaggacgggcacgcgacataatcttcaagtccagcacccggtcgagcgcctcttcgtccgtcagttcggcaaaggcagcacccgtgatacggttacgttccgtatcttccggtttccataaacctatctgccgcgcaatttcggttgccgtacccggcgtatctcccgttactatctttacgccaatgcctgccgactgacattttgcaactgccgcaggcacatccggacgtatagggtcactgatggccacaacgccgaggaaagacaaatcgttttctgcaaccaatgccacacagtcggccggttccgtatcgtctactatcttataggcaaaaccaagcgtacgcatcgccatgttctgatagttcagcaactgagcctctaccgtagaacgatattctaccgcatccacccgcttgccatccagaagcacatccttacatttgcccaatacaatttcgggagcaccctttacataaagtattttcttcccaatcagaggagagtgtaccaatgttgccataaacttccgttcggtagagaaagtcaactggtcaagcaccttcacgccctctctcaactccagataattacgctgctggctattgagccacaacaataaagctacctccgtaggattacccacgcctttgggcttctcttccggagtcgtttcctccagaaaagctgtagaattggcactgataccttccattaccaatttactcaaatcatcttctcctatttcctttccgtccttcaatccgtagaaattcggttcatacacctgcatcaggttttgtgtcagcgtacccgtcttgtccgtacagataacggtaattgcccccattgtttcgcaggcgtgcatcttccgcaccagattattggtggaaagcatgcggcgcatattcagtgccagactgagtgtcacactcataggcaagccttcgggaacggcaacgacaatcaaggttactgccatcataaagtactgcaaagtagctttcaaagcaggcagccattgttcaaaagtatggaatgaggcaaaatcataaaccaggacaacatcctttataaagaagatagcgaatgcaagaccggctaccgaaaagccgattttccctatgaggttggcaagttttgtaagctggatattcaacggagtaggctcggtactttgttcggtactctggcgggcaacttttccgatctccgtggcgtcacccacaaactctacacgcataactccgtgtccgtcgaccactgttgtaccgcgcatcacacgattggaagcataagtggcttcttcatcaaaatccgcctctacagtagttttggttacaacaggctcacccgtaagattagattcatttatctgtaaagaaacggcttccagcaattcaccgtctgcgggaatttcctcaccggtttccaatataacaatatctcctactaccacatccttacggggaacctcctgtacatgtccgttacgaatcacctttaccaaagtttcctcgttcactgcgttcagtaaatcaaactttttattggcgtcgtattcaaaaaagaagccaatgcccgtagccagtaaaatagcagctatgataccgattgtttcggcatattcgttctccactatggaaataatcaaagagaagaaagcggccaccagcaatactcttactacggggtcttcaaacttttccagataaagtttccacaaagacgggcgcttcggaggcgtcaacaggtttacaccatgctcggtacggctcttccgtacttcatcgtcagtaagtccgacgtgatacaaatcatcctttgttgcagtcatgcaattcgttaggtttaaattgaattgcaaaaatacaacaataatttgtatagagaatgttattaaatctttttataggttttacaaatccggcctttttcctttctatgaacatctgccagccacttccatagaaacttacttcaagaacctactaacaaaaacatctttttctgcccgaacggaaaacaaaaagggaaattcaattgttcttaaagaagaaatttaaatacaagacaattatggaaaagtacatctgcactatttgcgaatatgtttatgacccggaattaggagatccggaaaacggaatagaaccgggaacatcctttgaggacctccctgccgattgggtttgccccctgtgcggagtaggcaaagatgaatttgagaaagcgtcctaagacgctttcttttcttttatatcgctgctggcttctactacattgacaacgtaatcgcccaacttttcacattcggcaatgatatccatatagtagactcccatctggtaatcatactccttgttattgacatcaaggatattctgattcttcaactggttgcggtaattgttgatttcattctcgatattaaacgacttgttcacatcaatgccttgatgatccgaacgttccaccaccacaatcatctgcccgagagcatcatcggtcagcttcatcatgaaatggatatgctcatattgcttttctgtgaactcctgattggtctgacgcttgcgattgatggtacgtgccagattataacaactgtcaccgatactttctatctccgtcacttcgcgcagcatggcccggatttgcagcttactttcagaacttaaccgtccttccgacacctgattcagataattggcaatctccagttccatgctgtcgctgatattttcgtacttttctatccgactgaacagcttattgaaatcgtcatccttctcggtatgcaacaggtcgcgtaccataccaaacatacgatgcgtacgttcggcaaacagatgaatctccttgcttgcctgcagaatggaaagctccgccgtagaaagcataccgcccgtaataaagcgcagacggtattcctcgtcctgttccttctgcggaataatggcgcagactgtacgctctataaacttcacgaaccatatcaatatcaacacattgcagatattaaaacaagtatggaaagccgacagcttaaaggaaacggcaacggcagggtctttggttcccattatattttccacaaaccatgatactccctgcgtaaaaggaacaaacaggcataacacccatataacgccgaacacattgaataccagatgcgccaatgcagccctcctggcctgcgtattaccggtaagcgccgcaagattggcagttatggttgttcctatattctcacccagaacaagtgccgctcccagttcgaagctaatccagccattcgcacacatgataagcgtaatcgccatcgttgcagcagaggcctgcacaatcatggtcagtaccgttcctataagcacaaaaagcagtacggatatataccccatatcggtataatcctgcacaaaagccagcatttccggattctggctcaaatcgggtgcattgttcttcaaataagaaagccccataaacaagaaagagaaaccgaaaataaattcaccgatggatttgcgattacttttttgagagaagaggagaggaatgccaaaggctaagagaggaagggcaaaagcagctatgtcgactttaaaacctaatgctgaaataatccaggcagtaacagtagtaccgatattggcccccataataacacctatagattgtgacagggtcagcaacccggcgttgacaaaactcactaccataaccgtagttgcagaagaggactggataagcgctgttataagcacacctgtcagaacgccggtcacccggttggtcgtcatagcggttaaaatcttccgcaagcggtcgccggcgaatttttgaagtccctcactcataattttcattccgtagaggaacaatgccaatgagccaagcagctttaaaaaatcataaaaagaatattccatctttaattagttaaagtgtttcattgtaccatttgttataatgtcctatatttagcgtattaataatctcaaaaaaagacaccatgaaacatatgttacaaatttgttgcaaaaataataatatttataaagaattccctatagggagctcacttttggatatttattacggttttaatcttaatttcccctatcaagtggtcagcgccaaagtaaataaccgttccgaagggctgaatttccgggtatataataataaagatgtggaatttctggatgtacgggattcctccggcatgcgtacgtatgtccgctcactttgttttatcctatataaggctgtcagcgaattgttcccggaagggaagctgtttgtagagcatcccgtatccaagggctatttctgcaatctccgcatcggacgtcccattgagctggaagacgtgtcagcaatcaagaagcggatgcaggaaatcatagctgaggacatccctttccgccgtaccgaatgccataccaccgaagccgtacgggtattcagcgaacggggaatgaacgataaggtaaagctgctggaaacctccggctccatatacacctattattatacattgggagatacggtagattactattatggcaacctgttgcccagcacaggttttatcaagctgttcgacatcgtaaaatattatgacggtctgctgctgcgtatccccaacaaagaaaacccgaccgtactggaagaagtggtaaaacaggaaaagatgcttgatgtattcaaggaacatctgcattggaactacatcatggggttaagcaatgtaggcgacttcaatctggcatgcgaagccggacatgcaaccgacctcattaatgtagcagaagcccttcaggagaaaaagattgctcagattgccgatgaaatctatcaccggggagaaaacggcgaccgcgtaaagctcgtattgatctccggcccttcttcgtccggaaaaacgaccttcagcaaacggctttcggtgcaactgatgaccaacggcctgcgcccctaccccatttctctggacaattattttgtagacagggaagacaccccgctggacgaaaacggcaattatgactacgaatctctctacgccctcgaccttgagctgttcaacaatcaattgcaagctttgctacggggagaagaagtggaacttccccgattcaacttcacattgggcaaaaaagaatacaagggagacaaactgcgcattgacgagcacaccattcttatattggaaggaatccatgccctgaatccggaactcactccgcagattcctgccgaaaacaaatacaaaatttatgtatctgcactgaccaccatctcactggacgatcacaactggattcctactacggacaaccgcctgttgcgccgcatcatccgcgacttcaactatcggggatattcagcacaagaaaccatttcgcgctggcccagcgtacgtgccggtgaagacaaatggatattcccctatcaggaaaatgccgatgtcatgttcaattccgccctcttgtttgaatttgccgtactgcgttgccatgcagaacctatccttaccagcgtaccgcgcaactgtccggaatacgccgaggcctaccggcttatgaagttcatcaaatacttcactccggtacaggataaggaaattccgccgacatccctactcagggagttcttaggcggcagtagcttcaaatactaacccggcacccaaacaatctctttgtccggaaccggcaaacagcttcggtccggacaaaaattcctgccataccaaacattctgttaattctgacagggaattacaaacatccgcatacaacagactaagaaaactttaactttgtaggcaaacaaaacaaatccggttataatgaaaaaaagcattcccatacttcttgcggttctcctttgcctgtgtacccaaacatttgcacaaaaccgcgctgatgaactgatgaaacaggcacaggaaaatctggcaaagaaagaatacatcaaggcacgctatctctttttacaggcttacaatgccttcgccacgcaagaaaactatgcccaggctgtaaaatgcggtgtaaatgccagcgccctctatcaccgggagaattattataaagaagcattcgaactgctgcgcaatgccgaactgctgatgagagccggcgaacaaaaactcaaaaaggactttcctgatttacgtttccgcatcaacaaagaacgtctgcaaatgtacatcagcctcaaaaaccccacccgtgccaaagaacagttaaacagactggaagaaacagccaaagctgcccaaaatgactctctaagcaatgactttctgtatacccaagccagctattactacactttcggcatgaattcgcagggggatacagctttcaagaaactgatagaacagtataagcaacaaaagaactacgccaaagcggatgaatgctatcaaaatctcataaacattgcccttcggacaaacgatacagaattaatggcgcgtacttacgacaaatacattacctggacagattctgttaaagcactcactgcacagaaagaattgaatgcattgaaaaagaaatacaatgaaagtctgactatcattcaggaaaaagacgactctctttcctccaaacagcatatcatcaccggtctttgcgtcctggcagccattttagcggcagcattagtggcaggagccatcatattactacgcttcatcctactgacacgcaaacaaaagaaagcaatcggcattgccaacgaacacaatgaactgaagaccgaattcatccaaaatatctccgcccagatggagcctacactggacactctcgacccgaagctgcccggcgtacaggcattgcgtactttctctgctcacatacaagagctgtccgaactggaaaacagcctatcagaaccgtatgaaatgcaagaagagaatatttcggctttctgtgaaaacgttatgaacaaaatacgcggcaaagtacaggaagatgtatccctcattgtcaatgctcccaaactgaacataaagattaatccggaacacctggaacgcatcttactgcatttgcttgaaaacgcagccgaatacacccccgccggcggaaaaatagggctggacttcaaaaaacgcggcgctcatacacatcagttcatcataagcgatacaggctgcggcatcgccgaagaacagcgcgaaaacatattcaagcctttcaccgaagtaaaagacctgacgcagggcgatggtctgggattacccatctgtgctctgattgccgctaaaatggatggcagccttacattggacagtagctatgcgaaaggcacacggtttgtattggagctacacgcttaaaacaatgagaattgagaatcaaaaaaaattgagagttgaaaatgagtgccgccattgtgctacacggtaattttcaactctcagttatctttaactatctcaacgcttccacttcttccggtgtcagcggaatctttttgcctaaacggcgtgcaccggtttccgttatcagatagtcttcttcattgcggatacctccgaagttgcggtattcttccactttatcataattaatgaagtctttaaacttcttctctcctttccaaaggtctatcagttcggggataaagtaaatgcccggctcaacggtatgtacaaaacccggttccaaaggaatggcaagacgctggctcttacgaccgaactgcgtactcttaggctgaccgttgtaaccgacccaaagctcgccgaggttttccatatcatgcacatccagccccatcatatgtcccaaaccatgaggatagaacaaggcatgtgcgccttcgcgtacagcatcttcggcattgcctttcatcaaaccgagttctttcattccctctaccattacgcgggcggaaaggtcgtaaacatccatataaggaatacccggacaaagcgctttgacagcctccagatgcattgcattctgaatttcataaacagcccgctgacgaggggtaaacgttttatcggcaggaacggtagaggacatatcgcccgcataacccgactctacttccgcaccggcatcaatcaggaataaatctcccggcttcaccttattgccatgataatgattgtgcaaagtctgtccgttgacggtggcaatcgttgcaaaagaaagctcgcaattattggattcggccacccggttcatttctgctacgacttcgtattcgtacatacccggacgaagtactttcatagccgtaatgtgcatatcagccgtcacattacatgccttttctatctcttctacttcttcggcagacttataactgcgttgtgccacaattgcacggataaatggaacagaaccttcctggcgtgcaggcggaatgcccaaccactccatcagtttcaatttatgctccgccctgtagggaggcaggtaatgcactgtctgtcccttgcgcactgctttatgcagatagttcatgatttcggcagaaggcattacttccgttatgcccacacgcccgcttttctctttcagggtaggctgcgttcccatccatacgatatggtcaatcgtaagttcatcgccaaatataatctccttgtcctcatcaatatcgataatcgccgacaaaccggcaaacgacaaaccgaaataatacaagaaggtagaatcctgacgataacggaaagtattgtcctcataatgcagtccttgttcgtcattacccaaaaacagcaacactcctgagcctatatttttcttcaacagggcccgacgctgtatatacgtttctttagcaaacataatgttcatagttttagttgttataccacaaagataaagagaatatttgaaaggataaggaaaatcaggaaatactgacttacaacccaacaagaaaaaacaaccgaaccgcagctttcttgttaaatataacagaagaagatttttcgttcccgaactattcactatttttgcaaaaagtgcgaagataaaacttatctttgcagcggacaaataatgtaaattatggcacaaggctcccgacagatacaaacccaagcgcagcagcaaatacagacgctgtcaccacaacagattctggtagtaaagctgttggaacttccggcaatagagctggaagaccgcgtacgtgccgaacttctggaaaatccggcactggaagagggaaaagatgatacatccggcgatgaatattccaatacccccgatgcagactccaatgcagaagatggtggagataccgattacgattctctgagcgactatctcaacgaggatgacatacccgactataaattacaggaaaacaaccacagcaagggagaacaagccgaagagatacctttctccgatacgacttccttctatgaaaccctgaaagaacaactgggtgagcgcaaccttaccgaacaccagcgtgaactggccgaatatctcatcggctcattggacgacgacgggctgctgcgcaaatcactggacagcatcagcgatgagcttgccatttatgccggcatcgaagccactaccggagaactggaagaagcattgagaatcattcaggatttcgaccctgccggattgggagcccgcaacttgcaggaatgccttctcatccagatacggcgcaagatagaacagcagcacttcactcccaatccgattctttatattgaagaagcaatcatttccgaatgctacgaagatttcacccgtaagcattgggacaaaatacaacagaaactcggactggaagaagaagctttccagcaagccataaaagaaatctgcaaactgaacccgcgtccgggagcgtctttgggtgaagctatcggcaagaacctgcaacaaatcgtacccgattttattgtggatacctatgacgacggcactatcaacctgtcgctcaacaaccggaatgttcccgaactgcgcatgagccgcgatttcaccgaaatggtagaggaacacaccaagaacaaggcaaaccagtccaaggaatccaaagaggccatgatgttcctgaaacagaaaatggatgcagctcagggatttatcgatgccgtcaagcaacggcagaataccctgatgactaccatgcaggccatcatcgacctgcaacgccctttctttctcgacggtgacgagtcattgcttcgccccatgatattgaaagacgttgccgagcgcacaggactcgacatctcaaccatctcccgcgtcagcaacagcaaatatgtacagaccaactacggcatctacccgctgaagttcttctttaacgatggatatgttacggaagacggcgaagaaatgtcagtccgggagatacggaaaatactcaaggaatgcatcgacaacgaggacaggaagaaaccctataccgatgacgaactgaccgagatattgaaagagaaaggataccccattgcccgccgcaccgtagccaaataccgccagcaattaaacattccggtagcaaggctgagaaaatagaaacggcataaggcaatccaaacggtagagtgataatgcaaaaataaaaaaatggcaatagaacaacatattatagcagataaaaaccttatcaggacagccagggtaatttcgatgatatttacaccattctccatacctttcatggcatttctgattctgttcgtattctcatacctgcgaatcatgcccctgcaatacaagttgattgtattaggcgtggtatattgttttacaatccttatgcccacactgaccattttcctctttcgcaaaatcaacggattcactcctgaggatttaacggaacggaaacggagatatgtgcctttcatcctgaccatcacttcctatgtgttctgcctgctcatgatgcaccggctgaacattccctggtatatgacaggaattatctgtgcctctcttatcgtgatgattatctgtgtcattgtcaacctgaaatggaagctcagcgaacacatggcgggagccggtgccataataggtgggctggttgctttcagtgccctgttcggatacaatccggtgggctggctgtgtatattcattctcgtagcaggcgtattgggcacggcacggattatcctgcaacaccatacgctcggtgaggtaatgggcggatttgccgtaggactgatttgtaccttgctggtacttcatccgctcagcaaactgttattccgtctattcagcatattcttattttaaatatcaaatattaactcttaaaactaacgattatgaattttcctaatgatgtaaagtacacgaaagaacatgaatggattcgtctcgaaggagatgtagcttatgtaggaattaccgattacgcccaagaacaattgggagatatcgtatttgtcgacatccaaaccgtaggcgaaacattggcagccgatgaagtattcggcaccatcgaagtagtaaaaaccatttccgaccttttcctgcccgttgccggagaagtgctggaacaaaacgaagcattggaagagcagcccgaactggttaacaaagacccgtatggcgaaggctggctcatcaaaatcaaacccgctgccgatgcagatttcggcagactgctggatgcagaagcatacaaagcactgattaataattagcgtttagtgattagtgtttagtgattaggggtaatgattagcagtaataatttgttttaaaatcttttctcatcaatcactaaacactaatcactaaacgctaatcactaaccactaatttaaataatatgtctccaattgttagtatcatcatgggcagtacttccgaccttcctgtcatggaaaaggccgcacagttgctcaacgatttgcatgtaccgttcgaaatgaacgccctctccgcccaccgtactccggaagcagtagaagaatttgccaaaggggcacgtaaacgcggaattaaagttattatcgcagcagccggcatggcagcagccctgcccggcgttattgcagccaataccacactgcctgtaatcggcgtgcccataaaaggctccgtactcgatggagtggatgcgctttattccatcattcagatgcctccgggcatccctgtggccaccgtagccatcaacggagcaatgaacgcagctattcttgccgtacaaatgcttgcattgagcgacaaggaactggcagaagcctttactgcttataaagaaggtctgaaaaagaaaatcgtgaaagcaaacgaagacctgaaagaagttaaatacgagtataaaacaaactgaaagaagtgattgataatcactgaccattaatcactaataacgtggatatattcaattattcccgacgggaaacatcagaagtgaatatcggagccacccctatgggcggctccaatcctatccgcatacaaagtatgaccaacacttccacgcaagataccgatgcgtgtgtagcacaggccaaacgtattgtggatgccggtggagaatacgtacgtcttaccactcaaggtgtcaaagaagctgaaaacctgatgaatatcaacgcagccttacgtcaggacggctacatgaccccattggtggccgatgtgcatttcaacccgaaagtagcagatgtggcagcgcaatatgcggaaaaagtccgtatcaacccgggcaactacgtagactccgcacgcactttcaagcatctggagtataccgatgaagaatatgcacaggaactccggaagatacgcgaccgtttcgtcccgtttctgaatatctgcaaggccaatcacacggctatccgtatcggtgtgaaccacggctcgttatccgaccgtatcatgtcgcgctatggagacactcccgaaggcatggtagaatcgtgcatggagtttctgagaatctgcgttgcggagcaattcatggacgtagtcatttccatcaaagcatccaatacggtaatcatggtgaaaaccgtacgtttgcttgcccacatcatggagaaagaagagatgcacttccccttgcacctcggtgtgacggaagccggtgacggtgaggacggacgcatcaaatcggccttaggcataggtgctttgctggcagacgggttgggtgataccatccgcgtatctttaagtgaagctcccgaagcagaaattcctgttgcccggaaattagcggactatattgtacaacgccgtaaccacccttacataccgggtgctgtagctcccgaattccagtacttgtctcctgaacgcagagccacgacagccgtgcgcaatataggcggagaaaaccttcccgttgtcgttgccgcacgcttggacggcaatatggatttcaatccgcagtttatgcccgactatgtatacgtgggccgtcaattgcccgaatctcccaccgaaggcatacaatacattatcgatgccgacctttgggaaggacaagccaacacatggcctgcatttaaaggcgaacagctgccgtttatcagcggatgcagcgcatcactgaaatttctgtttatcacctatatgggattgaacgacgaagtaattgccggactgaaataccacccggaagtggtacttgtcgcacaaagcaaccatcccaacagacagggtgaataccgtgctttggcgcaccaactgatgaatgaaggattaaagaatccacttgtcttcttccaacattacgctgagactgaagctgaaaatctgcaaatcaaatcggctgctgatatgggagcactcatcatcgacgggctctgcgacggtattttccttttcaaccaaaccggcaaggaaagcgataaggcgatagacgacaaggttgtagacaccacggctttcggtatcctgcaggcaggacgcatccgtaccagcaaaaccgaatacatatcctgtccggggtgcggccgtacgctctacgacctcgaaagcaccattgcccgcatcaagcaagctacatcacacctgaaaggactcaaaatcggaatcatgggttgcatagtcaacggtcccggtgaaatggccgatgccgattacggatatgtaggtgcaggacggggcaaaatcagcctatataagaaaaaggagtgtatcgaaaagaatatccccgaagaggaagccgtagaaaagctgattgaacttatcagaaagaacggagattataccgagcggtaggtttcttattcttcaccacaaaaaaagcgcagagcctcacagagttttcttttgttccgaatgcgggtaatgcttaccggattccccaaagctgtgagaccctgtgctttttttgtgatgaatcctaatatctgaaactcaaaaatacacggaaggattttgacttcatcttccacttgtcactttcaattacatcctcaaagtccggagcatcataatccataccttcctcatcaaaagaaagtccgttataagtagctttcttcgcccaacgatgttctataccgaccgaaattgctttataggcaacagaagcaccaaacgcaaaattggaaacatatccgtgtccgaagctgtcatcgatgaccaccatagaataagtaggcacataatggaaataggcagccactttcaaatcgcctaccggattgactgtgacggagggacctacgtgcatagacgcatctatctgatgaatacccaaatcaaaatcttcctcgtaatagtcttcataaccactgctgtaatcattataagcacgtgtgtacgaaccaccttccgcaaagacgtccggttcggaatacttggcatacgaaagttcaaaccatgttgcgtcaataccgaacttaatcatattcagcaacggcttcttatgcaggtaatacgtttttccgaaagtcagagaaacaccgaaatcacttttccattccgcttcggcatctactttatccgtcaacgtttggtttgtaatataaccgatattaaaatacttggctctttttttccatattctctcatttcgtgccgcatcttcggttttctgtactctgtcggagagttcatttaccacttgcagtaaagaatcctctctttgagaagattggacttcggaatcagcttcttgagcaaaaatactttgtcctgtcaaaatcacggttgacagcaccaaccaaaacagttttttcatcataatttgtctgtgttttgcttatggctccttcgttcagcataccagtaattttaggaaagcgcaggagcactaaagggaactccccttaacgcttatttcattctatttttacaaaaatagaggattacacacatacgcacaacgggacaaaaacgagatagaaactaaaaaaccgaaatagcggactatttcggtttaaataaagattatgatgatgtttttttatttttcctttttgccttcatccggcttaaccggcgggacactgagcatttctttatatttttccggagcagtcaatatcccgacagcctctttcaggtccttatcatctttcaactgttggatgatacttccacgctgatagtagtaacgtttgataatttccactgcaatcatctcctttatatcctttgagaagtggtcgaggtcacgctccaggttatgagatagctttttctccaaagccttgaattcgtcggacgcatccgtcaggtatccttcaaactccgccatttctttcaagttcttcaaaatcttctcagtctgctggtcgtacttgaaatctgctttctgtaccatcgccttaaagtcggcatagtcggcatccgttatcttaaaatctttaggagccggaatcgtggggtgcttcaaacaatactccgtagcgtaattaaatatcaagttgtcattcaccaagtagaacaggatattaggcaacttatcctgcttgacggtaatatcgggagtaactccgccaccgtcacgtacctcacgtccggcagcagtatggaatacggtagtcaagctatccggaatacgtcctacgctgccatcctcattgcgatgtttgtagtcgatagcctgcacgcaacggccgctcggaatatagtatttggaagttgtcagtttcattgtgcctccataaggcagcggacgggtggtctgcacaagcccttttccaaacgtacggttacccaccactactgcacggtcataatcctgcaatgcacctgccaggatttccgatgcagaagctgttgcactattcaccagcacagccagcggaatttccaaatccagcggctcacgcaacgtcttgtacgtattgcttgcctgtttgatctttcctttcgttgtcaccagtgttttgccgcgcggcaggaagaagttggctatttccacggcttcgtccagcaaaccgccgccgttattacgcaggtcgataaccaaagaagttattccctgctttttcaaatcaagaaatgcctgcttgaactctttggaaggattaccggagaaagtgctcaggttgatataaccgatgttgttatccaacattgcataataaggaatgaaaggtaactggatagaacggcgtactatatcgaactccaacggctgttccgttccgggacgttgcaccttcagtttgaagctcgtgcctacctgcccgcgaagcatctcgctaacctcctgattattctttcctgcaaggtccttgccgtcgatttccataagaatatcgcctgccttcaggcctacggtagccgccggcatatgttcgtaaggttcggctatcatggaacgcttcagtttggtattccaggttatgatagagccgataccgccatacgtattcttcaacatctgttccagttcgctttgatcgtcttccggaaaatattgcgtataggggtcaagtgaatacagcatggattcgatgccggtacggatagtcttgttcgggtctatcgtatccacataaaacatatccaattcctttactatagaattgaatatatccaaattctttgccacctgaaaactacggttgtctccactcttaaacccgaaaaagaaacttgtacctactgctaccaataggacagctatccaacgtatctttaaatatttcatatattctaatttatcattattatatcttcctttatcttctcccactttgaatccggcagctccgttccaatcacctgtattacctcacccgacaggatagcacctatttttccgcacttttccaaagaatatccgcaggtcagtccatataggaaacctgccgcaaaaaaatctccggcaccggtagtatcaaccactttcgccaccggcacagcctcaacacgtacttcttccgttcccttacgaatcagcgagccgcgcgctcccacctttacaatggcaatgctacacattttagcgataatatccaacgcttcctcaggttctttaccggtaaacgccttcgcctcttcttcattggcaaaaacaatatccacatatttatttaccagcaaagagaagaactcatggtcgcccgccacgatgttataacttgccatatccagacagacctgcaaaccggcttctttggccaactcaatagcccggagaatcatatcgtgttcctgtaccagataaccctctataaacagataagtatatcccttgaacatctccagcgacagttcttccgctttcaacgtagacgctgctcccaaatatgtgccgaacgtgcgctctccgtccggagatataaaagtagacgccactcccgaaggcaatgtatctgaaactaataaatcagcttccgttccatgcttcagcagactttcccgaaaaaagttaccataagaatcattatttatctttccgatgaacccggttcccgctccaagctgcgccatgccacggattgcatttccggcagagccaccggtagccaaatgagttttcatacggctaaattcttcattgattttcagtaacttatcttcatctataagcgtcatactgcccttgggcaagtccattttagttaagatttcatcactgtcaagggttgctaacacatcgaccaatgcgtttcccaatccaattattttatccatttctgatattttttttgcaaagatattgcatatttcaaaatatcctattacttttgcagcgcatttgagaaaaaacaacattcttccttagctcagtcggttagagcatctgactgttaatcagagggtccttggttcaagtccaagaggaagagcaaaagaaaaacttaaatgcaacattcttccttagctcagtcggttagagcatctgactgttaatcagagggtccttggttcaagtccaagaggaagagcaaaaaaggttcgtcattacggcgaacctttttttgttggatatcccatttcctccagaggagcccccaaaaaatatcccattccttacctcaccaggttacaagaatgggatatacaaacaaaacaaacaacaaggccatccgtcacagacagccattgtatatgataagagattctatatattttcttttccaaccggaataagttcgggtcaacgtaaaaacctgagggattcatag

SEQ ID NO: 4134 - DNA, 335 bp, Unknown
  gut microbiota DNA sequence
ttcggatatgtcagttgtgacaaggaaggaggagaactgctttttaaccacctgtcgttaagagccgggaaaaaggctacaatcattactactaatttggcttttaacagatggaatgaaatcataaaggacaaggtgcttgtggcggcaatggttgacaggcttacacataaagcttatctggttaatatgaccggactgtcttataggcttaaggaaacacaaaaaatgagacaagataaatgaatattttaaacttatagtaattttgtaaccagttatggatggagctcttttcaattagaatacggcgcacttttcaattagtatctaca

SEQ ID NO: 4135 - DNA, 21954 bp, Unknown
  gut microbiota DNA sequence
ttcagaggagtaagagatagagcttttttcttatatagacttgctaaattatatgcttaaatataaaatccctcagattgttacgttgatccaatattagctactatctttattatatagccaattccgacaggcagctatttactttttgcatatccttgaaaatattctgatccaatacccttgcatagtgttctcttgtctaaagctgccttttgtatttctgtgattttttcgtttatgagaatggttattctttcacgatttggacatttggcttttggctggtttgccttgaaatcccattgctctgcttttatggatacgccaagactttggtacttccgttttccgtctttacagacacataacatgagaggatgttcaccattactaagtgtttttgatttgtaacacagtacttgattgtttcagtcatacggtttactggtttacgttgacccccgtttacatcttggtttacatcaaagccgtcaaatcgcagtatatacaaaagaaaaaaacagctatcttttttttagataactgcttgattttcaagtgatccgcttggggctcgaacccaagaccccaacattaaaagtgttgtgctctacctgctgagctagcgaatcaatccttattgctgttaagcgggtgcaaagatatggactttatatttaatatgcaagacttataacgaaaaaagtttgcattattttagttgtttatttcttttgtttgattatcagttgattctgtcttatgaatattttctctgttgataatgaaacgttgatagtaggagagcatcagcgttgtgagcggtagtgcgataatcattcccaacattcccattaatgaaccccatatggaaagtgataatagaatgatagcaggatttagtccggtaattttccccataacacgtggcacgatgaatccgtcttggatggtttgcactacaatgaatactgccatggctgaggcgatgattatccaaaaattatcgcctgtgtcggaggctttcaggattgctagtatgatagtaggaaccaaaccgatgatttgaagataaggcaccatattcaatgccccgatgaacaaaccgagacctatggctaatgggaagtctatgataagaaagcctatgctgaataaaatgccgacacataaggctacgaatgcctgtccgcggaagtatctgttcatacctacttttacgtcattgagtatgcctaccacgaaagaacggtatttcataggcacgagatgcgtccaaccttctgcgatgctttcgtagtctaataaaatgaagataacgtatagtaagataatgaatatggtgaatacgctgaataataagtcaacggagtccgataataaagaccataggcggggaactgcttctttgagcgcatccaacaggttctctttattgaatagttcggttataaatttaacatcgatattatctcgtaaaaaatcggaaagagaggtgggcacattactattatatgttccgtgcgaaaagtattggaccaataaagtctgtactctgccgcattcttgtatcatagggggcactaacagataaaaagctccggcacccacaatcagaagtgtgagtaatgcgcagaatatggaaacaatcctatttcttaattttagcttgtattggaaaaatgtgaccaaaggatataccagataggcaataagccaagcgataaagaaaggtaatagaacgctgcttaaacgcttcaaaagcatcaatatgccgataatgataactcctaaaatgacaccgcggataaaactgtcgaatgtaatctttttacgttccatagaatcctgtattaaatttattaatcgcttgcagtttgctggtcttcctttatcgcccgtaaataacactcccggcacaagggttcgtattcggctgtttcacccaacagaacttgtttgtcattttttacagtacggtgagagaatgaagcaagctgtccgcattttacacagatggcatgaaccttggaaacttcatctgcaatggcgcacagccccggcatgggtccgaaaggattaccgcggaaatccatatccaatccggctacgattacacgtatgccattgttggcaagctggttgcatacatcaatcagaccttcgtcaaagaattgcgcttcgtcgatgcccactacgtctatttcggaagtgaatagcagtatgcttgccgatgagtctatcggcgtagaggatatgatgttgctgtcatgcgatacgacatctgcttctgagtaacgcgtgtctattgccggcttatatatttctacacgttgcttggcaaatttggcacgtttcaaacggcgtatcagttcctctgtcttgccggagaacatggagccgcatataacttcaattcttcctctgcgtttggtttcttgtatgtggtcttccgaaaataataccatatctttgagtgttatattcagtcgcaaaagtaatgattttgttcgcttccggatattttttcattatttatttctacatttgtgccattaatacggacaggaaaaggatatgcaagcattattgaatgatatagaactggatgttcaggaattgaaatgtttgatacagtcgatgctcactgatacaaatcctgtgttgagaatagttgccaaaagaaatattcatcagatgcaggagcggttggatgcgctgacaaaactgttggacgacacttttgtgataactccggcggaacatgttgcttctgacattgtggagaaaacaactgaatcggaagtgatttccgaatcagttgctgaagttccggttgaggcaactcacgtttcggatattgcaatacctgcttctcagattcttgctgaacgtattaagccggctacggacttgcaacatgccatcagtctgaatgattcgtttcgttttacccgtgaattgtttgccggagatgcgacacgtatgaatgaggtggtgcgcctttgcggtggggcttcctctttggatgaggctatgtctgtatttatgtcaactgtacaaccggatgaggaaaatgaggcggttgctgattttatagaacttctcaagaagtatttcagttaaaaaagttgcggatatgggaaaactttatgtagtgcctacgccagtaggaaatttggaagatatgacttttcgcgctatccgcatattgaaggaagcggatttggtgctggcagaagacacgcgtacttccggaatattgctgaagcattttgagataaagaatgcgatgcagtctcaccataaatttaatgaacataaaacagtagaaagtgttgtaaatagaataaagggtggtgagactgtggcgttgatttcagatgccggtactccaggtatttccgatccgggttttctggtggttcgcgagtgtgtccgcaacggtatcgaagtacagtgcctgccgggggctactgcttttgttccggcattggtggcttccggattgcccaacgagaagttctgctttgagggttttcttcctcagaagaaaggtaggatgacacgtctgaaaggtttggcggaagaatgccggacaatggttttctatgaatctccccaccgtttggtaaaagcactgacgcagtttgcagaatatttcggttcggaacggcaggcgtccgtttcccgtgaaatatccaagatacatgaggagacggtacgtggtactcttaccgaattgatagaacatttcacagccaacgaaccgcgtggtgagatagtgattgtagtagcaggaatagacgattaaataacttcattaacaaaacgtaaaacaaaagcgtatgaaaaagttagcagttttgattgtatgtacagccgttatggcttcatgtgacagcttttcaggtggtagcaaagatcagttgaaagctgagaatgattctcttttaatggaactgactcagcgtaatgctgaactggatgaaatgatgggcactttcaatgatatttcggaaggatttcgtcaaatcaatgcggcagaaagccgtgtagacttgcagcgtggtgcagttgcagagggttctctgaatgctaaacagcagatagcctctgatattgaattcatccgtaagcaaatggaagagaacaaagagcagattgccaagctgcaatctatgttgaaaaacagtaagaccaactcttctcagttaaaaagagccgttgagtctttgacacaggaactgaatgcgaaaacccagcgtatcgaagagttacaggccgaactggcttctaagaatatccgtatccaggaattggatgccgccgttacggatttgaatgctgtcaagagtgaattgactgctgagaatgaggcaaaagccaagacagtggcagaacaggataaagcgcttaatactgcatggtttgtattcggaacgaagaaagaactgaaagaccaaaaaattctgagcggttccggattatttaaaaaaggttcggtcttgaaagatggtgatgtcaataaggattattttacccaggttgatattcgtactaccaaagaaatcaaactgtattccaaagatgccgatattctgactacccatcctaccggttcttataccttggaaaaagatgataaagatcagttgacattgaagattaccaatccgaaagaattctggagcgtttccaagtatctggtaattcaagtgaaatagttacttgattgataattgatagggctgtttcaaaagtgcgtttcgtttgtaggcctgcttttgaaacagcctttttagtattcttttttatgctttataaaaatcttttttttgatttggacgatacgctttgggcgttctctctcaatgctcgtgatacctatgaagaaatgtactggaagtatggatacgatcgctatttcgattcgttcgagcattattatttactttatcagcgtcgcaatctggatttatgggcagagtatgcagatggtaaagtcacgaaagaagagttaaaccgtcaacgttatctttatcctttggaggctgtaggagcaggtgactccactttggcaaaggcttacgaaagagatgctcttacaatgattcctaccaaaagcaaattgatgccacatgcgcgtgaagtgctggaatatctttcgggaaaatacaatttgtacattctttcaaatggatttaaagaactccaaagtcataaaatgcgttcgtcgggcattgatgaatatttcaaaaaagtggttctttccgatgatatcggaatcctgaagccttggcctgagatttttcattttgctctttcgacaacccagtccgagttgaataattcgctgatgatcggagatagttgggaaaatgatatagtcggagcggcgggagtaggcatgcaccaggtgttttacaacttgtccggtcgtaccgacttgccttttgctcctacctatcagattactgatttgaaagatttatttaattttttgtgacattgacagattagttgtacttttgtttccaatgatgaacatctaaaaatactattatggaaactctcattccttttgcattgttgtgtttcacatctttctttacgttgactaatccgttgggcacaatgccggtttttctgactatgacgcagggtatgaccgataaagaacgttgttctatcgtaaagcgcgcaacattagtctcgtttatcacattgatggtctttgtctttgccgggcaattcctcttcaagtttttcggtatttcgacaaacggtttccgaatagcgggtggcgttatcattttcaagattggttttgatatgctgcaggcacgctatacaccgatgaaattgaaagatgaagaaatcaagacctatgcggatgatatttcgattactcctttaggtattccgatgttatgtggtccgggcgctattgccaatgcaatcgtactgatgcaagatgcacattcctttgagatgaaaggggtgcttataggcactattgcccttatttattttcttacattcttgatattgaaggcttccacccgtttggtcaatttattaggggaaaccggtaataatgtgatgatgcgccttatgggactcatcttgatggtgattgccgtagaatgtttcgttagcggagtgaagccgatattgacggatattgtaaaggaaggttgtttgatgtaattaaataagagagccggaatttggcagtaatgaaaaaaggttgcaaacaggaaaacagtcttccgcttgcaaccttttttataactagcgtgaaataccatatcatgctttatgttttatcatcagaaagcttaactaccggtttgtcttttctgctattatgacaaaccggtactggttaggctttgtttaataacccggattctgctgtgctttcaaagtcgggttggcattggtttcacttacaggaataggcaacaatgcttttgtatacgtacggtcgaaactttgtgattctttaagtaatgagtagtgccagccttggttttcctcactgctatagcgtacaatcgtttcgttattgcgcatggcatcgaaaaagcgttgcccttcgccaaccagttccttacggcgttcaatcaaaactttgctcaggaattcgtcatcagcaatggcatcggatactttggctgttggagttttggtacgtttgtccaataaatcgttcagatattttataccttctgctttggctgctccgcccagtttggcagcagcttcggctgcgttcaggtaaacttcggacaaacgtaaaatcggtaagttggcaaggcgcatatctcccagtgctcccagcgggaacttattgatgaaaatcggattgtccccataggttttcttcaagtctttgtcgtacattgctggtagtacaacttcgttacggacatctgcaggatcggtttgcagcatatcaacaaatgattttgtacagatagcatcggcatatccttgttcattcagcaagtagcctatgccttcacggtcggcccagtcatcagaaccattgtttatcaattcaaaaatcatttcttttgtatggttcggatcttgcttgtcccatgcctcagcgtattgttcgggagtccataattcataaggagagtcgttgatgatttcttttgctaaatcgaaggcttcctggtttttgttcatgtatagatacactcggcacagcaaagctttagctgcccataaatcaatatagccttgtttttcacctgcttttttggatacggtcagtgcttctgagtcgatggcattattcaggtctgcaacaactttggcataaacatcggctaccttgtcacgtccgggttgtgcatcacgatccagtggtttgtcaacgaaaggtactccaagcgaagcaccttcatcgtatgtatagggcatgccgtacacttttaccaaatcaaaatgtactaaggcgcgtattactttggcctgattgtagatatttgccaattcagcctgaaaattttccgcatcggtaattgtcttgttatctacagcctcaatcaagcgattggcgcgtcttatcacattgtactgtatattccacatgtttggggcatcatctgcggtatagcgcatttcatagcaagaagaggtgcgcataccttgagtgcgtgcctgcatgtcgtccccccggacatctccatagtagaacatgcgagctgcatagtactgggtgtaagtggaattgccttgcaggccatcatacataccatacattgctgtgcgggcatcattataattggtaatggcggaacttgttggcgttccgttggaaggggtttggtccagccagttattcacacaggacgaaagccctgtcgtgactgctgctaatgctaggatattatatattttcttcataatgtatatgctaagtaaagattttaattagaaaccaagttcgataccaaatgtaattgttcttaatgcaggtgtctcgaagtaacacagtccgtcaacaggggtttctggatctacatacaagtctttggatttccaggtaagcagattattacccgaaatgtaagctcttaatttgcttattccagcctttttggacaagttgcttggaagagtgaaacctatggtcaggtttttcaaacgtaagtgatcggtaggcatcatccaacgtgaagaaaccgtatttttattgccataggcaaataggggcaatttagcgttgtcgcccggttgcttccaggtatcttcaatcttatagtatgccggaacattacctacatagttgtaagtaccgccattagactgtaaccaagttgcagcatcgtatgcatgaccgcccaaagagtaagtcagagtaaagtttaaatctatgaatttccaacttacaaagttagtcagaccaccggtcagtttcgggtcgggcgaaccgataatcaccttattggcctcattcgaatgtatggtggtttcacgacttccatcttctccgttaatgtagaacatttccgatccggtttccggatcaacacctgcgtattcgtaagcatagaatgattgataagcctctccgatacgatgaatggctatgccgtcaatcatttcgttctgttcgccgtccagttttaacaaggtgtttttgttgtgtccgaagttcaaggatgtgctccaataccagtctttattttggatattggtggatttaatttcaaattcaacaccgcggtttctcatagaaccgacattcatcagcatagtggctccaccgctactgttgattacacccggcacggctgaaatattcttgctcatcaacaaatccttagtgtctcggttataccattctgcagtaatcgacaatctgttccacagcgtaacgtccaaacctacgttggttgcgtaattcttttcccatttcatattgggattgtcaaaacgagcttcagccgaaccgccatttcctgcatagttataaccaaattcatatacgcccaaatagccgtacaaatctgtgggttgtgtaccgttcacaccgtaagatacacgtaatttggcatcggtcagcacatgcttgatatcctgcatgaaagcttcttcactcagtctccaagaaccggatatagaccagaaatctccccaacggctttctcttgacaagcgggaactaccatcccggcgataacttgcactaaaataatacttgttattgtagtcataattgatacgtcccaggaaagaagtcattctgtatcgttctacatggcttgaagcacggctatcgcctgcattttctatttccggcaggtaagaagggtattggtttccgttggcatataaataatcatatttataatcttcggtttcaaagcctaccaaagcatccagattgtgtaatccgaaggatttgttgtaagataattgtgtttgtgtatttaactgccctctgttgcccataacgcgctgataaacaccgtttgatgagcgaccgtcgttgctgcggggatcccaccatatacgttcattgttttggttgaagtcatagctgatggcttctttcaatttcagattatcccaaatagtccaggtagcggccattgaaccgaggaagcggtttatggtagccctgttgtaattatatgtttcagtttgtatagggttggcaccattcagtgcagggaaattactgctgaatgaaccgtcttcattatatggatatgtagagggagaggcagtcattgcatagcacatgatagggcttgcaaagctggtcccttcattatttacgttttgggttgaattagtatacatggcgttggcttccaataacactttgtcggtttggtgtgtaacattggcgcgaccggtgaaacgctcatagcctgatacatttgtaataccttcttgctttgtataagcaaaagaagtataaaacctcgttttttcattaccgccttgtgcatttacttcataattctggtggctaccgttacggaataagacatctttccagtctgtatatcctgaccagggttctgctgcatattcatcgatgtttttattggccaaagctgctgcttgttctgcatcataaccaagggtatatttggcataattctcaaatcccaagtgcaggatttcacgtctttgcttaccatcgagaatcggtcgataatcgattgccatattagacataccccagtctgctcttacccctatcttggttttgccagcagagccttttttggttgttatgacaataacaccattagcggcacgcgaaccatacaatgaggcagccgcagcatctttgatcaccgtcatggactctatgtcattgctattcagtgtagccattagactgttaccggaatctgcgtaagtgaattcgctgacgtttccgttcagcatgggcactccgtcaatgacatataatggttcattgctggcattgatagaccccataccgcgaatacgcacagaggcaacggagccgggctgaccggaagtagaagtgatttgaacaccggcaacagaacctgccaaacgatcttgcacgctgatagaaggtaaatcctgtaacttttcggtagtcacatttgatgcagaacctgtaaatgaggactttttgaaggttccatatccggttactacaacttcatcaagcacctcagtatcaggtttcaataccacttttaagttcggtttgatagccacttcctgagtctgcataccgatgtatgaaatctgcaaagttttcgcagaactgtatcaatgcgtaaacttctataaataaacattttataagtagatgcaaaatcattgcatttaattaaaaacctcaatagaatatgctctaccatgtatttacaaaactatcaagttactcatatgttaccatatttcacaataaaacaatgattatcaacaatatacacatatagatgtagcctatattgaaactatcgaaatatactttagttttttgttgaactatttttgtaaaataaaaagtaatgtgagtagccgtggttgaccataaagaaatacactatgatgaaagtcgcaaacaaagatttatgtcaaaataaaacataatcctattacaaaaaaatatcataaacaagctattataataagattataattatctttgtgtaaaacatgtaacctatgacaaaaataaaccctttcataaccagtggctatatttcagcaaagtacttttgcgaccgtataaccgaaacaactacattgacacgttatataaccaacggaaataatgtagctttgatatcccctcgccgtttaggaaaaaccgggctgatagagcattgttttcatcagcaacaaataagggaagtatatcacacatttttaatcgatatatatgcaacaaagaattttcaggagtttgtatttgaacttggtaaaggtattctgaatggtttgaagccgcgtggaagaaaagcatgggagctgtttctcaaatgtttatcctctcttcgcaccagtatctcttttgatttcagtggtaatcccagttggaatttggaaatgggtgatataaagactcccgctataacgcttgatgaaatattccgttatttggaagaagcggataagccttgcctgatttccattgatgagtttcaagtcatagccaaatatccggaaggggatgttgaagccatattacggacacatatccaacattgttccaatgcaaaatttatctatgccggttcgcaacgtcatatgatgggagagatatttactagtccgtcacgtccgttttaccaaagtacggccattatggaactgtctcctattaatgcagatatttatacggaattcataaaaagacactttgcggagaataagaaaaaaattgcagtagaaacaattcaagaagtttataaacgttttgaaggaataacctggtacattcagtttatggcaaactcgctttatgcaatgactgctgaaggtgaagagtgtactgttgataaagtgaattttgccattgaaaatattttgtcacaactaaattttacctattcttcacttctgtttcaactcccacctaaacaaaaagaaattctcattgctatttgtaaggaaggaaaggctcaggaaatcacttcctctaaatttttaaaaacttataagctaacggcgagttctgtgcaaggagccataagaggacttttagataaagattttgtaactaatgaattgggagtgtatagcgtgtatgacaagttcttcgatatttggttaaggaaacggatcagttaaaaaggaatactattgttgacagaccttttctagtgatgcaataatagaaaaatcggtaaaagcagtttgcctttaccgacttttatttataacatattctttacctttatcaattttggtcactcggagaaatctgagaattattctctatttccgagatgggcaactgataaaggaacggacgttcttcctgattataacggaacttggcagcagagaagtgattgttgttttctgcaccccaggtttcatccgtacggtctacaggaatattcaaacgacgattgtcaatatattccaagccttctccccagaactctacacgtttttgataaatgatttcctctatcaagtcggctttgttcgtaaaggtgtaatcataatcgggttgacgggtcttcatgaagttttctagttcggttacagcatccggagaattcttgtgtgccaaagcttctatctttatcagataagcttcttccgaacgcatgtagatatagtctcccaattcccaaccgctgaatgtacctgcctggatattttcacgacctgtaccgatgaattttacagcctgatattctacggaagctggcgtcttagtatcacgcaacaatgtcacacggataggcttaccgtctttatcttcagtatccacacctgtagaacggtcgcagcagaaccattgcagacgaatatcattatccgcgatgcggtctataaacggcttaaaggcggcacgccatacaccgataccagcatagccttcactgtaagcatccatctgcgagaagtaagatgcataaatcgtactattatctgcagtaatgtcgcagccgaataccacatccggcaggctgatgttactgaacccttgcagtatctgattttcattcgttaacatagggatgttgtctatcactacttgcgcatattctatcgctttatcccattcatggataaccatatttgcacgggccaagtgcatagctactacgcaaccgtccatatccgtaggtgaggaggtgtgtatcatatccaactgtttgaagaagccaaaggcagtagtaaggtcgctcatgatttgctcatatatctgggctacagtagcacgcggctggtcgccttccgtttcttctgtgataagtggcacgcacggagattgcgagaagtcatatttctctccacgtccccatttcgttccgtctgcaccggtataataagagtgttggtacagataggttagttgcaagtatgcatagccacggaagccgagagcgatggcacgatatttcaaattggcaggatcttcactgttggggtcaatcagtttgagaatattattggcattggctatgacacgatagtattctttccagcgattgttggtcggagtatagttctgttgccaataatccaacaaataatgatagagactcataccgaaacgtccggtcataatcatgtcgttacccatcaacgatgtcaggtaatcaaagctcttttgaccgaaataattatgttgcatatcggtatcataatacttttgcatatcagaatacatacctgccacagcggccgaaaaagttttatcagggtcgtcctgagccacattgctcagttggtcttcggtcaaataagcggtaacatcggcatcttcaacacaagatgtaagcaggctgccgacaacgagtacctgcatcatatattttattatcttcatatacaaaacttttttagttagaatgtaaggttgatacctcctgaaatcacacgcatcggagaatagcctccatattcatcgtcagcgcctgccattgccacacgggggtcaaatccctgacgtttggaccacaaggcaagattgtctgctgtagcataaatgcgcaacttttcaataccgaatttctgcatcaggttttttggtaatgtgtaacccaaagtaatgttacggatactgaagtagctggcctttatcagattgaggtctgactgctgagtgaaagagttagaagcattgtccgcattccagatagggagtgagcctgtacttgtctccggattgaacgtcttccacatatccttgttatgacctacatagaatgaggagctcataccatccaaataggaataatcataagcatagcctccaatctggaaagccgttgctatagaaagatcaatacctttgtaagagaaagtagtactgaaaccgccattaaaatcaggcaatgcagatttgccgatgaaatagcgggttgcctcggcgtaagtagtagtggtagtgcggcctattacttctcctttatcatttgtttcgtccatgtaccacatggcatttcctttttcatccataccggcatacatataagtatagtattcaaagcggctcttgccttcacgcaggttgaatggaccactggtaataccatctttgcgattttcttcgggcagcgtcaagatgcggtttttgtagtgggaacccacaagcgataccgtccacttcaagtcaggctgattgaaaatatctacatttacatcgaactctataccggtgtttttcatcgcacccaggttttcccagttatatggacgtccggctgtagagaaagctacgggacgcttgaaaagcatatcatctgtacggcgatagaagtattcaaatgaaccatatacccggtcgaacaagcggaagtctacacccacgtcaaaagttttctgcttttcccatgtcaaatccggattaccgtaaaattccggtgaatagcctaattcagcaccattccaagtaaccgtatattggtcttggtaaggtgtgtatacataggcgtaaccttcatccgaaagtatattttcattaccctgggtaccatatgaagcacgtattttcaggtcatttaaccaagcgtccgttccgtccatgaatgcttcattggaaatacgccaagcggcccctaccgaccagaaattaccccaacggtccaggaagcgggaagtaccgtcgcggcggaaagctgctgagatataatatttgttattgtaatcatagtctgccataccgaaatagccctcgatgttgtggttcaccttgtagctattgatgtattgcatctgtccaccattgttcagttccggattgctcggattaaaaaagtttgttttctgtccgtcaaaatagtcgtattcatacttatagtattcatgaccgaccttagccgataagtggtggtaatcgccgaatacattgctgtaggccaaaatttggttgaagttggtagttgttgtgttgatacttgcctgtgtacctcgaccaccgaacgactgtccgtcaccgatagttggcgtgtaatagagtgtttcgctgtcattcgtaaaatcataactgtaatttgccgtaaacttgaaattcttcaagaatgagatttctatatatgaacgtgaagtcaggttattatacacgctttcacggatgtcctctctcatgttggctatcacattttgattagttgcagtagggcgtttggatgtaccgtctgtttcaccgtttccggcatcatacatgggacgtccgtcttcataatatttcatgttaccttctgcgtcataggcatgaaccgggaagataggagcccaggagcgtgccacagcgaaaggattagaagcagttccggcattttcctgtacaccgttttgagtagctttggaataccctacattggtacctactttcaaccaagacttcagttgggagttaacattggcgcgagctgtaaaacgttcataagaagaacctaatacataagagtcattgtccaaatatcccatagatacatagaaatccgtacggtcgttaccgcctgatgcagacacattatattcctgacggaaagcgttgtcgaacaaggcatcagcaaaagtgtcatcataacgcaaacgcgcattggggttaagtttaccatcaggtgtcaccagatattctccttgcggaataatgtaagcattgtaattacccagttcgcctagcaaatcctgactggctgccaaattagaatcttcaatggagtttccggctgcccaataggtattacgaataccgtaccaagtcaggcgatagaactctccgggatcggtagccatgtcataatccttatacgcacgctgtgccaccccccaactaccgtcaaagttaatggatactttgtccttacgtccggtcttggtcgtaatcataactacacctccggctgcacgagaaccatacaaggagttggaaacagcatctttcgatacgttcaccgaagcaatatctgtagggttgatatccgacaacttaccgttgaaaggcacgccatctaccacaatcaacgcattattgctagctgaaatagaacctataccgcgcaggacgatatcggcatcctgtcccggctgtccggaagaacttactacctgtaagccggctacagctccttcgagtgcgtttgaaacggatgcagcctgcgaattgctgataatttcatttttcacactactgatggagcctaccagatcctgcttacgtttagtgccataagctactacggttacttcatcaagcagctccgtatcagactttaatattacttttaggtttggtttgatagccacttcctgagtctgcataccgatgtatgaaatttgcaaagttttcgcagaactgcataaaaagtaaatatctgattattaatatattatatctttaatagaactgattataattagtatagtcttctttaaaagctaatataagagaggtacgggatttggaggtatacccattatctacttgaagttaatatatatcgttgatattcagatatttataacaataatacagttttattatcatattgaaaatttactttctgtttttttctttatctttttgttgatataatttaatcaattatatattgaacttaaacgaatacattgttatggaatactatagtatatcttgtattaactattgttcttttgtaaatatttataaatgctttattcctaaagaaagaacaatgtttggagatgagttttaatacggaaaaatccctccattttagattgaatttgtgaaaacaacctaaaacaaagggatttatttactggaatttatttacctccatttatccacgtcttctcagaatagatataagaaccgtcgccgtaggcttctttcacatccggattgccgatgaccgcgctgttgccatagggcaagcgttccggatagcggttaataccgctttgggtgtttctcgggttagtcagtattacatactcttctcccattgctttcaagcgacgcagatcgttgtaagtttccacttgctcgtccaatgcttgcgccacatatttctgttcaaaaagtttttggagtgtcggtgcgcccaaagacatggcatagttttttgctattgttgcagcagtcggtacagtggattcatctccaaaccaagtcagaatttccgtaacagaagcttctactgctttttgatacgccgaggtggcatcaatgtttgaacgcagttgaacttctgcctgaatgaaatagagttcggctttactcatgatatgaataggctgtgaaccgaacaaataccatgccggctgatatttcattactctggcatcatctactgtcttggcaatagtttcatctcccggagtataagactctcccaaagcattcagataataatccaagcgaggatcatctgtggcttccatcaagtctgctactatttttgaaggtgctgtgtactggcggctgaaaacataggcactccatggattgtcacatgtagaaccattaaatcctgtaaccgtaaatccttcgaatccgttgtctatagctttttgtacggctgttgctacttctgaaagtacgttaggttctaccgccagtttatgcaacagatagcgtgctttcagagcgtgagcagctgcgagccatttagatgcaacccctttgtaggctatgtcctgattaccggcacttgtcaaacttttgcctttttccaaattaccaatagccttgtcgagtgtagccaaaataccagtataaacatctttctgtgcatctaatttaggttgcaaattaccttgcccttgcacagcttcgctataaggaatatcaccgaacatatcggtcaggacaccgaagtttacagcttccaatacttgtgccatacccagtatatcaaactgtccgacattacccggtacttcattctctattttactctgcatttggcgtatattctgtaaattgccatagatagagttccatacattgttaaaggtagtagaagcagcccattcgcttgagttgcgcatttcggcaaacattaattggttgttacccatacctatctcttgctcattgagcgaagaaaggtaaaaagcaaagtcacccgatacggtactgaagcctgtggacataatggcatctgtcagttggagtgctgccgggacggcttccggtgaaggatgttcatagtccttgttgatgcggtcaaatgcatcttccgtacatgctgccagtccgagaagagctaccgtcaaagtcatgaatatgtattttttcataatcaaaatctttatgttatatgtttagaaattaatagtaagaccaccgccgaagctagatgtgttgggaactgagaaccgttcgaagtatccgctcatattattattgccttgcgaagactccggatcgaagttgggcaaattggcccaaacaagcacattacgggcaaagccgtaaatcgaaatgtcgaagataccgagtttgggcagttgataagtcaaagttaggtcgcgcaacttgacaaagctcgtgtcatatacgccagattcggtgatattgtaataagcctgatagtaatcggctttatatacttcaactgtattgggctgtcccgttgcttcatctataccttcagcaaccatacttccttcgtgataaggaagtgactctttggtagcaccaaaataattcagagtcatgtttgttccgtgatacatctttccaccttgttgccagctccatgtggtagagagtgaaagacgtttataacggccacccagcgtaaaaccagtagtgaagtccggagagcagttgcctaagtcttggctattgcccgaggattgaggcagaccgttcagtaacagcaaattgcctgcttcatcgcgtttgaagcccaaaccatatatgttcggataagtacatcctgcctgtgcacgaatttgcggttctacaaatccgcccagcataatggattcaacacccggagccagttctataaccttgttgtttactttggtaaagttgatgcccaaattcaggtcgaaatctttggcttgcagaatagcagcattaatagaaagttcgtgagcatgcgtgcgcatttttccggcattggtcaacatttcctgatagccggtcgctccatctgcgggtacataaaatatctgatcttctacattctgcaaactgtatgtatattccactttcaaacggctgccaaaaaaatgtaaatcggcacctacttcataattggttgtattttgcggtttcaattcttcatcatacacgcggtaatagggtgtgaaagtagatactccgctgggtagaggataggtaaccggatagtaagagtacataccgcccccgtaggtgggagtataataataattggcataatagttaccggcctgacctacttgtgcgaacgaagcgcggagtttaccatagtttaatattttattgttctgtaagaaaggtaatttggtgaactcccagcctaatgatactgaaggatagaagaaactgcgactgccgcgcggcatggttgatacgtagtcgttacgtccggttacggtcagatacacctgatcttgccatgacattgaaagacttccgaaaaagcctactgtacgttcttgtcgcttatactcactagatgttagtggagtagcatttccaatgttggtaaaaccaggaaagttgaagttgctgccgtaataatcccagttacggatactctcatgattgaactcgtttcctaatattacgttcagtctccattcgtcgctttttccgaatttaccgtcaaaattaacggtgaacagattattgaatacattatgctgagaaccgtaattctctatgtctccacctttcagcgatgacgtactgcccatttcccgtacagtggcatagtcagaagtccaaatgtcaagaccggcctgttccctaatcttgagtgagaagttctctcccaagcccaaatccggttggtactccaaataggtattgccaaaagcacggttggtatgctggagatattcattatgttccgcccaccaataagggttggtaaatgaggtggaacggaacaatatctggtttgtcggattgcccggttcatgattgggaatacccttcaaatcatattcggccggagcagagtaaaccacattcatgataccatcgttggctcccggtgcagatgtaattttagtagatgaatagttcatggagaatcctgtgttccactgtggattgattttccaatctaccaatccgcgcgctccccaacggtccatgcctgttgaaggaatgatgccattctggtgcgaattgttcacgccgaacgaatagtttattccgttgatgctttgtgatagattcacgtttgtgttttcagtgaatcctgtgcctaaaaaatcgcccacattatcataaatctgtggcgtagtccaaccatccaaaccggcttgtgcgcgtttgggattgtaatattgtccttcgcgcataccatctgccgcagtgtattgattattcatgtttccaccatatttggggtcatttgccaattcgctgatttttggtccccaagtcatggaagaagacggatcatatcctgctgcaatgctgttgccctgcgaatatatattttgacgttcgaatttgcgtgaaacccgttgtgcactcaggttcgttgaaatcgttacgcttggtttgttcatattgtttttggaaccgcgtttggtcgtaatgacaatcacaccgttggatgcacggataccatacaatgcggatgctgcctgacctttcagtatattcacagactctatatcttcaggattaatgtctatgctacgatcggcgtagttagcacccgttacagatttaccggtatcaaaatccgcagttgtattcacaggcataccatcaattacatataacggctggttgttgccatcaaacgagcgagcaccacgaattacaatctgagaagaagcacccggtgcacccgatgactgacgaatatctacacccgtcagcttaccttgtatagcgctggcaagcgaggttgttcctgctttattcagttgttctgaattcaaatcctgtgccgcatagcctaatgctttgcgatcacgtttgatacccatggcagttactactacttcatccaattgttcggcatctgatttgagtatcactcttacatttggtctgatagccacatcctgcgtttgcatgccaacgaatgaaatctgcaaagttttcgcagaact

SEQ ID NO: 4136 - DNA, 3145 bp, Unknown
  gut microbiota DNA sequence
cgatactgatatttcgaaggcttcaaagcaacaactgctgcaaatacgcagaaaggaacttgccatggtatttcagcacttcggcttactaccccaccgctccgttttgcacaacattgctttcggattggaactgcaaggagtagaaaaagaagaacgtgaaaagaaagctatggagtgcatgcaacaagttggactgaaaggatatgaaaaccaaatggtagggcagctctccggtggcatgcagcaacgtgttggcttggcacgcgcccttgccaacaacccggaagtgttgcttatggacgaagctttttccgcccttgatccactgatacgtgtacagatgcaagatgaattactgaccctacagtcgaaaatgaaaaagacaattgtttttattactcacgacctgaacgaagccatcaagctgggcgaccgcatcgccatcatgaaagacggtgaaattgtacagacaggtacttccgaagaaatattgaccgaacctgccaatgcctacgtagaacgtttcgtagaaaatgtagaccgctccaaaataatcaccgccagttccattatggcagacaaaccgcttgtggcgagactgaagaaagaaggtcccgaggtattgatccgcaaaatgcgagaacgtaacctcactgtcctgccggtggtagatgccggcaatatactggttggagaggtcagactaaatgacctgctaaagctgcgaaaagagcaaatccgttcgatagacaccgttgtacatcacgaagtacactctgtactgagcgataccatactcgaggacatcctgccgcttatgacccgcactaattctcctatctgggtagtaaacgagaaccgggaatttcagggagtagttccattgtcgtcactcatcatcgaagtgaccggaaaaaacaaggaagaaattaatgaaatcattcaaaacgcaatagaattatgataaacataggacaatatatagaaacagccatcaactggctcactaaccatttcgctacattcttcgacactctgagcataggtatcggcggttttatagacagtttccaacacgtactgtacggcatccccttttacattaccatcatcgctttgacagttcttgcctggataaagtcgggcaaaggaacagccgtatttaccattttgggactattgcttatttacggaatgggcttttgggaagaaaccatgcagacattagccctcgtattgtcatccacttgtcttgcactgctgctgggcgtgccattaggcatctggactgccaacagcaatcggtgtaataaaatcatgcgtcccatactggacttcatgcaaaccatgcccgcttttgtatacctgattccggcggtactattctttggtttgggtaccgtaccgggcgcatttgcaaccgttatcttcgccatgccgcctgtagtgcggctaaccgggctcggcatccgccaagttccgaaaaacgtggtagaagcttcccgctctttcggtgccactccctggcagttactctacaaggtacaactacccctggcgctgcccactataatgacaggaataaaccagactatcatgatgtctctgtccatggtggtgattgccgctatgatttccgccggcggcttgggagaaattgtattgaaaggaattacccaaatgaaaataggacttggatttgaaggcgggatagccgtcgttatattagctattgtgttggaccgtatcacccaaggtatggcacaaggcaaaaagaaaaaattatagaactgaaaagaaataaacgatatgaacagactgaaaataatagccgtactgttgttggcagccttgctgccgacagcttgcggtaacctcaatgacaataagaaaatcagcatagcctatgccaactggtcagaaggcatcgcaatgtcttatctgataaaagtgatattggaagaacatggctacgatgtacggatgctgaatgctgatttagctcctatcttcgcatctttatcgcgcaaaaaagcggatgtattcatggatgtatggctaccggtaaccatgcatgattatatggagcaatacggagacaaattggaagtcatcggcaatgtatacgataatgcacgcatcggtctagtagtaccagaatatgtcaccattcaatccattgaagaattaaacggacataaagataagttctccagtcaaatcatcggtattgatgcaggagccggaatcatgaaaacaaccgaaaaagcattaaacgaatatggtttggactataaactgatgaccgcaagcgcccctgccatgaccacatcattagataaagcaatccgaaaaaaagaatggatagtagtgaccggctggactccacactggatgttcggacgctataagctgaaaatactcaatgaccccaaacagatatatggaaaagctgaatccatccatactgtagtctggaaagattttagtgaaaaatatccgtttgttgccgaacttttacgaaatatccgactagacgaccagcaaatcagctcgctgatggccactatagaaaaaacacacaaaacggaaacctatgccgtccgccaatggatgaaagaacatcaggccttagtagatagctggatacctataaaaacagacttttccacaaactcttacatcaacagataacggccaataatgaaaataaaaagtgtatttctttgatgtcaccacatggttacttatatttgtcaccaaatagtgacaaatataaattatggaattaaaagaaacggaaaagcgattgcttgaagcagtcagcaaaataattgaagaagaaggttttacccaaataggtattaaccgtattgcaaagaaggcacaatgtgacaaagttttgatataccgttattttggtggtttagacgggctgttggcagcctgggcgaagcaatatgatttttattcatttgcctattccgagtttgccggtcagatagcacaggttacaaccgctaatcttaaggatataataaaaacaatactattaaagcaattggaatatctgaaagatagtcatcttatgcaagaattgtatgtatgggaattatcaggaaaatcatcatttcggacaata

SEQ ID NO: 4137 - DNA, 25210 bp, Unknown
  gut microbiota DNA sequence
atcatatattcagagactgccaggattattatataacacacagacaaaaagatgtaacatacttttgaagcagattaatacaaaatgtattcctctgtaacagaaaacataaattatgaaaaacataattatatgtaacgcagacaaaaaaagatgtaacatacttttgaagcagattaatacaaaatgtattcctttgtaatagaaaacacaaatcatgaaaaacataattaaattatttacaaatatgaaagccactttaatttctttagcattttgctcgttactctcgacaacttccttatcacaagaattatcattgaacatgcctatcatccaaaccaagtacactgccgacccggctcctattgtatacaatgacactgtctatctttttaccagccacgatgaggatgatggagagaattttcacatgaaggattggctcctctatacttctaccgatatggtgaactggcaagatcgtggcgccgtagcctctctcaaagatttcaaatggtacaaaggcgataacggtgcttgggcacagcaagtagttcaccgcaacggcaagtggtatatgtattgccccattcatggaaacggcattggtgtactagtgtcagactccccttacggtccttttaaagatcccataaacaagccgctggtatggcaaaaggaacactggtatgatattgaccccacagtatatattgatgatgacggtcaggcctatatgtattggggtaacccgaatctctattgtgtgaaactgaatgaagatatgatttcctactcaggcgaaatcatggagttaccccatattgaggattatcaggaaggtccttggttctataagcgcaacgaacactactatttagcttttgcctctacatgctgtcctgagggtatcggctatgccatgagtaaaaacccgcttggaccatgggagtataaagggcatataatggaccatacaccacggactcgtggcaatcaccctggtatcatcgattacaagggtaaatcttactgctttggtcaaaactatgatatcttccgtttggaaacaagccgtcacgcagaacgtcgctcggtgtcggttgctgaaatggagtataaccctaacggcaccatccgcatgctgccttattttcacgaatgtaaattggaacagattgagaaattcaatccctatcgtaaagtagaagcagaaacgatggcttggggcttcggactgaagaccactcccaagaatatctggagtcacgaacgctggaaccaactggtaacaagtatagatgacggcgaatacctaatggtgaaaggtgttgattttggaaaaggagccaagacgtttaaagtctccgcttctgctcacctatatggcggcatattggaaattcacatcgaccaaaaagatggtccatgtgtcggcacagtgaatatatcacatacgaagagtgaacttcgcgagtttacgacgtctgttgtgaacttgaacggcgtacacgatctctattttgtttttaaaggtgggaaagaactgaaaaagaacctatttatgttggactggtgggcattcgagtaaagaacagccattagcacaatcgtgtacttcccaatacactgtaattcaagtcactcattcacagaaataaagcatagaacatgacacgaaaaacactgtttttattcgttttgctgattggttgctttacggcctttgcccaaaatgattctcttaaaagcaatcgtgtgaatatcgaattgccaacaggaaagctttctttacaaccgctcaatcagaatacggtgcgcgtaaggttcaccaaaggacaggctgttccaaaagaagaattaatctatacagaagatgtagcgtctcctgcatataaagtgaaagagaataatacctcactgaaactttcacttgagaaaatgattgtagtttatgacaaacagcgtcatacactgacttttaccgatgataaagggcaaattatcttgcaggaaaaagaaggagggcgtttattgaaaagttctactgttcaaggcgaaccggcctttttagccgaacaacatttcttatcaccggctgatgaatacttgtttggcaccggacaatttcaagatggctatttaaatgtgcggggactgagcagacgccttacacaagttaatacacagatcgcaattccttttattctttccaacaagggatatggcattttgtggaacaactatggtctgacagactttaatcctgctgacgagtctgtaaagttattaccggtaaagacagagggacaagccgttacagtggacgcgacaagtacaaaaggcaataaacgtgagactcgtctcttcaagtcattcacagcaacattcagtgttccggccgacggacagtacggattgctgttggatgtagggcagcgtatggcacgcaaacattacatcgctattgatggaaataaaattgtcgatgtgaataatttgtggctccctcctacaacttccgttatagtagaattatcgaaaggagaacatactgttgaagtacagggcgtaaaagaagattcccccatattatattggagacaagtaactgatgagactgtcttccgttctccggtagcacattctttggactataccgtattctccggaaatgccgatgaaataatagccggttaccgtcagctgacaggcaaagcgcctatgttgccgctttgggcattaggctatattcattgccgggaacgttataatacacaagcggagctgttggaaaatgcacatgaatttaggaaacggaagctccctgtggatgtgatcgtacaagattggcaatggtggggaaagtacgggtggaatgccatgcaattcgatgaaaacaaatatccggatcccggcaaaatggtacgtgagcttcataacatgaacatacacctgatgttgtccgtttggtctaaaatagataagcaatcggcacttggaaagcaaatggagtctaaaggtttttacattcccggcacagattggattgattttttcaatcctgatgcagcagctttttattggcataattttagcagtaaactattgaagccctacaaaattgatgcgtggtggcaggacgctaccgaaccggaaaatgatgatttactgaaccggcgaataaacaatggggaaacccctggtgaattctaccgcaatgtttatccgctttttgtgaataaaaccgtctatgaaggcttacgtaaggatgacccggatcggcgtgctatgatattaacccgaagcgggttctctggtatacaacgatatggtgcagtaacatggtcgggagacgtaggcaatgactgggaaacacttcgtcggcaaatagctggcggattagggcaaatggctgccggtctgccttggtggacctatgatgcaggcggctttttccgcccttccgaccagtatacgaataaagattaccaagaacgaatgttgcgttggatacaggccggaaccttcctgccattgatgcgtattcatggttatatgagtcagacagagccttggcggtacggagaacaagtggaacacattgtttccgactttttagacctacgttatcgcctattaccctatatatattcacatactgcattagtttcacaccaaggaggtactttcatgcgtccgctgatatttgatttttcacaagataaggaggctttgaaacagcagaatgagtatatgtttggaaactccttactgattaatcccataacccaaagcaatgtacaaagctggaaaacctaccttcctgaacatgcggcaggatggattgatttttggaatggaaaggcctatgagggaggacaatacgtggatattccggcatcaatagagaaaatcccggtatttgtaaaagccggtaccatattaccgttaggcatgaaaaagcaatatgcttcggaaaatcttagcgcccccttagagatacacatttatccgggtgaagacgcttcattcattttatacgaggatgagggagataattacaattatgaaaaaggagcatatagcaacatccgttttaactggaatgaccgtaaacgagtattgacgatagaagaacgacaaggagaatatcccggcatgcaggccaacaggactttccgtatcataagtccgtctgcggaaaaaacagtcgtatatcaaggtaaaaggctgaaaatccaattgccataacctattgcaagaataaaaaagtgtttgtttaacgatacaagaaaataaaaaacgatatgtatttaccaagacatatatggtttgtactagttgtcatcatgatcagctcatgcagtacagaaacattggatgtaacctctcctaccggtaaactaggagttacagtggagcctatggagggaaaggcttatgacaagattactttttctgtgaactatgacggaaaaactatcctttcccaaacagaactggggttggaaacagacgttcagaagttttatggaaatttgaagctgaaatctgtttctaagacaaaacgaatcgtcgatgattacaagatgataacgggaaaacgcagtcattgtatcaatgaagcctttgaaaggacctattcttttgaaaaccaagaaggaaacactttggatattacattcagagtatatgacaatggggtcgttttcagatatgaaattaatactattgcagacaaagaatatgtcgttgatgaatatacggcatataatattccgcaaggagccaaaagatggatgcagcaatacgaccccggatacgaaaagttttttccggtatcaacagatggaaaactccccgaccgtcccaaagttaactcttggggatatcccggactcgtagagttgcaggattctgtatttatgctgataacagaagcaaatatcagacgtggacattgcggttctcttttattcaacggtgataacaatgacagataccaagtgaaacttgccgataaaaaacaggtcgctgaaagaacatgggtttctccttggagggtactcattataggaggtttgtccgatattgtggagtcaacactggtaactgacgtctctgacccttctaaagtagaatatacagaatggataaatcccggcatggtgtcctggatatactgggcatataatcatggctctaaggattatcaaaaagtcaaagagtatattgatttggcagctgaaatgcattggccttacaacttgattgattgggaatgggatgaaatgagcaatggaggcaatcttcaagatgctgtgaagtacactttaaacaagggtattaagcctttgctatggtataactcaagtacaaactggattggtcccggtcccttgttccgtttaaataaaaagcaagaccgggaaaaagaatacgcatggctgagcgaaatgggaattgccggtattaaagtagacttcttctcgggtgacagtgtttctaccatgaattactatatagatctgctcgaagatgccataaaatataaactaatgcttaattttcatggggctactattccgcgagggtggcaacgtacatatccccacatgatgtcgattgagggggtatatggcgccgaatggtataataacgctccaatattaaccaatcgggctgccgagcataacgcgactttgccttttacaagaaatgttgtagggccgatggattatactccgggaactttttccaattctcaacatcctcatattacttcatatgcccatgaactggcattgccggtcatttttgaatcagcgctgcagcatatgccggacagaccctctgtttattatggcttaccggaaccagtgaagagacttttgtcagaactgcctgttgcttgggatgatacaaaattattagccggttatccgggagaagaagtaatcctggcacgtcgtaaaggcaacgtatggtatattggaggcatcaatggcactaatgaaacaaaaacacttcatatatcattggataaaatagctgttaacggtaagaaaatctctatattcaaagatggtatagataacaagcatttttccattgaagaaaatatccctttggcaaatgttaaatcagacctgacaatagagtgtttgccacgtggtggttttgtagccgtcataaaataatccaaatcccatagtagacatttattatatttcggtattatcacatttaatataaatgatagatatggaattcaaaatagagttttatgtctatcatttatattaaatgtgataatgccgaaataatcgtatatttgtgaaatgattaaattattatagacatgaaaaagcatatcttattcttactctgtttaatagccgtagcatctacccgcgcacaagtctttgccgaccattttgcagataaaacccttcgcgtcgattatatctttaacggcaatgcatccgggcaagctatctgtctgaacgggttatccgctctccccacctgggcaggaagaaagcatcatctggcggaactcccgttgcaaggcaacgggcagattattatgcgcaatgcagccagcggaaagactatttatactacctctttctcctcactcttccaggaatggctggaaacggacgaagcccggaatgtaactaaaggatttgaaaatacatttctccttccctaccctcttcagccggttgaaatagaaataaccctgctcgacccacgccgcaatgtccgcgcgtccatgaaacacatcgtgcatccaaacgatgtattgatagagcaaaaaggaaattcacacatcacaccgcataaatacctgctgcacaacgatagtccggaaaagtgcatcgatgtagctattcttgcagaaggatatacactccaagaaatacagacattctatgaagatgcagatatcgcttgcaaaagcattttcgaccacgaacctttcaaatccatgaagaaacggttcaatgtagtagccgtagccagtccttccacagatagcggagtcagcgtgccaagattgaacgagtggaaacatactgccttcggttcacatttcagcacgttctattccgaccgttatttaacaacatcacgcgtaaaagcaattcatgatgctttagccggaataccctatgaacacattatcatattggctaatacagaagaatatggtggtggcggtatctataactcatacaccctcacaacagcccatcatccgatgttccggccggtagtagtacatgaattcggacacagtttcggcggacttgccgatgaatacttctatgataatgatgttatgaccgatacctaccccttggatatagaaccgtgggagcagaacatcagtacacaagtggactttgcagccaagtggaaggacatgcttagtgaaaatactcccgttcccactccggcagaggtaagcgaaaactatccgacaggcgtgtatgaaggcggcggttattcagcgaaagggatcttccgaccggcagagaattgccgcatgcgcaccaatgaatatccggctttctgccctgtgtgccaacgcgctcttcgcagaattattgagttttataccgaataaaaaacaaattttaaagaacctgcttatgattaaatttcaacgcatcaccaccacagatgcagccttgtacaagtacatggagcagttgatgactgcttctttcccttctgaagaatatcgtccattggaagaattgcgtaattatacagatagcaaaccgcatttttactgtaacattattctccatcaaaatactccggtaggctttattacctactgggatttcggacatttctgctatgtagagcattttgccattgacccgtctcaacgcaatggaggccatggcaaaaacgttttaaaccaattatgtcaccagctaaagaaacccattatcctggaagtggaaatgccggaagaagaaatggcaatacgccgaatcaatttctacaaacggcaaggttttacattatgggaaaagccgtacatgcaaccgccttataaatccggagatgattaccttcccatgctattaatggcttatggcgatttagaatgcgataaagacttcgaacaggttaaaaagtgcatctatcgggaagtatacaatactaaataaataggaaactcattcttttaaggttcccatacataagaaaataaaggtcgcttgtaaaaacaggcgacctttattcaatatagtctgaactaactttactgacgcggctgcgcagaatagttaatcttcaatgcatacgctttacgaagagcctctttgatatctgttacgatacccattttcgtatcttggtcaactttcaaagacactgtcatctgcggctgatcctcttccttcatactggcacgttcaccaataatatagtcttggattgctgcaacttcagcataactgtcattcaactggatacggctttcattacctaatttcttacggaattcagcagtaggttttcctacatagataaacgtaaccaaagacttcttttcaagtttttccaactctgtagcttgcggaaccttaaactcaacctttaatgttacctcacgcatagttgttacaatcatgaagaagaacaacagggtgaagataaggtcaggcagagaagaagtgttcaacgccggcatttcttttttaccagtcttattaaattttcccattacttcttatctccgtattttttaggttctgcctcagagatcttctgaggataaatgtcacgaattgctttttgttgatcgtcattcaaatcaacatagttcttttgccatttttcctgagccaactcatcacgtaactcattgtatgctgcaaccagctcgttttgtacagcaagatatgccttataagaagaaccacggtcgcaacgcaaagaaattacatgcttttccgtaatcatcatgttaccaaagaaaggaatatcctttgcatgtttttccggtttggtttcatcgttatacggattggcaataaattcttttgctttagcacgtaactgatctgttgtgatataatcgtttccgcacatcaactggtcgttcatattcaggaagacctgcaacacgttgcgttccttcaacttaatatcgtcattcttttggttctgctccggtggtggcggcaaacgtcttgccaaaccacggtcagtatccattgacgttgtaatcaagaagaagatcaacaacaggaaagcaatatccgccgtagaacttgagttaatatcaggaacttttctttttccttttgccattgtaattactctttaaattgagttatctcaattgattatgataatttcttcttaatactactaaagatgatagcaagcactgttgcaccaaacaggatgtagatagaataaaggaacatatcagtgatcttcaaccagaacggaacattgtccgtaccgtcataacccgggatattaagcggttcatcactacccatagcccatgctataacaacaactgcaaccaatacgattacaccgatcaaagacttcaatgcatttcccggattatctttcaaggcagttccgaactggaacaggaaagcagccactgtagcaacgacagcgataccaaacaaaccgtacatcaagaagagcagtgcatcggtttgggcgggttgccacatttcagagtcaacgctcataagtactgcatcgccctgagcatctccaccgaagtagaacaagcccaacactaccagaatggcagcgaacattacgtacagtacgtagtatgatactttatatgataacttagccattttacttattttttgtatttcaagtcatatttgataaccatatccaacagtgagatagaagaatcttccatttcgctggtcaaagcttcaatcttagacaggatatagttatagaatacctgcagaatcaaagcaacgatcaaaccgaagatagttgtaatcaaggcaaccttcataccacctgctacaaccgtcggagagatatcacctacttgttggatcttatcaaatgcctgcaccataccgattacagtacccaagaatcctaatgacggagccattgcgataaacagtgtgatccaagagcaacctttttccaggtaaccagcctgtacaccaccgtaagatacaactgacttttcaactacatcgataccctgatcgattctcatcaaaccctgatagtagatagaagcgataggacctcttgtgttgcgtgcaatgtctttggcagcttcaacatcacctttttccaaagcagcttcgatagcggcaataaacttcttggtgttgatttcagccaaactcaggtaaatgatacgctcgatacagaaagcaagaccgataaccaatgcgatggcaaccaaactcatgaaagatgcagtaccttcaataaatttagtcttgatttctttgtgaataccgccttcttcagctacaacaggagcggcagcttcatcagcaggagctgcttgtgctgcaggagcagcttgttctgtttgttcagcagcaggagcatcttgagcctgagcaagttgagttgagccaaatgttaagactcccatcacagcaacaattgcaaataactttttcattgtgtgtctaatttttaagattaattaattaaattacttattatgtttatttattgttcttctcttattttaaaacttcgcggagagacggggattcgaaccccggataccctttaggggtatacacgctttccaggcgtgcctcttcaaccactcgagcatctctccaatcaacatctgttctgaaatcgggtgcaaattacaaaaaaatgcgaaccgcgagcgttttcagctacaaatgtattcttttttttgttcttccactgcattctcaaagttttatccgcaagaaaatctcaaaattaataaactttaaaatcttcggaacgttatttgagcattccaaacacttttaaagcgttttcagaagtgatacggcctatttcttcaggcgaatttccgtatatttccgctacttttaacagagtatcctttacattcgcactctcgtttcttttaccccggttcggcacgggagttagatagggagaatcggtttcaagaacaatccgttccaaggggatattttgcaaaacttccggcaatcccgatttcttaaatgtcaccacaccgttaatcccaatgaagaaattagaaaactccagcatacggaatgcctcttcccgtgttcccgtaaagctatggaaaatcccccttagagaagacgttttatacggtttcaatatatcatatatatagtcgaacgcctcccggcaatgaatcactacgggtaatccatactccaacgcccaccgcacctgccgttcaaaggcaatctgctgttccttcaggtaagttttatcccaataaagatccatgcctatttcaccgattgcgacatagccgtccggcattgccagatgtccggccacaacagccagttccttctcataaccggcatccacggaagtgggatgcagccctatcatcggaaaacaataccccttgtactccgaacagaccttaagcatgggttcaatagtggtactgtctatattgggcataaaaatatgggtgactcctgcttcccgggcgcgcatcatcacctgcggcaaatccgattggaagtcctccaaaaaaaggtgggaatgtgaatctactaatttcattttgcaatctcttctttttcaccggtacggtaataataaatcaaaccataagcgcgacacaactccagacgtttttcattcggcataacctctgcgtatttccgctccacctggttccagatatccagaatcagagcatcggcttcggagcgcatggaagcaagagcttccagactgcgcgctgtcagcgcctgcaagttcctctgtctctcgtagctctccatgaaaatatcataatgtaccctgactttggcaatggtaggattataaataggaattccgccctgagaaatgcgccggctctcgccttccactattttacgtccccactctgcaagggctgcctccgtagacaaatccggaacattattgtttctcatatccaagccgtagaactccttatgaacggtacgcacctccgaacgaatcactgccagattcagtacctggataaaatgcgatatgtaaagacgggcagtctttacatttgcctgatgcttacgtcccgcctttgactgacgctcaaaacattccacataatacgaatgcgccgcttcaaactttaccaggaaattccgggcatccgtaagtaccttcagagacacagccaaatcatacacattatatgtgtcacctttggcaacaacggctttcaacgcacgtattcttgcctgatctgtatttggtaatcttctgtaaggcattctaatcggctactgacaattacacttcccggtacatcaactcctttataagcttatccagttctcttttcctctcagccgtcacattcacggcagccaggctctccaaagccttgttgttgtattccgacattttgttttcacaaaggagtttaacccctatccggttatacaaaccggttacagcctctatcttctcagccgggtcaaagtccgtaacggttatccaatgcttcaattgcgcagcctgctccttatccgcatgttccaaggcctttatcaacatataggttttcttgttgcacaggatatccccacctatatttttaccaaatacggcagtatcaccgtacacatccagcaaatcgtctttcagctgaaaagcgacacccatattcatgccaaagtcatacagccgttccgcatcttcagcagaggcaccgcccaacaatgctccgattttcaaacttgccgccagcagcacggatgttttcagacgaatcatctccaggtattcctcctccttcacatcgctccgctgctcaaaatccatatccatctgctgaccttcgcaaatttcaagagccgtcaggctgaacaaatccatcacagccttcaaatgttcggccggacattccgccataaactgataagccagcaccagcattgcgtcacccgaaaggatagccgtattatcattccataccttatgcaccgtttcttttccgcggcgtttatcggcacggtccatcaggtcgtcatgcagcaatgtataattatgatagacctcgatgcctgttgccggtgagaataccggcctgacatcttccttataaagattataagccatcagcatcagcacggggcggattctttttccacccatggacaaaacataggcaaccgggtcgtacaaccctttcggagtacgttcaaactgcaaatccgcaatatgggaatttattttatcgagaagttcggaagctgtaaacataagtatttcaaattaggaatggcagagaatgaaaagaggctgcctaaaagcaacctctttacgcgatatttaaatatattaactaaaaaaaacaaaattactgcaagcggaacatcacaggcactgtgtatttaacacgtaccgctttaccacgctgcatacccggtttccatttcggcatggagctgatcacacggattgcctctttatccaaatacgggtcaacacctctaagcactttagcatctacgatactaccgtctctgttaacaacgaactgtacggttacacgaccttgagttccgttttcctgagcgatagtaggatatttgatgttcttgctcaaatactgcatcaaaccagccataccaccattagggaattccggcatctgttctactacctcgaagatagtttgttcttccggttcttcctcttcaacagctacgggaacatatttgatttccacagcctgattggtttcttcagatgtagctatcgtggtttcctccacatctgcgtcgtcatccacgattgtcagggtttctgcaatcgacggagcttcggggggcggtggagccacctgctcgggttgttccgtaatcggaatgatttcctcttcaaatacaaggtcggtaattgcctggctcgtatcaatcttgatatcacgttttgtccattcgaatgcaacgaacataaacgcgagcacaatcacgtaaccgacaagcagccaagtcgactttttgttctccaagtctgccttaggtgtctttttaatttccataatttatactataattattagtgtttctcattttgggcaaatatagcacttttcccacgattgttcttgcccggctgtgtttttttacacaataaacaaggcatttttatttttttaattcttcaaaagccttcgtcagcttttgtagcgcaaaagtaacgagatattttaaaaataccgtatctttggcaagaattttaaatgaaacgttcaaaaaaatctaccgagagagagattcctatataaattatggtataaaatcatttcatatgaaaaagataacaatcgcaatcgacggcttctcttcgtgcggaaaaagcacaatggccaaggacctcgcccgtgaaatcggctatatttatatcgacagcggagccatgtaccgtgccgtcactttatatagtatggagaacggtatcttcacagccgagggcatcgatacggaaaaactgaaaaagcagatcaacagcatccgcatatcctttcagctgaacccggaaacgggacgtcccgacacctacctgaacggcatcaatgtggaaaagaaaatccgcacaatggaagtatcctcccgcgtcagtcccattgccgccctcgactttgtgcgcgaagcaatggtagcccaacaacaggaaatgggcaaagccaaaggcattgtcatggacggtcgcgacatcggcactaccgtatttccggatgccgaacttaagatattcgtaactgcctctcccgaaatccgtgcacagcgcagatacgatgaactgaaagccaaaggagaggaagccggtttcgacgaaatcctggagaatgtgaagcagagggattatatagaccagaacagggaagtgagtccgctccgcaaagccgacgacgcactgctgctcgacaacagccacatgaccatttcccaacaaaaggaatggctggcagaacagttcgaaaaagtgtgcaaatcataacgcaaaaagctgcaatatggcaaaagtggaaatagacgaaggttccggcttctgcttcggggtagttaccgcaatcaataaagcagaagaagagttatccaaaagcggaacattatactgtttgggagacattgtgcacaacagccgtgaagtggagcgcttgaaagcaatggggcttatcaccatcaaccacggggagttcaaccgcctgcataatgccaaagttttattgcgggcacacggcgaaccgcccgaaacctatataaccgccaggcgcaacaatattgaaataatcgacgccacttgtccggtggttctccgcttacaaaagaaaatcaagcaggagtatatccaggaagacaatgaggacaaacaaatcgtcatatacggaaagaacggacatgcagaagtcctgggactggtggggcaaaccacaggaaaagcaattgttatagaaaagctggaagaagccaagtcactggatttcagcaagagcatacgcctctactcgcaaaccaccaagtcgctggatgaatttcaaaaaatcgtggaatacataaaagaacatatatcctccgatgtcactttcgaatattacgacaccatatgccggcaagtagccaaccgcattcccaacatccggaaattcgcagcttcgcacgatttggtattcttcgtcagcggcaagaaaagttccaatggaaaaatcctgttcaacgaatgcaagaaggtaaatcccaactcgcaccttatcgacagtgcggaagagatagacaaccggttactcattggcacagagtccattggtatttgtggagccacttccactcccaaatggctgatggaagaaatatccaaggcaataaaatcacgaatttaaaaagcttttgttatctttgcgagcagattttttaaggtaattattaacactaaataaagagattgttatgggaacaattaagtgtatcggtattttaacatcgggcggcgacgctccgggaatgaatgcggctatccgtgcggtaacacgtgcggctatctacaacggacttcaggttaaaggcatatatagaggttacaaaggcttggtaaccggtgaaatcaaagaattcaagagccagaatgtaagtaacatcatccaattgggcggtactatcctgaaaacagcgcgctgtaaagagtttaccacgcccgaaggacggcagatagcatacgataacatgaagaaagagggtatcgatgccctggtggttatcggtggcgacggctctctgtccggtgcacgcatctttgcgcaagaatttgatgtgccctgtatcggtctgccgggaaccatcgacaacgacctgtacggaacggataccacaatcggttacgacaccgccctgaatacgattttggatgccgtagacaaaatccgcgacaccgcaacttctcacgaacgtcttttcttcgtcgaggttatgggacgcgatgccggtttccttgccttgaacggcgctatcgcatccggagccgaggctgccatcataccggaattcagcacggaagtggaccaattggaagagttcatcaagaacggtttccggaagtctaagaacagcagcatcgtgctcgttgccgaaagtgaactgaccggtggtgcaatgcactatgcggaacgtgtgaaaaacgaatatccccaatacgacgtacgcgtcacaatcctcggacacttgcagcgtggcggcagtcctacggcacacgaccgtatccttgccagccgattgggtgctgccgcaatcgacgccatcatggaaggacaacgtaatgtgatgataggcatagaacacgatgaagtggtttatgtacctttcacgaaagccatcaaaaacgacaagccgatcaagaaagacctggttaatgtactgagggaactttccatttaataaagtcccgataggataaacccaagagggccgaagtgattttaacattttctttcaggcacggagtgcacagatttcatggttcttgcaaaccggaaccgtgaaatccatgcactccgtgcctgaaaaattatcataatgcaagaggttctttaaattttcctcaacaagtgttctatccgttttttggatttataaccacttctccacaatcttctccgtcctgttccacaactcctgcatctgcacatggcgggtatacttcccggaaagatgcttgggacggcaactcgcatttaaagttcccgtacgttttccggcatcctcatccagcagcagatgaacggctgttgcagctccttgccggggagtacggataaaaggccggaataagatatctgtcagcgggtcgaaccacatgtgcatcgttattatatcggtagatacgatacccggatcggccgcattcaccacaatccctttttccttgacccgattcgccagattaacggtaaacaaggtcagagccagtttcgtattgctataaacaggaatgcgccagaaacctcctctctttccaagatggaagaaatccggaaagtcgagacgccctatggcataagtacaagacaccatattgacaatacggctccccttttccatcagaggaataagtttgcgtgtcaacaaataaggagcaacataattaacactcaccgtacgttccaaaccatcctcagtgatgtgacgccctgtttccattgttccggcattattcatcagcagactgacggtatccccccttttcaacattctttcggcaaaagccgccacagatgcaagcgaagctaagtcaatgcccaatacctcaatatatgggttaccggtgtcatgcaccagcatatcctttaccctttccgctttttccggacggtaacaggccatgattattttatatccggctgtagccacagcacgggttatttccgttcccataccaccgtctgcaccggttatgatagcaagtttcatgtttaccaagtataaattgccaataataagaaagattcaatcaccccttcgcttctattttctctatctcctttttcaagcaggcaggcagttcttcctgcaaatgctgatggcaagccatttctatggaatacatccgggctatgcagtaattactatgcctacagctgcaacgggcattctcctccttgcgcatacggttcacaaagcccggttcgttgagcagggcgcgtgccatctgtacagcctcaaaaccattgtccagcacctcatctatcttggcacgcgacaccagtccgcctacatatatcaacggcatcttcagctctgcacggaacttcagggcgtcttccaggaaataggcctctttgaatggcacagacggtatcatccacctgcccgccatgcgtactccatacttcagccaccagcatgtcatataatgtgtcatgctgcgaatcggcatttccccacgcatcacatacataggcgctttacttacaaaaccgccgctcaataccaatccatgtgcacccgagcattcaagacgcttggccacttgcatcgtctcatctatctccatgcctccccggaaaccgtcacgcatgttcatcttcacaagcactgccatatcgctgccggcagccttcatcacttcatccatcaccatatccataaagcgcatgcggttttccagagaaccgccaaattcatctttgcgatgattggtcgaaggcgaaaggaactggctgataaggtagccatgtccggcatgaatttccactgcatcaaatcccgcctcacgggccagattcaccgcctttccgtaagcacgtgccatctccggcagttcaccggcacgcaaaccacgcacaaaagtaggtgaatacaggttgaagccgctgctggcaccgaccggggtacacccgcaaatactcttatgggacatgtttccgcaatgccccaactggattccggcagcagcaccttccgcatgtatcgcatcggtcagcttgcgaagccccggaattatttcagggcgcatccacaactggcggtcaaaagaaagcccgctctgagtaacagccgcataagccacagtagtcatactgatgcctcctgccgcaaccgaacggtgataatcgagcaacatgtccgaaggggcatttccgggacacatactttcaaaagcagccgaacggatggtacggttgcgcaatgtcagcggtccgaaagtaaccggagtgaataattttgattccatgtgatagtttcctgatttatgatttatggtttgtcctttcaatagatataaggtatgatacgcttgcgttttcctaccgcctcatcaccgaattctttccggtaacggccgtaaatggcattggcacggggaacgagattggcaaaagtccaccacacaaacacccatgcggcaggcgaagcagtaagtatggcaaaaccggtccattctaccaattcaccgaaatagttggcagaagtgacatagcgataaagacctttctcaggaaggtaatgattcgtgtcgcccggcttacgcaaatggcgaatcacatggtcggaatgaagattgataagcataccggcaaaaaacaacagaagccccgaccacgcatgagtcttcagcaaataagtccaaccaccggaatacatcccttcggaagcaaagtaaaacagaccgccagcctgcatcattccgttcagtacattaaatacaatgcccatcatcataatagttaccggcatccggctttttcctttcagcagaaaaggaaaaataaacgacctttggaaatagtgtagctggaacagcagaaagaaaagatataccggcacggcaaagcctgccccgctcctgccccacaaccaaaacataacgataaagaccggcgcttccatcaatacccacgccgccttgttactaatggaatatccccacgatgcggtacggaacatcccatatccggctttgacgaaataaagagcgatgaacacaaaaagcgcaatgacgcacatcactcccaaaaacagatgaaacccttcttcgctcatgttcttttgtttaagtgtgacaaatatagggaaaacctgtaacaatcaaatcgttttcccgcagcaattatcaaaaacatacagaaacggataatgcaaagagcgtggatatttatccgttccgccacgggaaaatgaataaggtatcgctgtccggctttccaaccgcaacaacgataccttatacgacccggcaatccgaggtctgtgctttgaaacggatctaccgcttcttaataggaatgtatgctacttcttccaatacattcttatatgccggacgaataatgcgcttaccttcgaagttcaactcttcattacgatgtgcacaccagcccacgatacgcgccatggcaaacagcggagtaaatatttcctgcggcaacccgatcatttcatatacgaaaccggagtaaaaatccacattgctcgaaaccgtcttgccgttgttcttcacacggccgaaaacttcgatagctcgctcttccagcaattcaaggaaagcaaactcacgctctttccctttctcgcgggcaaggtcgcgggcaagttcctttaaaagtatggcacgagggtctgaaatggtatagacggcatgtccgataccgtatatcaatcccgtcttgttatatacctccttgttcagcatacgggtgaaataagtgtcaatctcgtctacattcgtccaatcccggatattctcctgcaaatggtggaacatgtcggtaacctggatattggcgccaccgtgaagcgggcctttcagggaaccgatgcccgcagcgatggcagaataggtatctgttccggtagaggacgttacgcgtacggtgaacgtagagttgttaccgccgccatgctccgcctgcaacaccagcaacaggtcaagggtacgggcatccagttccgtataatcctttttcagcatatacaggaaattctccgcgagagaaagattctcctgcggatgccggatatgcaacgaacggccgtgagtggcatggcgaagcatattgaaagcataggctatgatggtggggaacttcgaaataaggtctatgctctggcgcatcagattatcgcgcgacgtatcatcggcattcgggtcaaagcgatacatctcgagcacgcttcgcgccaggatattcattatattattcccttcaagctcgatgatgttcatcttcgttttctgttccaacggcatattatcgttaatcagctcacggaaagaagccagttcctccctgtcgggcaaacggcctgaaagcagcagatacgccacttcttcaaagccgaaacgtttctctttgagaatggcatgtgccaaatcctcaaggtcgtagccacggtagaacaatttgcccggaataggcttcagacctccgcccggaatgcgctcgtaccccactacgttgccaatcttggtgagcccaaccagcacacctgtaccgtcttcattacgcaatccgcgcttcacatcaaacttcttgaacagttcgttctcaatccgggtcgcttctttcaggtcttcggaaagtttgtaaatcaaatattctttcttcataatatttttattttttctggtttatgggggaattatttgcggaagcttctatcctgttcacgatttcccgtgtaaaagccgatgtagacaacgggacaccaccctgcatgaagcgggccaaatcgactgtagcacgaccttctgtgaaactcttctccagtgcttcctctatcagcaaggcggcctctttccaacccaggtgttcgagcatcatcaccgccgaaagaatcatggaacacggattcacaatgtcttttccggcaatattgggagccgtgccatgagtggcctcaaaaatggcatgtcccgtcctgtaattaatgttggctcccggagcgataccgatgccgcccaccatagcagccaactggtcggaaatataatcaccgttcaaattcagagtggcaatgaccgagtattcttcgggaacaagcaaggtattctgcaaaaaggcatcggcaatgcaatccttgacaacaagacgtccctccgctatatcttttccaaactcacgctccgccagctcatagccccatttcttgaagccgccttcggtaaacttcatgatattgcctttgtgtaccagcgttacagagggcagaccgttttcgagcgcataacggcaagccgcacgcaccagccgctccgttccctctttagacacaggtttcacgccaaaagatgaagtttcgggaaaacgcaccttggtcacgcccatctcatcatgcaggaagcgatagaacttttcggcttccggtgttccggcttcccattcgataccggcgtagatatcttccgtattctcacggaatacgcacatgtttaccttctgcggttctttcaccggcgaaactacgcctttataccaacgcacgggacgcaggcacacatacaaatcgagtgtctggcgcaacgccacgttcagcgaacggataccgccgccgaccggtgtagtcaacggccccttaatacctattttataagtgcggaatgcttccatcgtttcttccggcaaccaggaacccgtttcattaaatgcccgctcacctgccagcacttctttccatccgatactccggctgtctccataggctttcttcaaggctgcatccaccacagcctgcatggacggagtgacctctgcccctactccgtcacctgtaataaaaggtacagtaatcttttccatattctatcgtgcatttaatgcagagccggcacggaaccagcctatctgctgttcattatacgtatgttgtacttcgaagctttccttgctgccgtcctcgtgatgaagcagcactttcaggttacgtcccggagcaaagtctttcaagccgacaacggaaagcaagtcatgctcccgaattttatcataatccgccttatcggtaaaggtcagcgccagcatgccctgtttcttcaaattcgtctcgtggatacgtgcaaagctctttgccagtatgacacgtacattcaggaaacgcggttccatagcggcatgttcacggctggaaccctcgccatagttttcttcggcaacgacaatcgaaggaatcccttcggacttatacagtttggctgtaccggacaccgttccgtacgtatttgtagaacggttccacactttattcgtttctccgttaaaggcattgacagcccccatcagcatattgtccgaaatattctccaaatgcccgcggaaacgaagccacggacctgccatcgagatatgatcggtggtacacttaccctgcgttttaatcagcaaaggcatattcagcaaatcctctccgtcccaagccgggaaaggagcaagcagttgcaggcgttgcgactggggagccaccgcaatatccgtctttgcatgggaaggtgcgacatacccctcgctccctgccgtaaatccttccggcggcagctcttcgcctatcggttcggagagtttaacctgttcgccatcggcattgagcaatgtatctttcagcggattgaaacataaatctccggcaatggtcaatgccattgtcagttcgggagaggcaacaaaggcatacgtattcggatttccatccgcacgcttggcaaagttccggttgaaagaagttacaatagaattcttacgagtaggatcatcggtcacacgcttccattgtccgatacaagggccgcaggcatttgccataattgtagcgcctattttttcaaaagcgtcaatcataccgtcacgctctgcggttgcacgtatgcgttccgaacccggattgacaatcagcggagcagccgcatgcaaccgcttctctgttacctgatgcgccaaagacaccgcacggctcaaatcctggtaggatgaattggtacaggaaccgataagccctacctccatcttacggggatagccgttcttcaaaaccttctcggcaaactccgaaacaggcgtggcggcatccggagtaaacggtccgttgatataaggctccaatgtggaaaggtctatgtcgataatacggtcatagtatttctccggattggcaactacttcatcatcggcacgaagtccttcggcaacggcagtagccatatctgccacttccgcacgtccggtagctttcagatagtcagccatacgctcatcataagggaaaagagaagtcgtagctcccacttccgcacccatgttgcaaatcgtagcctttccggtagctgaaagtgaagcagtacccggaccgaaatattcgataatggcatttgttccgccttttacagtcaaaattcctgccagttttaagataacgtctttaggagcagcccatccgtttaattttccagtgaggcgcacgccaatcaagcggggcatcttcaactcccattccatacctgtcatcacatccaccgcatcagcaccgccgacaccgatagccaccattcccaaaccgccggcattcggggtatgagaatcggtacctaccatcatgccgccgggaaaagcatagttttccaacaccacctgatgaatgatacctgccccgggctgccagaaaccgataccgtaacgggaagaaacatcccgaagaaaattatacacctcctcattcgttttggttgcagtggcaatatcttctttcgctcctttataagcctgaatcaaatggtcgcaatgtacggtcgaaggaacagccacctcatcacgtcctgcattcataaactgtaataatgccatctgtgcagttgcatcctgcatagccacacggtcgggccgaaagttcacatagtcttcaccgcgtttatagtctttcacattcttctcatcgtacaaatgagcatacaagattttttccgctaaagtcaacggacgttgcaatatcgtccg

SEQ ID NO: 4138 - DNA, 23912 bp, Unknown
  gut microbiota DNA sequence
gcaatctgaaagtcacctgaaataccagaagaagcaaattcaccggtagaagcctgcgggatattatcaatcacatataaaggttggttatcgccacgcaaagaactggcgccacgaatcgtaatagaggaagcagcgcccggagtagcagatgctgtatttactaccaaaccggcaactttaccatcaagcagattgtctatagatgtcgctttcatagcctcattaccatccggacgcatggtagtcaaagcaccggtcaagtcacccttgcgagccgtaccgtaagccacgacgacaacttcatccaattgctgcaagtcgtctttcaatgttacattaatattggtacgattacctacttttatttcctgcgttgtatatccaataaaagagaataccaatatagaattggaatttggaacagaaacagtataattaccatttacatcagttatggtaccactggcagcaccttttacatgtacgtttacaccaggcatcgtttcaccattaccatcgtacacaatacctttcacttgaatggcctgagcgagagctgtggttacagccaacagacatagcaccatcacaagcatcgccttttgaagtctttgtctcatagaattaaatttaaataaatattgtcgtttcaacgctgcaaaattgcaaaacaatccaaaaaccgaagtacaaaaatcactattaataggtctaaaaatcactatattttcattgatagtatttttaaggactccagtttctgaaataaagcatttatgcccatttcatcggtattacattcatttccaaccaggaaaaaaattcataaacttcactatacgaacaagaaatctatcgtttattcaaaatcagacatccattctgataggttacacgatagcttttccctttttgagtcttgaaaatcagcacagcgtcccgatatctcaatatgcaaggtgttcccgcataagaaataatgtcaacctgtcgcagctttccatctttccagcatacatccaatgaaaaatttccacgggcacaaagtccggacacagaaccgtcactccaagcatcgggcaaagctggcaacaagtgaatgaatcccatgtgactttgcagcagcatttccgtaacaccggctgtgccaccaaaattcccatcaatctggaaaggcggatgcatgtcccaaagattattcaatgttccgtgttttaagagattaccaaaaagtttataagcatgattaccatcgtgcagacgcgcccactgattaagtttccaacccatactccaaccggttgctccatcaccccggtgttccagcaccactctggaagcatcggaaagttcaggggtggttatcggtgataccgtatgcccgggatgcaagccaaagagatggttcacatgacgatgctggtctttcggatcatccatatcaccagaccattccatcagctggccatagcgcccaattttataaggaaccaacttctccaatacctgctcccagtatttgcgttctttagcatccacccgcagcactttgctggcatcgatagcatcaagtagaatttcacggactactgcatgtacgaaggttgctccctggtctaccggaccatgttcaggagaagtggaaggagccgcagtataggtaccgtcgggtttatgccataagtaatctacggcaaagtttgcactacttttaatcagttcataaccgatttctttgagaaacttcacatctctggtgtaatcataatactcccaaatgtgtgttgccagccatggtcctgccatagggttgaaattccacgacatattctcactctccaacggtgtagtaaaaccaaagatatttccagaaatggaagccgtccagccacgagccccaaaatatgcctgagcagtcttctcaccaggttttaccaaagtacggatgaaatctatgagcggtttcatgcattcgctcagattggtagaacatgccggccaatagttcatctgcagattgacattgttgtgatagtccacacgccacggaccatctacattattatgccatataccttgcaaattggcaggaagattgccgggacgagaactagctatcaacaagtaacgaccaaactgatagtacaattgttctaaatagaaatctttttgaccttcgcgataacgactcaaacgttgagtaatcggcatatcacgaaaatcagatgaatttgtcaagttcagtttcacacggttgaacaatgctgtataatctgcatagtgagcttgatataacgcttcatagccttgtttttctgcctcatttatccaataagctgtcgtttcttccggatttactcccacatacgttttcggattagtgaagtcagggttgaaattaatcagatagtcagtatcagctgtaatcagaaataccacctcatccgctccttcgataaggagttggtcatgagtattcgttacagttccaccttgcgttaaaacccgcatacgcactacatactccatactattattatctaatctggctcgaaaaaccaatccatttttcccttcaggttgtaaagagcctgccgaaaccggattaggagcataactgaatctaagattctgtttagcagggcggtcagcactataacgcatcaccaaaacgtttgcaggataagatataaatgaagtacgcttatattttactccatctttgcaaaattgtactattgcacgggctgaatcgagcgacagttcacggcgatatccgcttatcccaatagtacttagtcctgtttctatgtagaattctcccatcgtcgtaaagttaccgaaccggaatgggtcttctttataagattcatatggaactgtactgttgaagttctggcaggtcagacgttcgaccttttcttgattaccttcagtaaaggctttacgaatctcgtcaagaagataagcagactgcttatttacattccaataatacgccgctcccttagcggtattcggtcctcctctccataaggttttctcgttaaaggtaatacgttcggcttctactgatcctaaaatattagcacctatactgccattgcccaaaggcaaggaagctgattcccattctgcatccggattcttagcatggtctccagctgaaataggtttcttatccttccataattccggatttccaccataccatacagcatgaccgtttaacgtcgtgggagtatcaaaccagtaagacaagggtggttgtatgccctgaccataaacgccaaggctcattaacaatcctataaatataatcctgtttcttttcatattatccataaagtacataccaagcagctcacacaaaagagaatcatagcaatgagttgattcctgcgatagcatttccgcatccacttcttccatctctgttatttcctgatttcctctactactgcacgctgtaaagaaagtgaattttcataatcacagtcggtggccaaatcccatgacatcacaccacgcatgtgctggccgagcggttacccaactatgaatcggcaacatactgaagaaagtttcgtccaacttatctttcaattcagtacccaaatacatattaaaataggcattcataaatgaataatttaaatttccgaatcaaagagacaggaaaaaacattagaaacgttccctcagaactgcttgcacactacatttttaatctttcctttaaaaccgttcaagccatcccctatttgttgtaagggaaatatcagtgtctcctgatactccatatactccatacgcttatactgctgacaatagactttcttggtgcggccttccagacgttcctgcaacttaccgttcacataaagggaagtccccttgtaatcaccttctatacgaatatcactccacacaccttcgggcaaatgataggaatgaaacacaaatgtatagccgtcacgactgaaagccaggcagcctttgttttcccaattggcatacaccacagaatgaggtcccttgaatagtatggaactattgggagcattctcatcgggacaaattttgaaagatacagcatacggataccccacttcttgtaacacagtagaaatagaatcggttccgcttagcacacagacttccccggcaggggtaagttgcacttcaccagaagcagtctgacatacacctgacggtatccggcctaacagattcacgccgggagcttcgggcatctgacgacataaatcctcaaactgttcaaaagaaacctgacaattgctgcctttccacatcttttcagccaatacctgtagggctgggaaagaacgcacatgcacgtcttgttctgatataccgttgccgcacttatcattccacacggcaaacatgcctcccagtactccaacggtaccttcgggcaatgtcaactttttattaatcaaccatggtgaccaagtttcatacaaccattgatgatccagaaaatcacggtaataacctgctgagggtacaatataaagataagtgtcacaagagttaatcaacttatatccgtcttttaaagatgcttccgggtctatccagtcatacgaccatgcattgacagttactccttctgcctgcacaggtgtctttcccgggagccatttcaagccaccccacatacggggatttttaccgtatttcgcaatgtatttcaaataccggtccgtgaaataacgatactgttcagcctcctttttattatactcgtctgttcctatatgtacgtccggaccgataaataccggtgagtctccacaaagatattcgtccaacaatgtatccacaaaacgataagtctcctctttataaagatcaagatgatccataccatattcttgactggctatttccggcttataatgagcaaaagccagagagtgggcggggatgtctatttctggaataatgtttactccataagctttccccatcttctgtaactctataaattcttttttggtatatgacccgtccttggatgtcaatcctgggaaacgttcactctctaaccgaaaagcagcataggttttattccaatcattctcaaaaaattgcggaaacccattatcattcaaatgtatttgaaactcattcattttgtaaaaagacaatatctttacatattgcttcagataatccatcgtgaagaactttctggcaacatccagcataaatcctcgattagggaattgaggataatcgcgtgcagtacctttaggaagagtaccttgatgattaaaaaggatctgcagcaaactgcgcgtaccccaaaatacaccttttacggcaggagcttttatacaagcataaccggaaaagtcaagcacatatccctcttctcccaactcctcatcaggtggagtgagggacaagcaaatatcgttcttacgaggtttgccggtacgcaaagtataatcccaccccatcaattccttcaagtctgatataagaatacgagctgtggactctaacgcagccttatcggttgtgcgaattacaatgctgcctcgtacaggcaaggaaagagttccacctgttccacgccattgttgcaaagccggaataacttgcggacaagattcttgggcaataacagaaaggcttatacaaaacaatatgataaaaaataaaattctcttcataaacaattgatactatttaaaattccgatatgtcaaaagtgcctcatcattttaaaggacgtatttcaaaactaaacagatactcttttacaggcaccaaataaggcgccagtacccccggtccgcaagtagccgttcccacaccgctttgcaaagcgtcaagatgaacggtcaccgtgccatttcttttcaactcgttaatgtgcccggcagcatctatattctcatcagtgaaaggagatacactaaattcaaatggcttctccccccacacagacaatcctttttctaattcatcgctaacttgcatccaacgcacgtctgttcgattaccggtagcctgaggacgcacataataatgaaacattcgttctgcatcagtatgataaataccgatacgccccgaaagttttcggtcagcataagtctcatgctctcctcggcccaaataagtgacacgattaaaactgtggggcatttcaaaaaccagcccgacacgagccaatgaactgacaaacgttgtatccggaacaaaacgggtttgtacagacaatattccatccttgcgaatggtgtattcaaatgtagcagaccctattgtatcatttttatcattcaataatttcacttcactgtaagtagtgtgtcctgatgtttttacagataatacacgttggaccaaatgatttagccctaatttgcgccaaacctttgcgcctcccttcttttcacggttgtcattgtccgttgcagggcgatataaactcagccgcacaggcgaggcaagatattcctgtccttcatagatgtatgatgttaatgctccggttttcggatcaatctgaatttccggtttttcagacagtttagccaatgtcggacgatactgactattggcaggcaagacaaactgatcataagcaacctcatcatcagttccgatgaaagcacttttcttcttaggcgtccagcttaaattcagataagcctcacggatattccagggtaagcgtacgcctcccaatgaaacttcagtagtggcatgtggagcaacttctatagactgttcccctttcgctaacattttaccattatctcccactatgctccacttcaacacataagcattcagattggtaaagtcataccagtttttgatagcgatggttaaatttttaggatctttgagcgtgcatttaatatattgataagctttttttacctcttttaaatgaggatgcggttcccgtacagcattcaccagcccattacagcaaaagttaccaaaacttggtatattttccggtccgtaatcaccgccatacgcccaataccatttaccatgagcatccacctctctgaatgactggtcgacccagtcccagatacaaccgccttgtacgacaggttcgctctcgaacacttccatatattccttcaaaccgcctccactgttacccattgtatgcaaatattccgtcataatgaaagggcggtatactttcggacttgtctgatgggcataagccaacaactcatccacactacgatacatgcgacagtaaatatcagtattatattgttgttcagcacgttcatactgaactggacgactttgctctactgatttcatccaatcgtaagtgcgttcaaaattaataccattacctgcctcatttcctaatgaccagattatgatggcgggatgattttttgacctctcgtacatccgttgtacccgatccatatgggctggaagccatgtgctatccttagcaagcgaagctgctccataccccatgccatgcgactcaatgtttgcttcatctattatatacagaccgtaaagatcacagagatgataccaatacggatgagtggggtaatgcgaatttcgcactgtattcagattattctgcttcatcagacgaatatcctgctccatcagttccttgctgactgtacgtcccaattgagaatgttcatgacgatttgccccttttaccaatatgggcacaccgtttatgcaaaatcgtccatctttgatttccgaggtacgaaaccctacgttgcaccctgtcagatgtatgatttctcctgaagtatcttttagagaaataatcaatgtataaagataaggatgttccgcactccaacgtttcactttcggtaaagtctctttctcaaaaaaaatgaaattgccgctttccttgctttgaaccggacaatccttttccagaatagtttttccgcaagcatcttctaaccgatacgataatgtggcagcaccttcagcctcccctcctatggttgtttcaagagcaaaaagcccatccgtatacgtttctttatctaaagtggaagtcacttgatagtctgcaatatattgcttgggagtactatacagatagatatcacgttctataccgctcaatcgccacatatcctgacattccaggtatgatcccgcactccaacgatatacttccagggcaactgtgttctctccctcttttacatatggagtaatatcccattcagcaggagtcttcgaaccttgattatagcccaatagatgctcatttacccaaatataatagaatgaggtaacgccctcacaacagatgacggtccggcgatctttccaatccaatggtaaagtaaagctacgccgataagaacctacctcattttcatcatatggtactagtggtggatttttcttaaagttaaatagcgggtcatcgaattcgtaggattcattcacataaatagcagttccataaccttgacgttcccagtttccaggcactttgatgtcagcccatccacccgtataatatccaggcttataaaagtctttgggccgattatcaggattctttacccaagaaaatttccatctcccgttcagactcatataatagcgagaattttcataatctccttgacggatatttgtagctttgtcgtatggccatacataagtatgaggccgtaatttattttttccaatagcatattgactttgccattcgggaacagtagcctgagcagaaagtctaccgactccaaagaatattcccacaatgagggagtgtagaaaaattttatagatgtaattcatcgtataacaaaggtattagttatgataaatagttttttgcaaaagtatccgttccacaatgaatggaaggtatagaaatatctttttttgctccaaaaatgactatttcactcattatcgtataatcctcctatgctctataaacagcgttaatttattggtacaaatcttgatatacaataaattactgataccaaacttgacggcgattatacttgttaaaatagcggaataaatttataagattatttgcattattgaagcaaaaacaatatttttgttttacttttttatactatgaagaaaattttattaactgtacttgtttggatattgccaaccgtcttatggggaaagcaactaagtgacaaacaatatatatttcaacggattgacgtacgtgaaggactctcttatcaagtcaactgcatgacagtcagccaccgtacaggtcatgcctggatggggaccaaaaacggtatcggacgcttcgacggatatgaacaaaagaaatatttgaattgcaatatagaccaattggtagaagaccgcaataataatatttgggcacttggcagcgaaggaatttttctgtatgatgcggtcaatgataccttttaccgggcatgtgacctaaatggaaaccttatatcagcctcctccatctgcctttgggatgacggtgtttttttcggaggatttgacaaattatacaaatatgattataagactgggaaaatcgctcttttccgttcgattacttccaatataaaattccaaatcaccgatctttaccgttttgacagtcataccctgttggctgccaaccgttgggtgggagctttgctgatagatattcgtaccggacacacacgtgatgtcccatttgattgtcgcgacgtagttacgatgctgcctgattctaaaggtaatttttgggtgactccgtattgtaaaggagtgcaatgttacaataagaatggtaaacttcttcacacctaccacacaggcaattcatcaatgcagagtaacattgtgcttgcattggctgaatatgatggccacatctggataggtaccgatggcaaaggaattgccgttctaaatcctgaaaacaatcaaatggatgtattaacacatattccgggagatgcctattctctccccagcaattctattttgtctttttatgcagatccggaaaatgggatttgggctggcagcgtacgcagtggaatgttcaatattaaggaagtaggcatcaaactatatgcagatgcactccttaatgccgattatggactcagcgagaaatctgtattaagcctttatcaagaacaaaacgaaaaggatatatggataggaacggatggtgggggactgaatgtgtttaatgccgataccaataaatttcgccatattccatctacatatggagaaaaggtagcctccatcacgggtgttgataaaaaccaccttttgatatcactctttggcaaggggatatttttctataataagcagactgaacattgtactcctttggttattgtaaatgatgacattaacaaccgattgtgccaacaaggcaagacagtcaatcttatgcaaaatacaccggaaactatcttactgctttccgagagtccatacagttacaactggaaacggaaaacattcacccccattcatataaaccaccttaaagatgccatagtaggtcagttgctcccgatatgtgtaaaggaaacattttcttacctgcatgattccaaatgtatttatcgtatagaccataatgacaataccctgcacgtcctctatcactgtaaacaagataccatgatccattcggcttcagctgacgagaaaggcattatctggataggaggaaactacgggttgggcagtttctcgcccaatgacggttcatatactcatatttcaaactcgttgattaacgaagcaatgtctgttgccagtgaccagcatggacgattatggattggtaataatgaacgtttgctttcctggatgaccacccaaaagcgctttatcctttacggtgttccagacggagtcgctcctaacgagtatctgccgaaaccccgtttactttcatcagaaggagatgtatatttgggtagtgtaaatggattattacgcattgcttccacacttcccaaagagcacccggaatctccggtgcttgaactatctgatgtatttgttggcggtgatcgcatggaatatatttcaggcaggaagcctgttttaaaaattccggagcaaagcagaacgataacgattaaagtaaaggcacacaataaagatatattccgtaagcctgcctattgttacaatctgcaaggatatgaaaaagagcctatctattcttatttgccggaactgacactgaatacgctgtcggcaggcacctatcagataactgcttcatgcactacccgttccggcgaatggacagataattaccccattattgaacttatcatactcccaccttggtaccgtacatggtggttcatattaacatgcatactgactgccttgtcagcagtgggcttatccgtttacagctttttacgccgcaaagagaatcgaatgaaattagcaatgaaagagcacgagcaacaggcgtatgaagaaaagatacgcttcctgataaatatcaatcatgagctgcgtacacctcttacgctaatccatgctcctttaaaacaactgatagaacagtttcctgccaaagatgcccgctatagggttctacagaatattgcccgacagtctgagcgcatgaagaatttattaaacatggtacttgatgtacgcaaaatggaagtcagccaaagtaccttgcatatagaaagcatcaatctggaaaaatggctggaagaagtagttgaagactttatacccgaggctacccaaaaacatataacactcacccgtcagctgtcagccggaatagaatcattctattgtgataaggaaaagtgtactactataataaccaatttattaattaatgcaataaaatacagtaatgagggaggagaaatcaatattattacttcattatccgaaaagaaagacagagtgcgtatttctgtttcagatcaaggtccggggctaaaagatattgatgtctcgaaactgtttacacgtttctaccagggtgagaacagtcgtcccggatcaggcataggactttcgtactcaaaaattttggcagaacagcaaggcggcagtgtcggcgcactcaataatgttgaatctgcaggttctactttttggtttgaactgccactaaacattaagcctggcaagcttattttacagccacaaccttatcttaacgaattgcttgcctctgctgaaaacattgagagtgtaccagacgagcctactttcagatccgaaactaaagattataccattctggtggtggatgacaatatggaattagtagattatctgactgatgcgatgaggccctattttaaagacgtgcgcacagcttataacggtgaagaggcgttagagatgtgcaggcagtggcatccggatgttataatcagcgatatacagatgcctaaaatgaacgggtacgagttgtgcaagcgagttaaggaagaattagacatcagccacaccccagtcattctgcttactgctcgaaatgatgaagcaagccgtatattcggttataaaaatggagccgatacttatcttacaaagccgtttgagataagtatgctctacacagccatatataaccaattgaaaaatcgtgagcgtataaagaaaaagtatattagcagcaaaacagcaccaacaccagaagaaagtacatttagcgccgctgacgagaagttcttgaatacaatgaatcagattattactgaaaatatcgacgagcctaatatgggagttcctttcctatgtgacaaactcggtatgagccgtgcctcactttataataagttaaaggcattaacaggtatgggagcaaacgattatataaataaattgcgcattgacaatgctatcaacctactactaaacagttcattaacagtaaacgaaatagcagaccgggtcgggttctctaccccccgctacttcagtgcagtattcaagaaaaacatgggatgctctcctacccaatataaggaagaacaattcaaaaataatgtacagaatatataagtcaacaggacaagaatgtccaccgaaggaaaaaatattggaataattgaagctacatcttagcggcacattatatcgaaagccggacacaaagtccggaaaagcattccggctggcagtctgagttaataaaaaataatatgcagcgattgaaggcaaaacaatgataaaattgtatctttgcatcgttttatgtattgaaagaataaataataacaacgatatgatagccagaatcaacgagcttctgcaagaagtagaagcactgaaagccgctaatgccgaggaactggaagcactgcgaatcaaatacctcagcaagaaaggagccattaacgaactgatggcagacttccgcaacgtgcctgccgaccagaagaaagaagtaggcatgcgcctgaatgaactcaagaacaaggcacaggaaaagattgccgctctgaaagaacaattcgagagccgggacaacggttgtgaagaccttgaccttacccgttcggcctatcccgtgaaattagggacacgccatccgctcagcatcgtaaagaacgaaatcatcgatatatttgcccgtatgggattcaacatcgccgacggtcctgaagtggaagacgactggcatgtattttccgccatgaactttgccgaagaccatccggcacgcgacatgcaggatactttcttcattgaaaacaatgccgagaatgtatcacacaatatcatactgcgcacacatacatccagcgtgcaaagccgtgtcatggagaatacacaaccgcccatccgcattatctgtccgggacgcgtataccgtaacgaggctatcagctatcgtgcacatgctttcttccaccaggtagaagcgttgtttatagaccgtaatgtatcgttcaccgacttgaaacaagctctgttgctctttgcacaggaaatgttcggcaaggataccaagatacgccttcgtccttcctacttcccgtttacggaaccaagcgccgaaatggacatcagctgtaatatctgtggcggcaaaggctgtcctttctgtaaaggaaccggttgggtcgaaatcttaggttgcggtatggtagaccccaatgtactggaactgaacggtattgacagcaagatatacagcggatacgctttaggtatgggtatagaacgtattgccaatctgaaatatcgcgtaaacgacctgcgcctgttctcggaaaacgacacgcgcttcctgaaagaatttgaagcagcttattaatatagaaatcccgatatttctatattgggcataaaattgggatgtgccagaacccaaaggcactcaccatttatttttaggcacggattgcacggagaaacacggattaaatcaaaaaaaggaccgtgaagtccgtataatccgtgcctaaaagaaattatcaggcgtatttttactcccgattatttgcaactaacggtttttaatacagcctgattatcaatcctattaaatctccacccaatgaaagataggctcgtaactcccggctattgctttatcctcgctgccaacttcctactgtacttcggcttttggctattgatacccgtattgccattctatctatccgaagtattcaatgcaggaaactccactatcggcatcattctttcctgctatacggtagctgccttatgcatccgtccgttctccggatattttctggacagttttgcccgcaaaccgttgtatctgttagcttatttcatcttcatgaccatgtttgccggatacatcattgccgggtcactcactttatttatcctgttccgcatcatacacggcgtatcattcggcatggtgaccgtaggcggcaatacggtggtcatcgacatcatgccctcatcaagacgcggagaaggtctcggatattacggactctccaacaacatagccatggcagtggggccgatgtccggtttgttcctgcacgatgccggtatgagttataccaccatattctgttgctcgctgggttcctgcattgcagggttcatctgtgcttccttagtgaaaaccccgtataagccgcctgtcagacgcgaaccggtttcgctcgaccgctttattctgctgaaaggcattcctgcaggtgtcagcctgcttttattatccattccttacggaatgactaccaactacgtagccatgtatgccaaagaaatcggtatccatgcaactaccggctttttctttactttcatggcggtgggcatggctatctcgcgcatcttttccggcaggattgtagacagaggaaaaataacgcaggtaatttcggcagggttgtacatcgtggtattcagtttcttcctgctctcggcatgcgtctacatcatcgagtggaacagcatggcatgcaacatcgtattctttgcagtggcattgctgcttggcataggcttcggcatcatgtttccggcctacaacacactgttcgtaaaccttgcccccaacagtcaacggggcacggccacttccacctacctcacttcatgggatgtggggataggcatcggcatgctgacaggcggatacattgcagaagtcagcactttcgacaaagcctatcttttcggagcctgcctgacaattgtttccatgctctatttcaacatcaaggtaactcctcattatcataaaaacaaattacgatgagaaagaaagaacgttatgaaaagatactcgcctggttcagggaaaaccgccccatagcggagaccgagctacattataacaacccgtacgaactgttgattgcggtaattctttccgcccaatgcacagacaagcgggtaaatatgataactcccgccctttaccgggacttccccactcccgaagcgcttgcagccactactccggaagtagtatacgaatacatacgcagtgtatcctacccgaacaacaaggccaagcatctcgtaggcatggctcaaatgctggtgaaagacttcaacagccaagtgcccgacacactggaaaagctcgtgaaacttcccggtgtgggacgcaaaacggcaaatgtaatccagtcggtcgtcttcaataaagccgccatggcggtagatacccacgttttccgcgtcagccaccgtttgggactggtatccgacaaatgcaccactccgttcagcgtagagaaggaattggttaaatacattccggaagcagagattcccattgctcaccactggctcatcctgcacggacggtatgtatgccaggcacgtacccctcaatgtgacaactgcggtttgcaattgatgtgcaaatattactgccggaagtataaagttagtaaagagagcaatgatggggaagaataaacaatgatttaatagcagggaaaagaaataaatactaactttgccgtcacgaaaagaaaacggtaacacttttaaataaaaatagagtattatgacaattgatcaatttaactttgccggaaaaaaggcattcgttcgcgtggacttcaacgtacctctggacgaaaacttcaacattacagacgatacccgtatgcgtgccgctcttcctacattgaagaagattttggctgacggtggcagtattatcatcggttctcacctcggtcgtccgaaaggtgcaaccgacaagttctctttgaagcacatcctgaaacatttgtcagaactgctgggtgttgaggtacagttcgccaacgactgcatgggcgaagaagctgccgttaaggctgccgctctgcaaccgggtgaagtgctgttgctcgaaaaccttcgtttctatgctgaagaagaaggcaaaccgcgcggtttggccgaagatgcgacagacgaagaaaagaaagctgccaaagctgccgttaaggaaagccagaaagagtttaccaagaaacttgcttcttacgctgactgctacgtaaacgacgcattcggtaccgctcaccgtgcacacgcttctacggcattgatcgccaaatacttcgacaaagacaacaagatgttcggctacctgatggagaaagaagtgaaagccgtagacaaggtgttgaatgacatccaacgtccgttcactgctatcatgggcggttccaaagtatcttccaagattgaaatcatcgaaaacctgctgaacaaggtagataatctgattatcaccggcggtatgacttacaccttcaccaaagctcaaggcggtaaaatcggtctttccatctgcgaagacgacaagctggatctggctctcgaactgttgaaaaaagcaaaagaaaaaggcgtaaacctcgtattggctgtagatgccaagattgccgactctttctctaacgacgccaacactcagttctgcaaagtaaacgaaatacctgacggctgggaaggtctggatataggtcctgagacagaaaagatttttgccgaagttatcaagaactccaagactatcctttggaacggtcctacgggcgtattcgagttcgacaacttcactcacggttcacgctctgtaggtgaagctatcgttgaggcaaccaagaacggtgcgttctcactcgtaggcggtggcgactctgtagcttgcgtcaacaaattcggtctggcaaacggcgtttcttacgtttctaccggtggtggtgcattgctcgaggcaattgaaggaaaagttcttccgggtatcgctgctatcaacgaataacaagaacctcattcatacaaaaggcagctctttgaaaaaagggttgctttttttttaattatatatccgacacatgaaacgaattctactatcctgtcttcttctcctctccatacatacattaaaagcccaggatacgcgtctgaacaatgtagtgaatacactgaaagaacgcatcaccctggcagggtatgcccaagtgggatatacctatgatgacgccggcgaaaaggccagcaataccttcgacctcaaacgcgccatattcatggcacgcggcaagattaccgacaaatggtcgtgctacttcatgtacagcttcgccaataccggaaagatactggaagcttatacggaataccggttcctgccccaactcactgcccgcatcggacagttcaaaacaatgtacaccattgagaatccgatgtctccctgttttgtcgaactgataaactgctattcacaggcggtcaactatctggcaggtatcaacggcagcgatccactctacggctcgaacagcggccgtgacatgggtatccttatctacggcgaccttttcaagaaaaagctgagttataaccttgccgtcatgaacgggcaaggcatcaatctgaaagacaagaacaatcaaaaagacatagtaggcagcctgatggttcatccgctcgactggctgtcggtgggcggctcgttcgtcaagggcaaaggctgtgccgtagccgcctcttccgtcaatccggatatagcgataggcgacagctacacacgcaaccgctggtcggcaggcgccaccatacagacaaagcctgtcagcctgcgtaccgaataccttgccggcaaagacggacatgtaaaaagcgacggatactatgcaaccgcatccgtacatgtgcttcccaaattcgacattgtagcatcctatgattatttcaacaaagacaaagcgcaggattacaaacagagcaactatgtggccggtgtgcaatggtggttctatcccaaatgccgcttgcaggcgcaatacacctattgcgatccccacaaaggagaaaactccaacctgctgcaggcacaattgcaggtacgtttctgatttatgaaaacattctggcattctttttgtacatttgtagagtataatcacttaatgaatacaattttatgaacgagcaagccatacaagagcaatatcagcatatagtcaatctactggaacagaaacgtctgaaagaggctcaagtacaactggaagcctttttatggaactgcaacgactggacgctccgcaaccgtctggagcaggctaaggtgtcctaccaatacatgttacagtacatgcgtcagggcataaacgatccggaacgacagaaactataccgacaacttctggcagaaacctgggagcttgccgaacagacccgcatcagcctgctcgatgaggtttccacccgttattaccactccctgcacaagaacaaaaagaatatggtagccggttacggcatgtcttcctggctgaaagttctggaatcttttcctgacgatatggcggtttgccagcttatgccggacaacaaacaaagtctggacagcgccctgcaacgccatgaaggcactgcccaatatctgttcctcactacatggggcaacagtggctggacggcagaagaagaacaggaagccaggctgtatctggagtccgaattgttgccggtaaatgacttgtgtctgttcaccggagccatcctgctcagcctgatggaatgtttcgatccgcggaaattctcatggttactggatgccgcaacgcacgccgacacacaggtcaaccagcgcgccctggtgattatcgccatcatactgcacatacactccagccgcttacggctatacccggagctgatggcaaagttatcgcttctcgatgaggacggcagcttcggcaaacagttgaaccgggtttacatccagctactccgcagccgtgaaacagagaagatagacaagaagatgcgtgaagaaatcattccggaaatgatgaagaacgtcaccatcatgcgcaatatgaagtacggcttcgaagaaaacattgatgaagacgaccgcaatccggactgggagaaagcattcgaggaatcgggcctgggcgacaagatacgcgagatgaacgaacttcaactggaaggagccgatgtatatatgagtacgtttgcccagctcaagagttacccgttctttcaaaatccgcataactggttctatccgttcgacatgcagcattccagcatcatacgggagttcggactgaagcctaccggagaaaacgccgtcctgtcactgatactgcaatcgggctttttctgcaacagcgacaagtattcattatgctttaccatggcacatataccgcaagcgcagcgtaatatgatgctcagtcaaatgacatcacaggatttgaatgaactgatggacgaaagcaaatcgtccagcctgagacagtatgccttgcggccggacgttatcagcaaccagtatatccacgatttataccggttcttcaagttaagccagcgccgccatgagtaccgtgatattttcaaggaagaaataaccctgcaccgcataccggcactgaaagatattttatgcaagcccgaactattggcaaccatagccgacttccatttccgcaaagagcatcccgcagaagccttaagcatctataaagaaataacggatatgaaccatgccgatgcggaaatcttccaaaaaaccggctattgcctgcaaaaagagaaacgttacaaagaagctatcgaagcttataggaaagccgatgtgctgaaacccgaccatgtatggactatccgccacctcgccacctgccaccgccaattgcgggactttgcaacggcattggaatattacagaaaagcggaagccatgcaaccggaaaacagaaacctgccattccttatcggcagttgcctggcagagcaggaacgctacgaagaagccttgcagtgtttctttaagctggatttcatggaaaacgactgtatcaaggcatggcgtgccataggctggtgctcgtttgtcagcggaaaatttgaacaggccatgcggtattacaacaagatacttgccttgaaaccgctttccacagattacctcaatgccggacacgcagcattgctattgggaaatatggaaaaggctgctgaactgtacgggaaagctacctcggaaagcggtaaccgggagacttttcttgagatgttcgataaagacaaggagatgcttatcaagttgggggtagacgaaaaagacataccgctgataagagatttggcctgaccagacggcatacctgtttccataaagaaaagagaatgtgtcaacatacacttgatgatttcttttaggcacggactacacggagttcacggaaaagaacaaagaaaatctgtattttccctgtaatccgtgcctaaaaagaaacaaacagcaagcgaatttcagttttgacatatcctctttcattggcagaaaatgccagataagcaaagcttaacagccctactattttaccttgacaagctccttataaagccgctgcaccggcagccccataatattataatagcttcccgaaatattctccaccccgataaagccaatccactcctgcaccccataggcaccggctttatccatcggctggaacttatctacataataggtcatttcttcttcgctcagctcagcaaagcgtacttccgtctgagcggcaaagctgcgctgccattccgttgtagttatacaaactccggtaaacacttcgtgggtgcgaccggacatatcccgcagcatgcacaaagcgtcttcccggtctttaggtttcccaagcacccgcccgtccagccagacaatggtatcggcagttatcatcagttcgcccggttgcaacatgttccgataggcatccgctttttcttttgcgatataaagaggtatatccgcaccctgcaatgtatcagggtacgattcgtctacatccggtaaggtgcgcacttcgtagtccacaccaagtcctgccagcaactctttccggcggggagaattggaagcaagtataactttatattttttgagattatccaacatggcttttagtagagttatgagttataagttatgaattgcggggtgtcaaaccggcaggagttaccagccgaaggcccgctcgtctgccatccaaaggcctttcactttcaggaactgctccacgatatcccgtccgcaaccgtatcccccctctttgtgggagatgtaacgtgcaacggattttacctcaggagcggcatcccgcggacagcaaggcaaaccgcaagtgcgcatcacctcaatatcgggaatatcatcacctacatatagaatttcttcatcccgcaggccgtagcggtcgcggaagtcgcgataatcgtgtatcttgacggaagaccccatatagatattctccggcaataatcccaaagcaaggaaacgcttgcgcaccgcttccgtgcgtccaccggtaatgatagccaatggtatttcatgtctggcagccagatgcaaggcatagccatcctttatgtttaccgtacgcagcggctcgccttccgtactcatcggaatgacattggcgctcaacaccccgtccacatcaaaggcgagggcttttatcttattcaaatcgtaattgattgtactcatccttattctttccaagaagttaactattttgccgatgtatgctttcgctaatcagcctgtacagttcctgcatgtccggctcgtcagaaagcatctgcaagtgctcgccgataacattttcgtcataccgcacggcaggccccgtctgcgcaagacgcggttcgagttcatgcaccttacgggcggtctcgtctatcaaaggcagcatcacttcaaaaggaagcccgtatttcttcaacaacccggctgcaagggcatacatatgattggtaaaattacaagtgaacaccgctgccaggtgcagacttttacgctgttcggaatcggcctcatagacattctcggagagtacggaagcaatatctttcagtgtccgggtatcctccgcagaattgctttccacgaaaaccggtatctgccggaaatcgaccgtacgctgtttgctgaatgtctgcatcggatagaacacgccataccggtttaccttgcctgcccaaacatccatcgggatacttccggctgtatgtacccacagggcattttcttttccggcaacaatttcgggcagcagttgcacaaacgccgcatctttcagcgaaacgatatacagccgggcatccgctgccacagacgacaagtcggtagtataggcagcctctaccgcctgcgccaatgttcgcgccgactcttccgtacggctgtatacctgcacgatacggaatcctttataataaagcgcctttgccagattcgtagccagattgccggctccgataaatacaacagatgtatcttctatgcttcttttcatcttatctcgtagataccaaatacaaaataccgcctacaaccaacagtgccaccggcagcaaataagcggacatagtaccgagcagagccgttatcaatccgaaattcaatatcagccacaggcccgtcagcaccagtcccaccgacttgtcattcttgaataacaggaagatgaccgccgtataaagcagaaaattatcccggttcatcacccacgacagtcccagtgtggagaaatgcagcagtttgtctgccagatagagcacgccgaacacaatcagcgtgatagccgtagccttataggtatctttattgttatttgctttcgccgcgctcaccgttactttcctccatatttgttaaggtgaatcttttcccattgcaggttgtcctcattgaaaggcttgcgctccattcctttatgcccgatggcaatgatactgagagcctgcaactgcaaaggcatgtcgagtacttcgtgcacatattcgttagaggacatgccggatgccgtaaaacgctcgcgaagctgtacccagcaactgcccaa

SEQ ID NO: 4139 - DNA, 7147 bp, Unknown
  gut microbiota DNA sequence
ctcctattttcccttacctttgccaccgtaaagacaaaggggtgccccgacgggctgagattataccctcgaacctgatgcagttagtactgccgtaggaattggatatttttttcttcttagaacttaccttaacggtacttctttgtatttacttccattgttttatttaacagaaacagaaacatgaaagtatcaatcaacaacaaggaagtggaaaccgatgccgttaccctcttacaactcacaaccgagctttccttaccggcgcagggcgtggccgttgctgccaataaccgtatgattccacgtacggaatgggcggattatgctctgtccgaaggaatatccatcgtaataataaaagctgcctgcggcggataggctatggaaaaggttcagttcattacacattataccgaaaggtattcttacctcgactccgcccgcatggctttggaaggcggttgccgctggatacagctacgcatgaaagatgcggcggaaaacgaaatactgcccgtagccgcggaagtgcgaaaactctgcaacgattatggtgccatattcatcatcgacgaccacgtggaactggtaaaggaaatccgggcggatggcgtacatctcggcaagaacgacatgcccgttgccgaagcgcgacgcatacttggagaggaatatatcataggcggtacagccaacacgtatgaagacgtaaagaagcattggctcgacggagtaaattacatcggctgcggaccgttcagatataccaccaccaagcagaaactcagccctattctgggtttggaaggatataaagaaattatccgtcaaatgcgggcggataatatcaacctgcctatcgtcgctatcggcgggattacttttgccgatattccgtctgtcatgcagacaggcgttacgggcatcgccctttcgggcacggtgctgcgagcggataatccggtggaagagatgcaaaggattcttacggaaaccaatcaggcaggcaaaatcaaccaaacagccaattactgaaataacaaataaaaaagatatggagaaattaatcattgcgggacgcgaattcaactcccgtctgtttttgggaacaggaaaattcaattccaatgaaatcatggaacagtccattctggcatccggtacggaaatggtaacggtagccatgaagcgtatagaactggataatgaagaagacgatatgctgaaacatatccgtcatccgcatatccagcttctacccaatacttccggtgtgcgcactgccgaagaagccgtatttgccgcgcaaatggcacgcgaagcattcggaacgaactggctgaaactggaaatccaccccgacccgcgttaccttcttcccgactctaccgaaaccttgaaagctacggaagagctggtgaaactgggtttcatagtcctcccttattgccaggcagaccccacgctttgcaaacgtctggaagaagccggagccgctaccgtcatgccactgggtgcgcctatcggcacgaataaaggattacagacccgtgacttccttcggattatcatcgagcaggcaaacgttccggtggtggtagatgccggtatcggtgctcccagccatgccgccgaagcaatggagatgggcgcttccgcctgcctggtcaacactgccattgccgtagcgggcaatcccgtaactatggccgaagccttcaagcaagccgtagaagccggacgcacggcctatgaagccggattgggactgcaagccgacaattttgtggcggaagccagttcacctctcactgcatttctcgatgaatgacacacattatataatataagctatgaaatcaagaataaaatatccccgctcggagaaagtatatctgccgggaacaatctatccggaacttcgcgtaggtatgcgtaaagtagagcaagtgcctagtacaacctttgcaggcgaagaaaaagtcattactcccaatccggacatttacatttatgacaccagcggtccgttcagcgaccccgatatagaaatcgaccttaagaaagggctgccccgtctgcgcgaaccctggattctgcaccgcaacgatgtggagcaactgccggagattacctcggaatacggccgcatgcgccgtgacgacaagtcgctcgaccacctgcgctttgaacatatctcactaccctatcgtgccaaacagggcaaatgctgcacgcagatgtattacgccaagcaaggcatcatcacccccgaaatggaatatgtggcaatccgcgagaacatgaactgtgccgaattggggatagaaacgcatatcactcccgaatttgtccgccgggaaatagcggaaggccgtgccctgctccccgccaacatcaatcaccccgaagccgaacccatgattatcggccgtaacttcctggtgaaaatcaatacgaatatcggtaattccgccaccacttcaagcatcgacgaagaagtggaaaaggccctttggagctgtaaatggggcggtgacaccctgatggatttatctaccggagaaaatatccacgaaacccgcgaatggattatccgcaactgtccggttcccgtaggtacggttcccatttatcaggcattggagaaagtgaacggcagagtggaagacctcacgtgggagctctaccgcgacaccttgattgaacagtgcgaacaaggcgtagactacttcaccatacacgctggtatccgccgccacaacgtacacctggccgacaagcgtctgtgcggcatcgtgagccgcggcggaagcatcatgagcaaatggtgtctggtgcacgaccgcgaaagctttctgtacgaacatttcgacgacatctgcgatatattggcgcaatacgatgtagccgtttccttgggcgacggcctgcgtcccggctctacgtacgatgccaacgacgaagcgcagtttgccgaactcgataccatgggcgagcttgtgctccgcgcctgggcaaagaacgtgcaggcttttatcgaaggacccggacacgtgcccatgcacaagattaaggagaatatggaacgccagatagagaaatgccacaatgcgccgttctacacgctcggcccgttggttacggacattgcaccgggctacgaccatatcacttcggctatcggtgcggcgcaaatcggctggctgggcacggccatgctgtgctacgtcaccccaaaggagcaccttgcactacccgacaaagaagatgtacgcacaggtgtcatcacctataagatagccgcccatgccgccgaccttgccaaaggacaccccggtgcacaagtacgcgacaacgccctgagcaaggcacgctatgagttccgctggaaagaccagttcgacctgtcgctcgaccccgaacgggcacagacttatttccgggcaggacatcacatcgacggagaatactgcacgatgtgcgggcctaacttctgcgcaatgcggttgtcaagggaactgggaaagaaaaaggaataacttgtcaggctggaatacagagacaacagatttattttcacgtctttgtattctatccgtttcattagcgaattatttttatcatagaataaaatgttttcagacgaattagagaaaatatcctgggaagagacgacccggcgcatcaatgccaaaacagatgcggacgtgcgtcgtgccctatccaaagaacattgtgacgtagaggattttatggcactcatctcaccggctgccgtcccctatctggaaacaatggcacgtttaagcaagaagtacacggaagagcgtttcggaaaaacgatttccatgtttgtgccgttgtatattacgaactcctgtaccaactcgtgcgtgtactgcggtttccacatcagcaatcccatgccccgcaccatactgacggaagaggagattgtaaacgaatacaaggctatcaagaagctcgcgccttttgaaaacctgctgctggttacgggtgaaaatcctgccaaagccggtgttccgtacatcgcccgcgcgctcgatttggcaaaaccttatttcagcaacctgaagattgaggtaatgcccctgaaagccgaagagtatgccgaactgaaagagcatggcatgaacggcgttatctgttttcaggaaacctaccacaaggcaaactataacatttatcacccgcgcggcatgaagtccagattcgaatggcgtgtcaacggtttcgaccgcatggggcaggcaggcgtacattccatcggcatgggtgtgctgataggtctggagaaagaatggagaacggatatctgtatgatggcgtatcacctgcgttatcttcagaagcattactggaaaacgaaatacagcgtcaacttcccgcgtatgcgcccttcggaaaacggcggcttccaacccaatgtggtaatgagcgaccgcgaactggcacaagttacatttgccatgcggatattcgaccatgatgtggacatatcctactctacccgcgaaccggcttttatacgcgaccacatggccactctgggagtcactaccatgagcgcggaaagcaaaacggaaccgggcggatattacagctatccgcagactttggagcaattccacgtcagcgacgagcgtaaggccgtagaagtagacaaagccttaaagagtttaggacgcgaacccgtatggaaagactgggatgccagtttcgacctgaaacgggtttgaatccctttttcatagtttataattctcatcatgacccgatacagcagacaaatttcccttcccgaaatcggagaaggcggacaggaaaaactgcataaggcaagagttctgatagtaggcgcaggcggacttggctcccctgccgccctctatcttgcaggtgcaggagtaggtacaataggtttggcggacgatgatacggtcggtatcagcaacctgcaacgccagatattgtatacggagaacgaagtaggacagcttaaggtacactgtgccgcccaaagattgcgggctttgaacggtaatatagaagtgcatgcctacccttttcgtctcaaccgggagaatgcccgccgtctgattgccgattatgacatcgttgtagacggatgcgacaacttctccacccgttatctgattagcgacagttgcagcgcactgcacaaaccgtatgtgtacggcgccatccagggctttgaagggcaagtctccgtattctgttacggtgatcggcccaagacatacagggatttgtttcccgacgaaaccgcaacattgcagatgcccgctcccgacaattccgtcataggcgttactcctgccgtggtaggcagtgtggaagcaagcgaaacgctgaagctcatttgcggctacggcgaggttttggccggaaagttatggactgtcgatctaagaaccatgcaatcgttcgtccttttactgtaaaatacctcggaaaacatgaaactgataacaattacccagcctgcattctttgagggagaagccgaagcaatcacttccctgttcgatgcaggacttgagatactgcatctccggaaacccggcgcttcttatgaagacatggaacaattattgaaccggcttccgcctgaatatctgaaacgcatcgtcacacacgagcatttccaactggcatctttccgaaatttgaaaggcattcatctgaacggacgaaacccgacagcaccggcaggcttcaccggacacatcagccgttcctgccattcgctggaagaagtcgccaaatacaaagcaacatgcgattacgtatttctcagtcccatatacgacagcatttccaaagaagggtatccctctgcctatactaccgacagcttgcaaaaggcgcggcaggcgggcattatagacgctaaagtaatggcattgggcggcgttacggcagcgcatttccctgaaatcagctcattgggtttcggcggtgcagtccttttgggagatatatggaaacggacgggaacggattttatcgggcatttcaaggaattgctccgtgcggcgtctttattttaaccaacaaacattttattatcatgtcgactattccggtcattctcaccattgccggctccgactgctccggcggtgcaggcatacaagcggatattaaaacgatttccgcactcaaaggatatgctgcctctgtcattactgccgttacggcacaaaacacaatgggggttcaggctgtatgccctatcccaccggacattgtccgtgcgcagataacatccgtcatggatgatttgcagcctgccgctatcaagataggaatggtgcacaatgccgctatcgtgcacaccatagcggagtgtttgcaaaatatccgatctagttttgtcgtttatgaccccgttatggtatccaccagcggacgaaagctaatgacggaagataccgtgcgcaccattcaagaggagctgtttcctctctgttccctgataacccccaatttgggcgaagtatccctgctcctttcaaatcccgttacggatatagaggagatgaaactggctgcctgtgaattagcgaaccgttatcactgcgccgtactggtaaagggcggtcacttatccggcaatacaatgtgcgatgtattgcacaacaacggccgtttcagcctgttcgaacagcaaaaaatagagagccgcaaccttcacggtacgggatgcacgctttcttccgccatcgctgcctttgccgcccgcggcaagggacttgaagaagctgtccgtcaagccaaagtttatataagcaaagcaatttatcatggtaaagacctgcatataggacatggaaacggacctttgtgccatttcttttccggggaaattaattttgttcccttaaattccaccgaagaagttatcagaaaattcccccacaaacaacaagcggaatatagagaggaaaactttcaaggagaaacttcataattaaagcccgaaatacttgacaaagggtatcttgatttcgtatatttgcatatcggacaattgataacattaacctaaaactgtagatactaattgaaaagtgcgccgtattctaattga

SEQ ID NO: 4140 - DNA, 28548 bp, Unknown
  gut microbiota DNA sequence
gatttgtctttcagcgaccattcacgcttaacagtggtaaccggaagaagaaggattggtaaaacaagccttataatgaaagctgttgaagatatgccaaccgtttatctgtttgtggggcgtaaaagtgaagcaacgctttgttctgaatttattccggttatcggccaatcgcttgatgtatttgttccaatggaaatacgtaccttccggtcattatttcagtatctgatggaactgtcttcccagaaaccgttcaacctggttatcgatgagtttcaggagttctataacatcaatgaatcggtatatagcgatatgcaaaacatttgggatacctatcggaagaaatctaagatgaatttgattgtatcgggttccgtttattcgttgatgcagaaaatatttcagaacaataaagagcccttgttcggtagagctgataatatcattaaactgtctgcttttgatttggctacattgaaagagattatctttgattacaatcccgattacagcaatgatgatttgcttgccctctattcttttacagggggtgttccgaaatatgttgaactgctttgtgacaacaccgaattgagtgtagacgggatgatttcatttatggttcgggagaactcttcttttaccgatgaaggaaaaaatctgctggtggaagagttcgggaaaaactatgccacttatttttctatcttaagtgctatttccggtggcattaatacgcaacccgaaatagaagccgctttgggagacaaaagcataggcggtcaaataaagcggttgattgaggattacaacatcattgtccgccagcgtcctttattggcaaaagaaggaagtcaaactgtaaggtatgaaatacaagataatttcatccggttttggtttaactatttcgaccgccaccgttctctgatagagattaagaactttatcggtttgcagaccatcatcaaatccgactattcaacttattcaggtatcatgctggaaagatatttcaaacagcagtttgccgaaagtttccaatatcgggctataggttcgtggtgggagccgaagggcaatcagaatgaaattgatattattgctctgaaattggagaaaaatcaagctgtggcggcagaagtgaagcggcaaaagaaaaacttcaaaccggaactgctggctgggaaagtggaacatttaaagaaaaagctattgccgaaatatcggattgagacggtttgtttgtcgttggaagatatgtagtgaccggctacttgctcttttcttacttttattttagcataatttatcattgtaatattctatattctcgtctattatcactaatttcggacgatttttttgcaaatccgatagaataactaataatttataatatggaaaacttgaacatagcgctcctgctaatgatagtgggtatggcaacggtctttgccatcctgctgattgtaatctacttgggaaagggacttatcgcccttgtgaataaatatgcacccgaagaggttgttcctgccaaacaggcggcaaatgctcctgcggctgttcccggcaacatcatggcggctatcagtgcggcggttacggtagtgacgcagggtaagggtaaagttgcgaaagtggagaaactctgaaataactaatcttatataaacacacacaggaataatttggtatgaaaaaagaaattaagttcagcttggtattcagggatatgtggcaaagtgccggaaaatatgtgccccgtgtagaccagctggtaaaggtagcgcctgccattgtcgagatgggatgtttcgctcgtgtagaaacgaatggcggcggttttgaacaggtaaatctattgtttggcgagaaccccaataaagctgtgcgcgagtggacgaagccgttccacgaagccggtatacagacacatatgttggaccgtgcactgaacggcctgcgcatgagccccgtgcctgccgatgtgcgcaagctgttttataaagtgaagaaggcgcagggcacggacatcacacgtactttctgcggactgaacgatatacgtaacatcgctccttccatcacttatgcgcacgaagcgggaatgatttcgcagtgttcgctctgtatcacccattcgcctatccatactgtggaatattatacggatatggcattgaagcttatcaagctgggtgcagacgaaatctgtatcaaggatatggcaggtatcggccgtccggtatctttgggcaagattgtggcaaacatcaaggctgctcatccggacattcccatccagtatcacagccatgcgggacccggtttcaacatggcaagcatccttgcggtttgtgaggccggctgcgactatatcgacgtaggtatggagccgctttcatggggtacgggacatgccgacctgctcagcgtgcaggccatgctgaaagatgcaggtttcaaggttcccgaaatcaatatggaagcgtacatgaaagtacgtgcacttatacaggagtttatggatgatttcctcggtctgtacatcagcccgaagaaccgtctgatgaactcgttgctgattggtccgggacttccgggcggcatgatgggaagcctgatggcggacctggaatccaatctggaatctatcaacaagtacaaggccaaacgcaacctgccgtttatgaagcaggacgaactgcttatcaaactcttcaacgaagtggcatacgtatggccgcgcgtgggttatccaccgttggtgactccgttcagccagtacgtcaagaacctttccatgatgaacgtcatggccatggagaaaggaaaagagcgttggggcatgatagccgacgatatttgggacatgctgttgggtaaggcaggcaagctgccgggcgaactcgctcccgaactcgttgaaaaggcggagcgcgaaggacgtaagttcttcaacggcaatccgcaggacaactatcccgatgcactcgacaagtaccgcaagctgatgaaggaaaacaagtgggaacttggcgaagatgatgaagaactctttgaatacgctatgcatccggcacagtacgaggcttacaagagtggcaaggcgaaagaggatttccttgccgatgtggagaaacgccgtgccgaacgcgacaaatcccctctggacgacgccaaacccaagacgctcaccgtgcaggtggacggacaggcttatcgcgtgacggtggcttacggcgacatcgacctgccggcttccgccaccgacaagattaccgctcccgccggtgaagggcaggaagtggctgctccgctcgaaggcaagttcttcctgaccaagaatgcacaggaaactcccctcaaggtaggagataaagtgaaggagggcgacctgctttgctacatcgaggccatgaaaacctataatgccatccgtgccgacttcagcggaacggtgaccgctatctgcgtcaatccgggtgattctgtttctgaagatgatgtattaatgaagattggatgatggaagatatatttgcgaaactctatgatatgacggcgttcagcaatatcattgccgatccgtcgttccttataatgtatgccattgcctttattttgctgtatctgggcatcaggaagcattacgaaccgctgttgctggttcccattgctttcggtgtgctcattgccaatttccccggtggcgacatgggggttatccaggcagatgaaaacggcatggtaatggtgaacggagtgttgaagaacatctgggaaatgccgttgcacgagattgcacacgacctcggactgatgaacttcatctactatatgctgataaagaccggatttctgccgcctgtcatctttatgggtgtgggtgcgctgacggacttcggaccgatgctccgcaatttgcgtctttccatattcggtgcggctgcgcagctcggtatctttaccgtactgttgtgtgccgtaatgatgggattcacgccgcaggaagccggtgcattgggtattatcggcggtgcggacggtcctacggctatcttcaccaccattaagctcgctccgcatctgctgggccctatcgccattgcggcttattcgtacatggcgctggttccggttatcattccattggttgtgaaactgctctgcagcaagaaggaactgatgattaacatgaaggagcaggaaaagctctatccgtcaaagaccgagataaagaatctgcgtgtactgaagattattttcccgattgccgttactaccattgtagctctcttcgtgccgacggcagtgcctttgattggtatgctgatgttcggtaacctgattaaggaaatcggttccgataccagccgtctgttcgatgcggcagccaacagcattatgaatgcggcaaccatcttcctcggactgagtgtgggcgctaccatgacgagtgaggcattcctcaactggaccactatcggcatcgttgtcggcggcttccttgcatttgccttgtccatttcgggcggtatcttctttgtgaaactgttcaatctgttctccaagaagaagattaatccgctgattggtgcgacgggattgagcgccgtgcctatggcaagccgcgtatgcaatgaaatcgctaccaagtacgaccctaagaaccacgtactgaattactgtatgtccagtaatatttccggcgtcatcggttctgcggtggcggcgggcgtattgatttcgttcctcggataagaaagttgagatataaaaagggaatgcgtcaaaacactcattatttgtgttttgacgcattccctttttatttccgcctttattcactgatagctttcctgtactcagccactgccatctttgcggcaaggtgcgcattgataaggttggtctgggcctgtgtccacgaaagctgtgcggatagcacatcgaccatgcttgccttgccttcattgtaggagaacgtaaccaggtcgagattctcttcggcaagcgccatattctcccgggctgtctttacctgctgttccgtttccgtcagtttggtggtagcggcggacagctcttctaaaatagtatctgccacatagctttgctgtagtttttgaatacctatatatgccttttgctggcggttggttttgaagcgtgcaccccatcggaaaatggggatgttgaggttgattcccgcaatgggcgtatggggcacgtcttgtcccatataggcgataccggtgtcccaaccggttgccaggaacatactgagttggggattatactggctgagggctgccttgcgttgcgcttcgctcctggcgatactgacatgggttccggcatagtccgcacggcgggacaatacttcgtcaagactcagtaaatcgacgggcggacagtgcatgccgatttcacaaagactgtctaccgcggcatccggtttcactcccatcaggatattgagttgctgcaaggcaagggtatagttctggcgggctttgatatactgcaattcggcctcttttttacgggtggaaatcatcagtaaatccgtacggctgatagctccgtcattaaacctgtcttgaatgatgttgtactgttggctgacaatcccttcaaaacgggcggcggctttgagtgttgccaatgcggccgaggcattccagtaaaccgcatcgctctgatagtgtatctggtcgagggtcagctctgtggcaagtttgtccagctcttcatcggctttggcaatttttttccgggccatgagcgaaccgcctgtgtaaagaggctgtcccagtgttgccaatgcctgataggtgtaaggacggtactgtcccgccggactgttccaggcatccagatggttcagattggcagttccttcggcagtaatgtctattttgggcaggaagccagtctgtgctatcttgcgggcttcggtgcttgccgtagctttcaggcgttgctgtttcagcagttggctgtatgcttccactttgtcccgataagcctcgcggctgagatagctttcttgtgctgcggcacttataccgaagctgattactgacaatataaatataatctttctcatcattcaaatcgtaaatagtcaaatcattaaatcgtaaatcgtaaatagtcgagtcgcaatccctctatccttttatccggtgtatcgcacagtaagccacgggcaatacaaacagggtgagtatcgaagctaccagcaggccgcccatgatagtggccgccataccgccgaacatggcgtcgaacagtaacggcagcatacccaggatggttgtgcccgatgccatggctacgggaacaatgcgggtggtcgttgcgctgataaccgcttcacgcggtgcttttccggcggccgtttccgtatcaatctggtctacgaggacaatggcgttcttgatgttcattccaatcagtcccaacaggcccagaatggcgaaaaagtcaaatgtcttgcccaacagcaacagtcccaatacgatgccgataaagataagcggaagcatcagcaagatgacgatgggtttgcggtaggtcttgaacaggaacagcagggtgacgaacatcaggaaaaacgtcagcggcatgttggctgccagtgcggcattggattcggcctggctttcctgttcgccgaagtatttcatggcatatccttcgggaacatcgatttctttctgcacctgctcccacacacggttaaaggcggcaatggcatttacgccccggcgggggtcggcttgcgccatcataaccatctggcggttgtagtccttcacgttggagaacttgtactggtagtcgaacttactgaccacttgctccagcgtggtggtttcgcgcgtagttccgaatacgggcagcgtgcgcaggtcgttaatgcggaacgcgccgattgtgttgtctttcagtaggataggaagcacttggtcgccctgtcggtattcgcccagcgtcattccgtttgtccctatttgtatgctctgcgccatgctttggcgggatacgcctaacggttgcgcacgctcctggctgtatacgggtttccagataggaatcttgttaccccaggagttgcgcacattgataaggtctttgtcgcggtgcattatctctaaaacccggttggtcagcgccaccagcgtatctgtgctattgccgataaagcctatctcgatggcggcgtctacggcaggcgagagtttgaagagcgtggttcgggtgatggcattggggtagttctccttcatatagctgtccagcttctcttcatattctttggtgtatttgctgtctgtcacttctaccagcaggttggcgaagttgggttttggacctacggaagtggatgccagatagtagcgcagcggggtgctgccgaaggtgacggaaacccgtttcacttccggctgtgccagcaggtgggcttccactttcttcatttccttctctacatcgcggatgccgtatccgtcgggatagaatacatcggcgcggaaataaggtttgtccagtgaagggaagaagttttgaggcatcagtcccatgatgacgagggagaggatgaacaatacgaccatgcttcccaatgtgagcgttttcttgcgtatcagcaggctgaggatggatgcgaatttatggtagaaaggcttgtcgtaagggtctttgtcgctgttgccggtttgggctttcagtatgaaattgccgaaggtggtggtttgcgtcaatgcaagtacccagctcagccccagtgatatagccagtacgataaatagcggctttacaatttcggcaacggaagacggtgcaagataaagcggcaggaatgagcagacggctatgaaggttgctcccagcaatccccattgcggaccggtggcgccgtctatcagcgctttccgtctgttcacgccgcgggctatggcaatctgtgcattgtcggttaccacaatggcgttatccaccagcattcccatggcgatgataaagcctgccagcgaggtacggttcagtcccactcccaggaacgacatgatgagcagtgtgccgccaatggaaaatatcagtgaagagccgatgagtacgccggcgcgcatccccattaccagcatgatgatgacgattacaatcagaatggattctatcaggttgataataaatccgttgttcgcttctttggcaatgacgttttcggggtaaaggctttccagttccaaccctacggggatgagaggcaagagttcggcgagcttcttgtctaccagctcaccggtttttaccacatccttctgcgggtcggtggagacgccgatgccgatggcccgttttccgtttacgtgcatgatggtgccgggcgggtccatgtatcccttttcaacgacggctatatcgcccagtttgacttgtccgccgggggtggtgattgtctggttgcggatgtcgttgacggtggtataagtaccgttggccacaatgcgcaactgctgttcgcctgcaccgatttcacccgtattgataatctggttctgcgattgcagcaagcctgccagttgtttggggtcgatgcccatccccgccagtttgtttacggagataaagatattgattacttccgtctgtgtgccgaacagggctactttcataaccccttcggcagtgataacctgcgtcttgatacgctccgcccagttgcgcatttcttcgtaagagaagccgtcgtcgccgaccagtccgtaataaatgccgaatacatcgccgaagtcgtccgataccgtcggtacggaagctcctgccggaagttggggctgtatgttgagaaccttccggcgcagttcgtcccacttctgcgggatagatgctgcggaaagcgacggctgtagctcgaacgtaattttggaaagtccgtacatggattccgatttaatcttgtacactccgctcatgctctgtatttcgcgggagatgggttcggtaatgagccgttccacttcggcaggctcggctccgggatagcgtgtcatgatgaccgctgtcttgatgacaaagggtgcatcttctttcttccccaaacggccgaatgagaatatgccgccgatgagcagcacggcaaggaagaaatagataatctttgtattatctaatgaatatttggctaagttcatatataaaaggtgataggatgataaagttatgaagtgatagagggaaagcggttattccacctcttttaccctctgtccctctaccagttggtatactccggcaatgacaacggtttcatccggtttcagtcctttggatattagaagattggcttcaccggtcggcgaatacacggttacttcgcggcggcttaccctgttgtctttcaccacccatacgtaggtattcttgttttcgctgtcaccgaatacggcactcagcggtacattcatcagtttttcttctataaagggagcgatgtccgaagcgaggcggatgttgcaggtaaatccgggtttcacatcgtatacggcacggtcgaaggcggggtcgtcgatggtgatggtaaccggaatacccgtgccgtcggtcgatatgtcaagatactcttccagtctggcattgaatatattgcctttgtacgtatcgaactccaccttgaatgtggcgtctttggcacgaagcaggtacaggtaatcatcgggtatggtaaattttatgcgcagtttctgcgtatttaccagccgcacaatcccttctcccgaattgacgcgctgatagttctctaccaggcgcttctcgatagagccgtcgaagggggcgagcagttttgtatcgcgcatattgttggtggacagctcgtaggccgatttggctttctggtaattggctacgcttatttcatactcctgcagggagatggcttggcggcccaacagccgtttgttgcgctccacctgggcggcagcggtttcataggcagccttgtcggcggcatattgcagggaaatatcccgcgggtcgatggcggcaatcagttgtcctttcctgaccctttgtccttccactaccggaaggtcgatgatttgtccgctgacacgaaatgccagtttcacatattccaccgcttccaccatgccggaaaagtctttgagtattaccgactgtgaacttacggtggcggttttcacaggtcgcacgaggggaatatcttcccctttcttttgcccgcaggacgtgacgataagtgtcaccgtcagggcgaacagatacattttcttcatttgtttttgattaagacaagtctttgcggttgacagtcaaatccaacccttgttttaattcataaacgttttgatatacctgtatgttcaattgttttcctgcggtcaggctgatttttatttctttgcctacctgtatatgcagcgtattgcccaagtaattcactttgaacgaatagccgctccatttcgccggtatgaccggttcaatcttaagcgtgccgccttgtatctgcaatcctgcgaatccgcgtacaacagccagccaactgcccggcatactggttatatgcagtccctggtctccttcattgttgtagtcgtccaggtcgaggcgggtagcgtgtaagaatagttggtatgccttttccactttcccgatgcgtgcggcaagaatggagtggatgtgcggggagagggaagactcgtgcacggtcatcggttcgtagaattcgaagttgcggcggatggtctcccggtcgaagttgaaataatagaggtacaggccgagcaggacatcactctgcttgatgtagcacgaacgcaggatacggtcccacgaccaatactggttgatggggcgttcgccggcgggaatggcgtcggtgctttgcagaaccttgtccatatagccgtcgttttggatgaagataccgcgttccggatcttccggcaggtacatccgttcgataatgtcccgccagcgttcactctcttccgtataattcaggttggtgatgctgcatatgcgggcatattcatcgggatattgccgggcaatgatttcaaggaaactgagagtggtttcgaggcaacgcatgcaggagtagttggtataccagttattgtttacgttgttttcgtattcatcgggtccggtaactcccagaatgacgtatttctgcttaggttgcgagaaagacacccgttggctccagaagcggctgacggctatcattacttccaatccgtaatgggcgatgtagtccagcgtacccgtaagcgtggcatgttgcagaatggcatagacaatcatattgttccggtgaacctcttcaaaagtaatctcccattcgctgtggcactcttctccgttgctggtgacctgcgggaagagggcggctccatggtcgaatcccaacttacgggcattctcaatggctttgggcagttgcttatagcggtatatcagcaggttttcggcaatcttcttcggggtggaaagcaggaagaaaggtacgcagcacaattcggtattccagtaagtatttccgccgtacttctcgccggtaaaacctttggggccgatattcaggcgggggtcgtctccccggtatgtctggtagagctggaagatgttgtagcgtatgccttgctgggcttccgggtcgccttcgatactgacatcggtttcgtcccatatctcctgccaggcattccggtgctcctgttccagagcatcccaacctgtactttgggcgttgcgggcttctgctacggaggcttctatcaaatcctgccgttcataataaagggaagatgctatggcaatgtatttgacgagcgtcacggtatctcccggcttcacttcagtgcctacgctgaatccggcctgtttttctttttctatccgtatcgggttggcaaaagtctctttattgttcttgaagaaccggtaggtcatggcatagcatatctgcgcatcctcccgcctggtctgcgtccacagataggcgcaatcgctggtggtgccggaacgcaggatattccatatcttttcatccggatgcctgaccgggttcgcggtgtctccgtcaaggataggcacgagtgaaaccttgcctgtatagttgacggacgtaacgctgtactttataaggcagagattggggtgagccatattggcgatatgttccacgtgcaggcggagtttgtttccccgcggagaggttacttccgcgtcccgataagaaatacccgctttcatgtcgaggcgtctgttgaaactgtccacatcccattgtgccagatctagttcctcgtcgatgaggcgcaggctgatactgctccagtccggagcattggggatacgtgtgtagaattgcggaaaaccgtttttccaccagcctacacgcgttttgtccaaaaaggtgataccagccacgaatgcgccgcgatagctgtcgctgctgtatggttcttcaaaatgtccccgttgtccgaaacggccgtttccaagactgaatatgctttccgaccaccgcatgcggtcggcttgaaaactatcttctataatattccattcatcggttttaaggtatttcttcatggcgctctttttctgtgttatcggtgtaaagatagacaaataaacggataaacaaataggatgcggaaaaaagaagaatgtgccaaaactaaaattcgtttgctatttatttatttttaagcacggattacgcggatttcacggaaaagagataaaataaatccgtgtcaatccgtgtcatccgtgcctaaaagaaatcatcaagtgtattttacaccctcttaccggtgaggaagcatatattcatcggtgaggataggggctgtttacgccctttctcctttggtctcttttatcaaatatacgcaggcagctccgattataagcatcacacccgccgttaccagcatgtttatttcagggggaagcatcccttccggcgtaaacagtgccagaatacttccgcctaacgccgctgctacgatttgcggaatacagatggttccgttaaacagcccgagatacgtacccatgtgtccgccggacaaggcgttggtcaggatggtgaaaggcagtgccagcatggcggcccatgcgcagcctatcagcaggaaagatacgaacagcacatacgggctgtgtacgaaataggtggatataaatccgataccgcccagcacgaggctcagcgcgtaaatgaaacggcggtctttgaacatgggaatgcagattgcccaaagtacggaaccgatagcctgtacggcaaacagtacgcctacccagttggcagcttcctgatattgcaggctcttggtgtcgagaactatttttgtgattccgtttaccgtattttcaacggtgggagcgtcaaatacatttgcggcgatgcttccgttggtgtatgtccacatgaacataaaggcgaaccagcagaagaactgcaccagccctaccgtccaaaaggctttcggcgcttttaccagcagcttcagcatattgattttctcatgttcctgctcttccgtgataccgtgatattgggcgtactctgcgggcggcatttccttgactttgactgttgtataaataacgcagaatatcagaatggcggccccgatatagaacgagtagattacggaatcgggaattacgccctggggtgctgtattgctgatacccacccacgcaaatatgaacgggaacagatagcccaccaggctgccggcattgcataagaaactctggatggaataggcaagtcctttctgtttctcgttcaccatgtcgcctaccatcatcttgaacggctgcattgccatattaatggaagtatccagaaacatcagcgataccagaccgaaaatcatggccgtgctcaccgtcataccgaagctgccggcattgggcagcaggcacatgacgagtaccgcaaccagcgagccgatgaacaggtagggaatgcgacgtccgaaccgtgtccatgtcctgtcgctggcagctcctacgatgggctgcacgatgatacctgccagcggcggtaatatccagaaatagctcaaactgtgcgggtcggctcctaaagtagagaatatacggctgatgttcgcgctttgcagggcatacgcaatctgtacgccgaagaaaccgaagctgatattccatagtttccagaaacttaaatcgggttttactttcattgctctcttgttttttatgatattagtttatagatgaattcggttgtgtttttatttggtcgttccccttaccaccaggtttgtccgcacaatcttgttggtgctttttccctcgtgcccgttcagcttgtctgtaaggatgccgaatgcgcttttgcccacttcttctccgtgctgctctacggtggtcagtttcgggtcggtgctttgggcgatggctccgtcggtgaaaccgcagatggaaacctcgtccggcactttcagtcccaccagcttgcaggcatacaatatacctgccgccgtttcgtcattaatcgcaaagaagccgtcgggacggttgtcactctccagcaggtcgggcgttatggcaatggcgcgttcacggttgtcgcacagttttatcatgctgtcgtccaccggcactttgtatttcttcatggcatccagatagccgttccgccggtttttggtaatctccagatgcggagatgcgccgtagaagaagatgcgtttgcatccggtctgaatcatgtactctacggcggcaaacgagccggcatagtcgtccacaaccacccgttccgttttcagctccgtacagatgcggtcgtaaaacacaatcggtatgtcgttgttcagcagctcctgatagtggtcgtattgctccgtgtttttggcaagggaggctatgacgccgcaaacgcgggcggcaaggaaagagtggacgattttgacttcctgttcgtaggactcgttgctttgagccacgattatgttgtagccggctttggccgccgctgtctcgatgccgctcagcacgcacgagaagaaatgatgcaccagttggggcacaatcacgccaatcgtattgctgcggctcgaacggaggttcacggcaagcacattgggtttgtagttatgttcgcgggcgtaggcatggatgaggtcacgggtttcccggctgatgtccggattatccttgagcgctctcgacacggtggacggcgagacattcaatgcccgggcaatatctttaatggttatctgcggtttgttcatcagtatgatttcaattttcagccaaaggtaataaaaataggaagatatacgaagaccgtagccgggcttcttatttatcctgccgcaaaaatagcggaatgcgtctaataaaacttttctgttgatacatatcgggttataagtttgtgcaaacgattgcatatactgtttgcaaccatgtatttgcccgctgcacggtaaattcccggcaaaaatcatttgctatacaataaatctccgtaactttatcctctggaaaatgtggtatcctttaattaatattataatgtattggctgactatgataaagagacttgttttattttgttgcctatgcttgccggcattggctgtctctgcccaagagcaggaagttaagtttgctttcgataactatcaccgctattaccgcgaagcgcgcctctgcaccgatagtgcaaaattggaggctatgaagaaattgcgtgtctattttcatgagcatccttacaggctgtctaaggtgaatatgtccgtgccgcccgccaggtgtctggagttgcttacgccggaggggacattctcggatatggacgctttggaagctgagttcgaacgtagcaatgcctatcggaagggctttcatacaacagccgatgaccgggtgggtattttcatcggaaacgctcttgaccgcttgtgctgcatagccgacgcataccgccgcggtacgctgacggcagacgagtcgttgagcgacaaagtgctgaaagcggtggtgcactacggcatgctggaagccggacgctcgaacgccgtttcccgttttcacgcttcctgctttgccattcctacggctgcggtaaacatctatttcgcctggctggataaaatggaacttgccgaacgcggcggtgcaactcctttgctggaggccgcttgcgatatgctgaaggtattggggctgcaagcctatacacagccgttgcgtcatgatgaaaccgacaagaacgttgtttcgatagaacgtttccgcaatcatgtatggtgggtgggcggcaacgcgttggcataccgttcgctattgcccgtagctgcaatgtacggttcggtgcctatggtggatgtattggcagaagtttgccggagaggtatcagcgtgacttcccagcttactctgcacgattctttctggaccgaaggttttaccgccgacggtgcagggtggggacatggcaagcaatgcctgatttggggatatcccatagacggaaccttcaatgccttgaatatgctgggtatgctgaaagggacaccgtgggcggaacgcctgagcagggagaatgcccaagctatcctgaactttctgcgcggtggaaactggtactactataaaggatttaccttgccttgtctggaccgtggctcgtatgtctataccgctgccgaaaaagagattccttacgcaaagatgctgaataaagtgctgatggactggatggatgcttttacggaaaccgagcaggcggagttacggcagttatggaaagaagtgaaagaaaagcatatccggatggtggggtacgctccgggcatgtattccggaacccgctggttctttaataacgatgatttgataaagaaaacccccgactgccacataatggtgaatatggcttccgtgcgttgtgacggcttggagagtgcacccaactttgccgatgcctataatttctaccctacggacggtatgactttgtttcagcgcagcggcaacgaatatcgctccatcatgggtggctgggacgtaacggcatctcccggagtaaccgcacgcgaaggcatggagcgcctggaaccggtagttaactggcgcggctattgcagtaagcataattatgcggcagcagccacggacggtagcggcgatgcagtggcgggatatattttcgagaaaatgaatgcttcggagaaagagggtgtgaacgaccggggcagcagtgccggctgtaacgaggtgctttatggcgtaaaggcttataaatcttattttattcagggagactatatggttgccttgggagcgggtgtgacgaacaggcagtctggacagccgggacatatccgtaccactatcgatcagacggccttgctgaatgatgtctgtttattagagaaaggaaagaaaacggctctttcagccggtgtgcatacctggaaaatctcaggcaagaacacaccctggctggtgcaggaggggcaatttgcttaccgcgttcttcctgaatacagccggaaagcgttcgtagcctgcgaaacgcgtcctgcgaactgggtgctgcacaacaaaacaaatgccggtaagaagaatctgccggatagcgtgaaaattctccgtttgtggattgaccacggacaagcgcccgtggatgatacgtacggttataccgtgtatacgggaaagggcactccgtccgcccggttgcctttccgtgtactgaggaatgactctttggtacaagcagtgcagtcggcagacaaaaaactgttgcaggcggtgttctatccgggcaacaatggcctgcaggccggcggtgtgtcgcttacagcttctgaaccttgtaccgtaatgataaagacggtggcaggaaagtccgtctttacagtgacggatgcctgcatgaatgcggctttgaagaaaataacgcttacttataacggtgaaacgatagaagtacctatgccgcagggggaattttgcggtaggacggtatcgtatgaattgccttaatggggcagacgggatgccttgtctgtctttttgggaaaggagttcctgttttagagttttatacattttgtcatcactcgtcaccaatcactctgtatccctttattggaaagggatacagagtgtgatgacaagtgtgacgagagtgttgacaaatttttggtcatcacttagataagtgttatttagtttataatgaggatactatgatattttgcgtataggtggtaatagagacttatttaatgatttctaagttcaaagtagctttatcatgcaattcggtgcactatttggatataaaaagctcgtaattttttgaatctgcttaatattaataaggtatttattagggataaatgtcttatttcttctttcttttttttgctttatcgcatatataatatcgttttatcactttcttttccttgtttttcggttgcgggctctacagttgccaattgcaagcccaacagcccgcagctggcaaccgtagagcccacagctgcgaaacgaaaaaatagacctgcttttccggggaaaatatagtaggtaaactactattaagtgagtgcttttgcaggtattatcttgttgatttcccgttattcattgcgtgttttgtttatgtgtccgtgcatttatcagatgattgtgtattataccggatatagtgcaatcgtttgcattcttcttattgaagtttttgcagcatctttgtcgcttactcgataatatggtatacatttgttctatcataataaagtatttgggatacgtttcgtaataaagttaatatactgaaacgttttttgaatatactatggataattaatattgttaactttaatttttaaatgcatgaagcaagttaatcttagaatctatcgaacgattcttcccttgttgttagggttattcttgtcagttggcgcttatgcacagaacattactgtaaaaggaaatgtaaaagatgctacaggtgaacctgtaattggcgcgaatgtactggaaaaaggtactacaaatggagttattactgatttagacggtaatttccagttgcaaacatcggcgggtgcaactcttgttgtttcttttgtgggctatcttcctgcggaagtaaaagctgcatctgtacttaatgttgttttgaaagaagatgctcaacttcttgatgatgtcgttgtaattggttatgcaacaggaagtcaacggacaatatccggtgcagttcagaaagtgggacgtgaagaaatgaatgccggtgttgtcgtcaatccgttatctgccattaaaggtaaagttgcaggtgtgaatattcagaaaaccggtggtgaccctactgctgctccggctattcgtgttcgtggtactacttctttgactggtggtaacgacccgttggttattattgatggcgtatttggcgatttgaatatgctgaatgctatttctcctgctgatattgagaattttacagtgctgaaagatgcttctgaaacggctcaatatggttctcgtggtgcttccggtgtcattgttgttaccactattaaaggtaaaaatggtgttaagagcttaagttatgatggtagtttcggtattgaaaccgtttataagaatttggaaatgctggatgctaaccagtatagagctgctgcacagaatttgggaattgatatattggataaggggtataatactaactttattaaagaaatgcagcagactggttatactcaaaatcatcgcttgtcattctccaatggtaatgatgattcaaactaccgtgcttctattggtgttatagatcaaaaaggtattataaaaaataatacaatgcgtaactataccgctaagattgatgctatgcaaaatatgttccataataagttgaagttggaatttggaatgttcggttcgttgaaagaaaacagatatgtgaatgactatcagaaaacattctattctgctgcttcttataatcctactttccctaattttaaaaatccggaaacaggtatgtgggatgaaaatgcaaatgctaatgaagtacaaaatccattgggtcgtttggatattgatgaccgcgaaactaatgcttttatcaatacaaatgcccgcattacatggagcattaataatgatttgaaattaagtgcattcggttcatatacttataatgtaaaagagaataaaaaatatattccttcttctataaaggccggtctgagtaatcgtggagaggcgtatcgtggtgataataaatctcagtcaatgttggctaacttgatgttgacttataaaaaaggctttggaaaacattatatcaatgctttaggtttggcggaagttcaacgggtaaccaatacgggttttggatctacggtacatggtttcagcacagacgattttttatataacaatttgcaggctggtgctgtattgaaatggggagataatacttcttattataataacccgagtttggcttctttcatggcacgtgtcaattattcatacgcagataagtatattgttacagtgaatgctcgtacagatggatcttcaaaagtaggagagaacaataaatgggcgtttttcccgtcagcatctcttgcatgggttcttaaagaagaagcgtttttgaaagatgttgatatgattagtaatttgaaattgagagtcggttacggtcttgctggtaatcaagatgctattagctcttataattcattgccattgatgagtcctaatggtacgacaacagtaaatgggcttccggtagtaacaatgggagttactcgcaattacaatcctgatttgaagtgggaagtaaagaaaacttttgatgtaggtttggactttggaatgtttgatgaacgattgagtttaactttagactattataattcaaaaacaacagatttattgtataattatgatgtaaaggttccgccttttacttatcctactttgcttgccaatttgggtgcaatgcgtaatactggttttgaaatagcaatcagcggtactccgttgaaaacaaaagatatggagttgaatatcagtgctaatgttgcatttcaaaagaataagttgctttctttgaatggaacgtatatgggagaacctatgacagctaaggaatacatgaacttgggcggtatgaatggtgccggatttattggtggatataatcaaattatttatcaaatggtcggacaaccggtaggcgtattctatttgcctaaatgcgatggattggttgataacggttttggtgattatacttatcatgttcaagatattgatggtgtggaaggtgtcgatttggctgatggaaaggatcgttatattgctggtcaggctatgcctaaagctttattgggtgcaaatatcggattccgttataaacaatttgatattcaggtacaaatgaatggagcttttggacataagatttataatggtacttctttgtcttatatgaatatgagtcagttcccgacttataatgttttggctgaagctcctcagaaaaatattaaagaccaaactgtaaccgattattggttggaaaaaggtgattacctgcattttgactatgttacattgggttggaacttgaatacaaaaaatctgaaagccatcaaatctttacgtgttactttctctgtaaataatttggctacgattacaggatactcagggctttctccgatgataaacagtacaacggtaggaagtgaccttggtattgatgacaagcgtttctatcctttgtcacgtacttattcattgggacttagtgttaacttttaattagatgcatattatgaaaagaagaatattatatagtttgttgatgacagcaacacttggcttatcttcttgtgaatctttcttgtcggaaaatccgaaagaccaaattacagaagaacaagcttatcagaattctaccttattatacttgaatacggtagcttccctttatacgcaagttggtgctaatggcggtggggcaggactacaaggtactgaccgtgggctttatgatttgaatactttcacaaccgatgaagctatgcttcccacgcgcggtggtgactggtatgatggtggattgtggcaaaatctctttcttcataattggggtacgaagaatgatttggtaaaaggcagttgggattatctttataaggtgattgcacaagctaatcaatcattggataaattgaaagaaattttggagaacaatccggagaacatttcagttcctaaatatatttcggaagtacgggcattccgggcaatgtactattattatttattggatatgtttgcccgtgttccattggttacttcttcttcagtagcaatggaagatgtagtacaatccgaacgttccgctgtttttaattttgtaagaaccgaattagaagaatcggttgaagacctaagcgatgcgcacagtaatttgacaggtgaatattatggtagaataacaaaacctgttgcgtattttctgttggcgaagctagctcttaatgcagaagtctatgcagatgacaattggacggacggtaccaaattggatggaaagaatatcaaatttacagtagacggtactgaaatgaatgcttgggaagctacaatcgcatactgtgacaagataaagaatctgggctataaattggaacaaaaatttgaagcaaacttttcacttaagaatgaatcgtcagtagagaacatctttactattccgatggatgcaaatctttataagaatgaattttataatttgattcgttcccgccactataatcatggtaatgcttatgggcaaggtggatggaatggttcgtctgcaacaaaagaagctctcgatgcctttggttatggtacaagctccccagatccgcgttttgaattgacttattatgcaggaaaagtagaaggacctaatgggactataaagcttgatgatggaacagatttggaatatgtaccttctgaaattactttggatttgtctggcaaagcctcagagaagacggcaggtgcacgtatgaaaaaatatgaattggatgcttctgctaccaatgatggtaaacttcaaagtaatgatattgttctgttccgatatgctgatgtacttttaatgaagagtgaagctaaagtgcgtaatggtggcaatggagatgctgaactgacagaggttcgggagcgtgccggtgctactttggatgtgacagccactcttgaaactttattggaagagcgtttgagagaatttgcatgggaaggtcttcgccgtcaggatttagttcgtttcggtaagtttacccgcgcatatactgatagacctcagttgccgaaagaagatactggttatactactgtattcccgattcatgaagatgtattgagcttgaatggtaaactgactcaaaattacggttattaataattaatgatttaatggaaagtaatatgaaaaaaatattccaatatatgacaacactcctattgctgttggtggtgggaacaagttgtgaagaaggcaatgataactggagaatcattactgatgctcaaccgggagcttatatcactggtgatgctacgatttatagtgctacggctacatcgtcccaactggtggctgcaccgttggatggagctccggaaggtacaaatgtaataggtatttacacttggctgaagtcaaacggaagttttaccattctgaatgtagatgaggaaggtaatgagataaattatggcaagggtgacgtagtagcttctactcctgctgaaacagtagctttagcagctggtggtacgcctttcactgttgcggaggatggtttgtactatgtagctatgaataaagcagataatcaactgacgataatacctgctacattcggtattatcggtgatgctactcccttgcaatggaatggtgaaactgccatgcaggcaagttataatgaaactcaggctacggttgaatatactattagtgatgtaacgttggataagaaagaaatgaagttccgttattcaggtgattgggggctggaattcccttatcaaggtggtaaggttaaacttcatactaatatgggatataatggcgataatgcatctgcaatatcagaagcttttagtgagtgtaaaggtggtggagcaaattttcaggtgggcaaagccggtgtctatacagttaccttaaaactggatttgcgtaccgggcagttctctgcaaaagctgtttgtacagctgaagatacatcttctgctacattacctgaaaaaatgtttgtaaatggtgatgcttggggatggcagcaggattggagtacagctcctgagatgatacctgttcatagccatgatggaatgttctggggcatctattatttgcaggcaggttacggaatgaaattcaataatgaaaagagttggagtgccggtgagaatttcggagtggaaaatgaggatcctaaaggttatggtgaatatccggctggtggttctaatttaaaagttgctgatacaggatattatttggtaattgtatcttgtactctttctgcggataaaaaatctataaacagaaaagttattcttgctgagccgaaactcttcttaagaggtgcttgtgccggtggatgggcagatgcaggtgcaggtagaccggatgattcggaagttgctttcaccttgtcgtcagatggcactgcttatgaggctgtagcagccggagacggagacctgcgtatttatgtgtctactggaattcaaggagttgattggtggcagtctgaatttctgctacgagatggtaaaattgaataccgtggtaagggtggcgatcaggaacctcgtgttcagatagaaaccggaaagactgttactcttgattttaggacaaataccggtactatccaataagtcttaagaataaaagaaagtgaggctacaatggatgaatcttcattgtagcctcttctcttcttttcgatattagttttaaacagaaaaatctaatgatatgaaaaaagtaaaattacttcttctttttttattttggataattcccttttgcttcatagcatgcagtgacgatgaaattggtggtggaagtggcaatgacgatggtatttggatagatgttgcggcatcttctgccaattgggatggtgaaaagagggcggacatatcttatcagctgctggtatactctttcgctgacagtaatggtgataaatgtggagatatcagaggacttattacaaaactggattacctcaatgatttagggataaaggctatttggctatcacctattcatccggctatgtcatatcatggatatgatgtgacagactattcagggttgaatccgcaatatggaacgatggccgattttgaagagttggttactaaagcccatagcctcggtattaaaatttatctggattatgtgatgaaccatacggggagtgcacatccttggtttaaggaagccaaggcctctccgaacaatgaataccgtaactattacatcttctcacaagacccgaaatccgatattactgccggtaaaattccaatgataaagcgggaaagctctacgggatataatgcaggcgaatggttttcggctggtataggtgatgccatgaaaggatattataagtttgtactcgactggtctaatgctgcaagtcccaccataacagttacaaaagaagatactccgaacgcggatactccggacgtaaccacgcaagatgccaagtacttatattatggtgagggcatttgcaagaaattctatgcgagaggcaataataagtacgagttaacggttgatcttgatacggattggggttttttaatccgtacaagtaatacttcatgggacaacggaacgaagtatggtgctccgtctaaagcaagtaaagtgcagttgggcaagccttttactttgagtaatgcaaatcctgaggacatattgtttgcatcggtcgaagcatggtatttccattcccatttccaaacagactggtttgccgaccttaattacggtgctattgatgatgctgccaactctccggcatataaagcaatatccgctgcagcaaaagaatggatagacaggggaattgacggattccgtttggatgcggtgaaacatatttatcacagtgccacttcggatgagaatccccgttttctgaaaatgttctatgatgatatgaacgaatattataaatcgaaagggcatacagatgatatttatattgtaggtgaagtcctttcgggcagtgacgaggtggcgccttattatcaaggacttcccgcattgtttgagtttgacttctggtataaactggactggtcgattgccaactccactggttgttactttgcgaaagacatactttctttccaacagaaatatgcgagataccgtgccgattacatagaagctaccaaactatccaaccatgatgaagaccgtacagcatccaaactgggaaaatcagaggcaaagtgtaaacttgcggctgccgtattgcttaccgcaccgggcgaaccctatatttattatggggaagaattgggtatctacggaacgaaggaaaaggcggatgaatatgtacgtagtccgatgctgtggggagataattatactactgcctatacggacaagattgatgccaccgtggcttcgagtataaaatctgtagcagaacagaaggaaaatgcaaattcgttgctgaatacctatctctcttttacccgtttgcgtaatacctatccggctttggctcaaggtacaatgacaaaacatgcggtatataacgaatcgaatgaaaaatacaagagcattgctgcatggtatatgacaaaagataatgaaaagatgcttgttcttcacaactttggaagcgcatctgttgaactgtcattgacagataatatcgagaaggctgtcggtgtatcgggaactgttcaggtgaaagaaggggataatacttccatacggttgggaggatattcgtcagtggtctataaaatagcccaatagcccgtttactcatacatctttatcagcaccctgttcagccattcccaccgaaaacggaaccagcgacgggtgctgatttgttttccgccgaagcggagtacgaattcgcggtagccatgtttgtggaaaggcaggcctacgtccataaattccaggtggcggtagccgcgttctttggcatcgtgcaatgcctgccacacggcaagaatgccgggatattgcaaagcgtatgttttacgcatgccgccggagaaccataggtatgcactgttattggaatagatacagacgcttccgccgataactttgtctttataggttacaatgaaaatacggcttttccggggcatttgcttctccagaagctggaaaaagtctatgcttgggaaatgccgccgtatcttggcagagtagttgtaatgcagcatcttggcaaaagcatggatttcttccggggtatgcgcttcttttacttctgctccgttgttcagcccttttttgatttggcggatgcgggaggaactgaaacgggattctacctgctccacattatgcaacgagttgcgtacgcgcagccagttgacggcaaagtaacggttctcgcggaatactttataaccggacaacgaattgtccagattgcggaactcgataaggaaggcttcccgcagggcttcgtccgtgaggcgttgcagcatatcgctaaagacagcttcacggttgagcgtttcatcgaaatattctccggtgccgtatacctcacaccgcttgatgatggcgggtggaaacagtcgtacgctcttccgtatggcggcaagcaacttggctacgggtattccgttttccgacgccacaataagcaaaggtgcatatcccggagttgcttcatagacgtgaaacagctccgtagagtggaatgtatcggttcccggcagttcgggtatccggcttccccgatggtatgtagtcagtttcaagggcattgctgcaaatttaaaaaaataatcttgtatctttgcattacttaacgacaaagtattcatttctaaacgatatacacatatggaaagttttagcgaattgataaagacccgccgcagcatgcggaagtttacagaagaggagttgacgcaagaacaggtggttacgctgatgaaagccgcactgatggcgcctacttccaaacggagcaatgcgtggcagtttatcgtggtggatgataaggaaacattgaaaaagctgtctttctgtaaagagcaggcgtcgcaattcatagcggatgccgcattggctgtggttgtaaccgccga

SEQ ID NO: 4141 - DNA, 372 bp, Unknown
  gut microbiota DNA sequence
aaaaacggcgactacctactctcccactgttacgcagtaccatcggcgtgactgagcttaacttctctgttcggaatgggaagaggtggaacctcagtgctatagtcacctgaataaggcagacatgatgtaaaaagtaaagaacaaccggtaatgaaaccggtaaactgaacgtatataccacccatacatggcaagaccaaaagtgaacgggcaattagtaatgctcggctatgacatcgctgcctgtacacctgcatcctatcaacgtcatcgtctatgacgaccctaagaaatctaatcttgtggctggcttcgtacttagatgctttcagcacttatccaatcccgacttagatacccggcaatgca

SEQ ID NO: 4142 - DNA, 844 bp, Unknown
  gut microbiota DNA sequence
cttacaactgctgtttttagatgctgggaacacataaatcaaagaaatcttcaaaagatcgcagcttaaagaaaatgaacagatttgtatagtgatgaacaaaaaagaggtgcatcgtgcattacgacacaccttctttttgtatttttgctttccaataaaaacatagaagcatgataccccaagcacttatccactacgtcgaaacggagattatcccccgatacgaacacttcgacaaggcacacaaccgttcgcatgtacaaacagtcattgacgaaagcctcgctcttgccaaactttacccccaggcagacgaacgtcttgtctacaccatagcagcctatcacgacacagggctttgccgcgaccgcgccacgcatcaccttgtttcgggagaaatcatagccgccgacagcaaccttctgcaatggttcgacaaagaagagatggcaatcatgcgggaagccgtggaagaccaccgggcatccagcgaccatgagccgcgcagcatttacggaaaaattgtggccgaagccgaccgtatcatcgacacagacatcaccctgcgccgtaccgtacaatacggactgaaacaaaatcctgcggcggacgaagcatggcactaccaacgttttcacaaacatctgatggaaaagtacgcacccggcggctaccttaaactttggcttcccgactcaaagaacgccgaaaggctgaaagaactgcaaagcatcatagcggatgaggtgcatctgaaaagcatttttcaccgcatgttcgaagaagagaaaagataaaagactatctttcctctatgaaaagataaagattacccctgtct

SEQ ID NO: 4143 - DNA, 3631 bp, Unknown
  gut microbiota DNA sequence
acttttcaattagtatctacacaaataagaaaacttcgtttatcatattgtaccatcttaccgttatcgtcctgcatattccgatgggtaaatacgactttctctctgccgaaaatattcaccattgttgtatatgacaagggcaggctgattttttgaccgttaatttttaatatgccttcggttatttccactccatctgttaccgacagagtggaacactcctttggagtaattttctccaccggctgttgcccggtaatctgtgttttcacatatggtggagcaagcattaggctaacatcttccgatacaggtggcaataaatagtctatgtttggatagggattcgggtaattaagccaatatcctaattttttcggacggcttgccatacgaagaaaattccataaatcttccggcaagctgagtatgtcatcagtgtgttggtgtgtatttactacaatagtaccgtcaggcaacgcatgaagggccttgaatgattcgctgccaaacacgccggggcggatacgcaaaacttcatccgtgctccagttccaaaggcgtgcataatcggaacggtttccgttcgtgtagtggtctccctctatcagtatccagtcctcgtaaaatatacgcaatctgaataaaccgtcaccgatgtgatgcaatggagcgatacggcatctttgtgttgccatatcaaggtcgagcaatcccggttccagccatattccgctattgttacttactgtatattcatgcagcaaaagaaggcgtgttgtattcggtacagggctgctgccagtatagaatgtttcatagccggacatggaaaatggcatagttatatatttcccattatcatcatatcggataatttttgattggctgtattcccccattactatatataacgttccctttccatctatcccgaagctgggagcatatatcaaaccttccggtaaaataattcgacttacatattttactccttgttctgtcattgtgtgaacaatagcactatggacatcccccaaacaaagataatgtccgcaccactggaattcatatttatcgtaaacactcaaatcacacacacgcggccatttctctgcttccaaaggattctttccggcaacgggcatttctcctaaagaggtagaatacaatgcagcataaaagtccagttctttcgaatatataaaactatggattttcttcgttttaaattttaccggttgaagagggacaacgcgcaaatctactataaatgttccttgccattctgtcttgctttcttgtttccattccccataggcgaagtaaccggcaaagcctcttgtaatatagcagatattgtcattgggccataccatttgcatacgcggcatctgcttgcgtggagcaatatgcctggcttgtatgccgaaatcacgatgcggctgtttgagtagtttgcaatattggccgtatttgtgacatttcttctcaaaagcttccatttctgcctgcggagtcagttccaacagataaatatcatcttcatctaaattgtaaagagcatatccgcaagctgtaagttcttgtcctaaggcagatataccaatctcatgtgaaaaacaggaatattggtttacgatttcatcaaaacgtttatccttcaatacggaaacaacatctccccacttctttctcaattctactactgtatcttctatatctccttcgtatttgagaatatcgagggcattgtcacgagtttcttgcatcctatcatcctcatacgctttcattacgttctttatccaactttctacagatttccgtgatattcctttgctagtatacagtcttgccggaactttcgaaaaccgtataccatactcagccagcctgtgcattaggagtacaagaagggtaggagtatgaagttcattctccatcaatgattctccatctcgtataaggaaaccgtctttttcattccaacttccatgaatactgtggtcaccattgcgcagataaatttgataacttgtgaaacgcgtgtagtcattgaaaagcgttcttgggccaaacatatcaactcttaggatataccatgctttcttttcttcttgattatttgatgtgggaaacatttccccgttagaagtaaaatgaaaagataggttccattcaaaatcatcaggataaggaatctctgcttttgccaaccattgggcagctataagagttggaatcgtattcttataataatcagacagttcttggcgtagtccgtttaaagaactctgttccggcagcagcaacagtatgcggtataaaacatgtagatctcccggaccttgttccatcagggtatgggcaagtcttgtcagacagtcaagagctgcagaatctgaagatagagccaataaagccacacaataccagaatcttataatgtcataatagaaatgtcctatcatacaataattttccagttcttgagcattggaaggaatgcaacaataaccttgcagaaaaccagctactgtgcggacaagcttttcgtctgttgcatacggctgcatacgcaatatctcttttctgttagtaggagcatgaacatatgagtcgagtgcagagttgaatcggttgatgccgtcatacaatattgcattgcaatttgccggtatcgggatactaattctgttatcggtataatatcggggatgtttttcactttcgtaaacgaatggaatacagtctgtaagataccacgtccaaaattttctgttcaattcggggtcgatttcctctatatctgctgttcttttattataggaaagacttgccaaaaatgctgcatcccatttgtcggagtcagtttgcccgtcattttcaaaaacttcttcactgaggctggaagccgttacggcataagctgcccgcactgccgacataccagccataaatggaacaaaattggttccataatcatatccttgtacgagggcagatatacggtctgctgcttctatcacatccttttcatttgtttttccccataaataatattctgcctttcggagcaattctataatttcatagctgttccctgaccattttctccaagtcggcaaaaccttaaaggcacataatatgcctattcttcctaccatgcgtaaggagcggagtgaccgtaaaattttatgtcgtgatgggcgggacagatgcccttgtgcagataaggtaatttccattaatccttctgttatcaaatttctcggaaaatccggtatttcaatagttttttccggttcgataggaggagtaaaattctgttgctgtaggaaatgtagggaatagaccttattgtaatcaatgaaagcatagggagagtagcgtttatggaaatcgactggtttgaaagaggcagctttcatataagcccagccgctgcccgttgtttctatgccctcatcataagcaagcaaaagcgcaacagtcggactatttgcatactctatccgtatatagtccgtaccgttcctttcttccttgtacagaacgatgcttcctttctgtttataaacattgcccatgtgactgaaataatatcatatggtcgcaaatatat

SEQ ID NO: 4144 - DNA, 3767 bp, Unknown
  gut microbiota DNA sequence
taagtcaatacaatctattactgtcctgcacagcctctccatcttcatttgccgaataagtataagtctaaactgaaagatgcgaaaaacagtataaactgattactgtcattgttgggtattgttaatattttaactggaatagagtgggttactgtcagatgtgatcttccgttgtttgatatattttgtccttttcaacttgggtatatggaaccaactttgcctttataattcgattattacggttaaatggtacataagtcaccttactatcaatacttactgtgtcgttcggctgttttaaatgagagtgcccatttattaacaaaacttccccttttgaaaaatctgcagaactgcagatcggatagaaatcggaaaagcaagctggtgtcatgtgaataaccctactttcataatcatagaataaaaatcgatttccatctgccacattatcatacacaacaaaacaatccaactttcttattccattgaccatatagctttgtacaaaatcaatgctgctatcatctgatgttttcaactcgtagacaacattctttctaccttgttgattcaggcatagcctatatataatttcaaactctgctttttctgtttcgatatagagggtatcttgttcagctgaagaatgacaccttgttgaattttgttccatatagctatcttttgttatggcatagctaaatggaaaaagaaataaacaatataatagaaatgctttcatctgttatatctaatggtttagcagagaatggcttgtgtgttatcctgcattgtcagtattccttttgttatctcatccattgtaaaagtaaattttcaatctcttgtgaacctgcttcttttgctaaagtgaaaggagtgttgccgttactatcctttatttcaaggtctgcacgatactctaaaagcaactgtaccagttctatgttcttattggcaatggcttccataatcggatataccttgtaggtgtcgtatggactttgacagccatttacgtgaataccatgctccaacaaaatacgggctaactttacgttggacaatctacaggcatatgtcaggagcgtaagtccgtattcatcgctatatactctatcgttaatgtccttgtatcgggtaagggcatacttcagcacgtcttctttgttaaagtagattgctgtatagagtatatcaaattcgtaacaatcgctactcattgccatcggttcatcttttcctgccagcaactgttttatggttgttatgtcgccgttgcgacaagcaattcccaacggataaagtcggtaggttttatcctgtatagtatcttgtagcaatggggttgcttttacgccattcaaacaacaacaaaacattgcaagggaaagtaacattctgtttactatattcatatttaccaagttatgtatcttgttcattatcaatctgtcattacgatagacattatatcaaacttacgtaattgtacgttgctttgggtaatgggtggcagtttgcagccataaggtgaaaccggcgtttacaggcagttctatttctttttttagtttataaatgactctttccttgttgctgatttgtttataattcccaatccggtgaataaacacccaatcccaataaaaggataaataatgccacataagaccgcaagcatattcaatccctgctcatctccttcgaaaccctccaaaccgacagcttgcaatatgaagtttgtaatttgccactccaacaaactttggtctatacagataaaagcaagccacaaaagaatagaacaacattccaaccccaaccataatattataactttaggttgcgttacatataatttatagaccttgcagattaccagtatatctataactgcaagcatacttaaaaaacaatattccataataccatatattccgaacagacggccaaagcctaaaccgccacaaaataatgttatgattatcaatataatactgaaagatatcaaggatattatggactggactgttttattcattgcacgattatcggtaactgtttggtaaagaatagcgttcagctattacctttccctgttataaacctatcttattcctttcaattcctctttcattttttctttcagatgaaaataagccaacacgcccaaagcattgaacaacgcggtttcatcttcattgcgccccaatgccttataaaatcttgcaacatttctataagccataatcaaaaagattaaatagacaataatcaaaattcccccactaaatacaagtgtacaaattcctattaatgaatttcttttgtatgctttgtactgtttttctgcttcatcgtaattattgtttgttaaataaccaaatcgttgcaaatcctctctgctccagcccctctcttctaataaattgataacataattacgaagtgcatcattataaccatagcgtttataatttttcactatgtctattagtttgtcattgtcaaatttgttaagaatatcaaaatcttccatacaattttactttatcatttatataatgggacaagcaggaacattattaaacattgacagtgtagcatcagtttcttttctaccgggtttcttctatcgggcggattcttgcaggtggggtagtaccgcatgtacatccggcttataatcaatgtaaatgtggggagaaacggatgtatggaaaagccgtcctttcctttttctttgtagagtacgcgatgttttctttctgtttctgaacattgtccatgtaactgacagcaatattatatagccgcaaatatacacaaagaaacagaaaaacaaaccggatgattggttttatttgattaaagtcccttttgtgggaatatattgtctccttacattgtaaggaacctgaatttcaggctttcaacagagagtagagaaagtgcaggcttcgtgatagtttttgggtatccaacccttgaaaaaaggattcttcaaaggacgtaccgaagaacatctgccagaacattgaagctgtttcttccacatccagatcctgccgtatttccccattttctttagccttctgaatggcggacttccatagttggtagttctgttcaaatatgacagctagttttttctctacattgggataatacagccttacttgcatcaataggtgataatagtaaaaattgaagctacaaccgctgggattattcccatcatccaacaagtgtacgagccgctgcatcatgttttccactccggctacatactggtcgataaactccgacagtgagtttgcagtgaagttaaacttgtttttcgaatgctgggtatcgaatacatacttgtctactacagccttgaacaagtccaatttgaatggaaaataataaactagtcctgctttagacaatccgcaggtcttggcaatttccatttggcttgctttctcgtaattcatcttagcgaatattctcaaagctttttccaatacttcatccctgttggtaaacatatttttttattctttggttttcggtttcaaatatacttattttaagggaaattctttcaagatcaaaccatattcatcgctgatactctaaaagaaccccatatttttctttgtctgccgcacattcagactatactccaaattccatataaaaccgggttatttattgaaaagcaataaaatatataaaaagtaggcttttcttttctatataaaaat

SEQ ID NO: 4145 - DNA, 36239 bp, Unknown
  gut microbiota DNA sequence
ttttttttgatatgttcttttaatttccagatattaaacttctgtctttttcttctctttggcaaatgccgtaataggatgtttccttttggctacgatttcactacagcatgtggtgtgtattctttaaccatgtgcaaccatttaattttttatagccggataaccgcgaaatagcattgatttctttggaatttataattctcatttgcagtaaggtgaatataggtttgccataattgtgcgtttgcttattgttggcatgtcccagtgcgggtagcggaaacatcttttcgagacttctttcttccgttatgactttttcatcatcttcttagttttgttttatgctttatgatgattaatgatgaaaaacaattaatcctgaaaatcatttttatcggtgatatacaccaacaaatcaagctatgtatttcctttggtagaggtgtatgaagaggtaatgtgatagtagcataatatactatgccaaaaaagggaaaatgttttttaaacgttcgtttattgtgcgcaaagatacaacctatttttttaacgggcaaaatgtttaataagaatatttccaaacagaaactattttttagacaaattactttaaatcaatttattatccacgcttcaaaagacctcattactattttattatttatataaatacgtctattgaacttctcattaaaaagagtgtcttttaaacgaacgtctaaaagatactttctctttttagattattagttctcagctttttataagctaaaaactaacataactgtttttcgacttctttttccgtgatggtaggaagttctaaaacaatatgaatgctaactaaactattggaaataactgcattacatgacttgatcggtaagtattacgctactccggtgtccctaaagaacaccctttttacaaggcttcatgttattccaaatcttgcattatcacagattaatgtcccgtttatcagtaaataaatcatccgagttacaatgtaaacccgatatgcaattaccggctgaaaatgaaggaagtaattgttggtttgcgattcgtgtttcttatagccgtgaattagcgttaaaagcaattctggatgccgagaatattgagaatttcatcccgatgcgttatgagtatatcatgaaatcggggaagcgcgtccgtaaactgcttccggctattcacaatcttgtttttgtttactctacccgtaaacgtatagatactttgaaagacaggcttgaatcgtccatgcctatacgttttattatgaatcgtgagcattgtcgtccggttgtaattcccgaatcgcaaatgcgtagctttattttggtggcaggcaattgtgacgaagcggttctttatgtagagccggccgaattgcatttggttaagggacagaaagtacgtattaccggtggtgtttttgagggagtaatcggtgagtttgtccgaatccgccacgaccgtcgtgtggtggttaatatagagggtgtcatggctgtagctactacctttattccgccttctttggtagaacccataaaagagtaacctttttttaaagcattataattcacaaatcataattcacaaattaatggattcattattttccttagcccatcgtcttctcacttacgggcttgacgggagtcctatctatgtagacgaatttacacgtttgaaccgtgaagtttacgagcaggcattggagctttatggcactcgcggcaagactgttgagtccgaagctgagctttgtcttggccttttagcagcttttgccgctactatttacgataatggtcataagcagcaatacattcagcgagtattggaccgtagttgggaagtccttcctaaactgtctgcatctttgctcaaagttcaacttcttgtctattgttatagcgaagtttatgatgaagaactgtcaaggcaagctcatagcattattgccacttgggataaggcagaattaactttggagcaagtggatataatagaagagctaaagagttttgaagaaaaccaatacccttatgaagtgatagaataacttcattcaccaacctaaactattcaactatctaaactaagactttttattttatggaaccgattgagaaagatgatcattttattcctgacggaatgaatgctttcgagcgcaatgtgaaacgtataggtgattgttttcttgcccttggtgcacttattgttttttctcctttatttttgatttgttatattgccgtgaaaagtgaagatggaggtcctgctattttcaagcaggagcgtatcggtaggttcggccgtccttttaatatctataagtttcgcagcatgaagctggacgcagagaagtatggccctgctctctacgccggtgcaaaagatccccgcatgacgaaagtcggcaggtttcttcgcgatcatcatctggacgaacttccccagctttggaatgtattctgtggtgatatggcctttatcggcccccgtcccgaacgtaagttctttatagaccagattatggaggtggatcctcgttatcgttatttattccagattcgtccgggagtcacttcgtatgctacactttacaatggctataccgatactttggagaaaatgattcgtcgtctgcgttatgatttattctatttggagcatcgctcctggggttttgataccaagatactttttatgacgtttatgaatattgcgttcgggaagaaattctaagattttttcatcaagataaagggaaaattcaatttcagaaatctccatcttttagtgctcattaattgataataagtaaattattagtagtatcaaaccatgtgaagatcgtaacatggaaaagcagatgacaagtgaggtggcaatgatgtatgaggcatcattaaagaatttcctaattattacatcttgaactttacattatttttaatgtgtttggatcttctcaaactgtcaagagttaaaaataaacgggtaacttgtaatgtttcataaataatatataaatgcaatttcctcaataatataaaggttataagtattgttttatatggataagacaaagaaaatagctgtaaatacaatctttctatgctttagaatgttggtattgatgttaatatcattctatagttctcgggttttattgaaggagttaggcgttacagattttggtatttatggattggtaggaggggttgttgccatattttcttctttgcgtggcttgtttgctactgctacccaaaggtttcttaattacgaaatgggtaatgacaatataggggctctacagaaagtctttaatatgagcatactcatcaatgtcattataagtttagttttttgtataatagcagagggtatcgggttatggttcctgaataataaacttgtgatagattccgcccgcatggtatccgcccattgggtttttcacctctcgatattggcatctatggtttcaatcatgactataccttttgatgctgtgataatagctcatgaacgtatgtcgttctatgcctttatatctatattgaatgcctttctgaggttgggagccattcttattcttcctttctttgcaatggataagttacagttatactcaatgctgatattggcagtgtctttactgatgaggctgttgtgctctatctattgtaaagtaaatttcgaagagtgcaaatataaattttattggaataagagtctgttcaaagaaatgggaagttttgccggatggaattttgcaggaagttttgcctattcatatgttaacgagggacttaatattgtactgaaccttttcggtggagttgtggtgaatgctgcccgaactatcgcatatcaaataaagaatgcaataaccacgttgttatacaacgtgatgttggcaattcagccgcaggctacacaactctatgcaaagggtgaattcaatagctttttcaaaatgttatttgtcggagctcgagtggttgttttcttttatttgtctatagcttttcctgtatatttttacatagaagatattctatctatttggctgactaccgttcctgagcatacgattgcttttgtacggactatattaatctatcttgccattcgctcttttcacgaaccgatagatatattttatatgattattggcaagttgaaagtttaccagataacggaatttattgtattaggtgctgcactccctttatcttatattgttctgaaatatacatctttaccactatatagtgtatttattataatggcgatagttgaatttataaattttttcattattctttatatagcgaaaaggatagggcgttttgatttagaactttatgtaaaaaaggtttttgtgccgtttttttatactttcttctgcatgtgtttttgttcatatttgataaatattatttataattcctacgaatatactgcgtattattgtatcctgccgatactgataaatgttctttgcttttgtggtatcagtcttatgttcggatttaatttagaagagagaaaagctttgaaaagaataattttgagaaaataagcaagtatgtataatttgactctcttaacttcaagtaatcgtgataaatataaaacaattatcccaacggtataagatttatgattataacataggtcttataaaagcgacgcctacggatgtcatcttcggaaattttgatttatgtagtgtgcattggctgaagcataagtatcgtgatagaatgtttgctgatccttttattttgaaagagacggacgacacattggaaattcttgcagaggaagcactatttcttgggggagcggcaactttggtaaaactgactgtttgtactaaaacgtttcaattagtaaggagaaagaaaatactgtccataaaaagccatctgtcatatccgtatattcttcgttggaacgataaagtctacatacttcctgaaaatatagcatcggataaactgaaactgtattgctatgatgaggtaagggaagagtgcatctacgtgaaaacgttgttggatatgccggtatccgatcccaacatcgtttatgaaaacgggaaatattggttgttcggtggaaaaaaaggctgtgatcaggaagaattatatttatggtgttctgatgataatatttgggggaattactatcccaaggagggagtctgtgtgaagaagggccttagaggtagtcgtatggcaggtgatttttttagagtaaacggtcagttgtatagaccttcgcaggattgtctggaacattatggagcaggtacggttatctggtgtgttgattctgtatctttggacaggtatgaagaaacagaagtagcagttttatatcctcagccgagaagcaactatcctgatggcttgcatactattaacttttcggacaactggtgtgtgatagatggattacatataaagcctgatttttggaggggtggattgttaaggttggataagaagtttggacttggcttttttgattgatgaatattctttttgtaaatacatttgatgtcagtccctttttgggaggaactgagagaattaccgatacattgtgcagggagtttaggaagagatgtctgtgtagatgttatttagcttattatgaagggatagacagcctttataagaagactgtttttgatggaagactatgtcttggaagcaggaagaatgtggcgcttttgattgattatatagtaaagaaagatatagatgtagtattgcttcaggggcagttaggattagcaaaaggcataaggcaggcaatcggaaagaagataaagataatatttgcgcatcacctttatcctggcgtagagcgggaagatgtttcgtggagtaatagtgtacttaaatgttggaaaagccgggggcttatggcgaatatgttaaggttgacggcttatccgatattgaaagtaaagcatttatatgcgcttcctttgaaatataaagatacctatgactattcggacaaagtggttctattgtcgtctgaattgatacaaccttttacagctttcggacatataaaggatacggataagttcagtgtgatacccaatactctctcgttcgatatattctttccttttgagaaaatctatgaaaaagaaaaagtagtacttattgtttcgaggcttgtagagaaccctaagagaatttctcttgccctaaggagttggaaagaacttatgagtgatgacaggttggcggattggaagttggttattgtagggagcggaagtgacgagaataactataaaagttatgtggctgaaaatgatataaagaatatatatttcgaaggaaataaaaatcctcttccatattatcaaaaagcatctgtttttctcatgacctcagcattggaaagttgggggctgaccattacggaagcacaacagttcggggtagttcccgttgcatttgacagttatccgagcttgcatgaggttatagaaaataatgtaaatggcataaccgtaaagaatgacagaatggatttgtatgtggaagctgtaagaaatatgatgcttgattcggaaacacgtaataggcttgccgagagtgccataaagaaagtacaacgtttttctgcagagcaagtagtgaaacaatggctctctattttttgatatgaaaagaattatacataaatctttagccttatatttataatatgattcctaaaataatacattactgttggtttggaagaaatccattaccattgcttgccgtgaagtgtattgagtcgtggaagaggtattttccagactatgaaataagagagtggaacgaggataattttaacgtgaacatgattccttatacacgtgaggcttatgaagccaaaaaatatgcttttgtgagcgattatgcacgtttttatattttatattattatggtggattgtattttgacacggatgtagaagtaataaaaccaatgaatgatattatagagcgtggggcatttatgggatgcgaaaatgagctgaaaccgggtggtacctctattttagcagtagctccaggacttggtttgggatgtattccgagacttggtttctatgaagatatgttgaatttatatgcaggtctgcattttcaatatgcaggtaatgatctgaatcagaaaacagtggtagaatacactacagagctgttagtagcaaaaggcttgaggaatatagatgatatacaatgtgtgaatgagatatggatttatccgaaagaatatttttgtccgattgattatcggacaaataagatgaatgtcacttgcaatactcgttcgatacatcattttgccgcttcatggaaatcatgggatgaaaagatgaaaatcattatagctcgtatcatcggcacgaaacttacacacatattaggtaacgcccgacgatgtatcattggtaaaaaatagaatcagatgagattttctttgattacagcgaccttaggaagggtagaggaggttaggtgtctgtgcgtatccctctctaaacagacatttaaggattttgagttatatattgtagatcaaaacgagcatcatgaacttgaagatatagttcgcaattttgaaaaaaacttcattattcattatatacgtagcgatgtaaaaggattatcatacaaccggaatattgccttgcgcatgtgtaaaggagaaatcataggttttcccgatgacgattgctactatgaggtaaatgttttgcaggaagtaaatgaagcctttagcagtagggaagaagtaggattctgtgcagttactacccgggatactgtaaccaaaagagtttgtcatatttcacaaaaggcatatctatataaaaaggatgttttaaaggcatgtatttcgtataatatttttgtccgaaaaaatacggtgatgtttgatgagcgtttgggagtgggaacttacttttcgtcaggagaagaaacggattacctgtactcttttattgagaactatagaacatgtggtttttttgttgaccgaacagccgtttatcatccagctaacaatgcagatatttctaaagtctataaatatagccttggatttgctgcattacaaaaaaaggattggataatgaggcgtaattataaagccttatttgtgtatctgtattatctgttgagggctttctgtagaatgcttttgataagaaactttatcaaacactggtactccttcggaggtaaaattataggatttgtaaagttcaaggtttaatgtattattatactttggtcgtcttggcgtatgcgacttttttattggataatttcaatgttaggaacaaggagaaatactcttgtttatttgcatacgtttttttctctgtaatcttctttatatcatcctttaggtatgaagtaggctctgactatcccggctataaagaaatttttgagtatgatgaccccatagaacctttattcgccttgcttattaaagcagtaaaatatattggcggaaactatgaggtttttgtggcgattatttttattctttcgttcggactgaaactgtttgtctttcgtaagctggcctttaggaaagggttttacctttcgatgatgttgttttgcagcttttattatatagcttatgagatgaatgctatacgtcaggggcttgccatgtcattgactttgctggctgtatattatgcgtatatgcggaaaaagataaaatatataacggtatgtttattggcctcttttattcattatacagctttttgctttatacctttttatcttcttctcaacataaagttaaagaaaattcatattgtaggcatttgtctcttatgcgtactgttatcaatgaatcaaatattcaatatttttatggatatggcttcaatgtatttgggggatagcgctatgggagaccggatactggcttatggtgaaaacggggatgcttcctctaatgtgctgttctcctccggaacattgcggcgtttgttcttttttggattgataatatatagtattgataagattgaagctacggaaaggttgaaacagatcattctgtggggggcatttctttcaatcgttacttaccttttgttttcgcaaataggttatttctctatcagattatctgcttattatagaattatagagtgtatttggcttagttattttccttttatctttaagaatcatcgcagtcagatgattgtcatagcattctttttcctttactctatattgcaggtaagctctgctttgatgctggaagacaatggattgctgccaatacgcacaatagtatttgaagatttatgaaagttcttattattcgggataagactttgtcttttaacggtggaattaaaagacattgtgatgacttgtatgctctgatgtctgcatgtgatgtggatgttatgcccgtggaagacctgcctgccacgtatgtaaagtggattcgtaagtataaatacgataccaaagcattggtccgttacatagagaatagcagatgtgatgtagtacatattcacggttttatgtctccgggtgcggtgcaggcaataaatgcggcctatggtttgaataagaaaatcgtatatagtcctcattttcatcctttccggtatctccggcatcccatgaaagggaaactgtggtttcatttgttcctgaaaccggtcttgttcaaagtggatacaattgttactataaacaatgaagatacccgcttttttggcaagtaccatcctaatgtaaaaaagattcctcattggagtacaacagatacgaatgttttggatgaggtagagaaacaagataatatggtattgtttatagggcgtaatgataccaataaagggatagaacatctttataccctgtctgataattgtcaggttcattgcgtgtgtaaaggaacagtgaaacgcgatgattttattcttcatcagaatttgggagatgctgagttggcgtgtctatacagacaagcgagtgttgtcgtagtgccttcacgttatgaggctttttctttggtggctttagaggcgcttcaacaccatactccagttgttatttccgaacgcgtaaggattggcgattatttgaaaggagataaaggataccgggtttttaattatcacgattatgagggctttaaagatgcggtttctgaattaatgatgtctaaagatacggtaaattataaccaattgttagctccttttgataaggaaaagattagggaagaatattgtagaatctataattgctgagtctttaacgcttatgaagaaagtcattacatacggaacttatgatttattgcatcaggggcatatcaatctgttaaggcgtgccaaagaattaggcgattacctgatagtcggtgtgacaagcgatagctttgaccgggagcgcggaaagcttaatgtgcgtaacaatgttttggaacgtattgaagccgtacggcaaaccggatatgccgatgaaattgtaatagaagactatgtcggacagaaaatagacgatattcagcgatttggcgtggatatatttgccataggttctgattggcaaggacattttgattatctgaaagagttttgtcaggttgtgtatttaccgcgtaccgaaggaataagtagcacgcaactgcgtgaagaagttttggagaaaataaagataggtataataggaacggggcgtattgcacaacgttttataccggaagcggcaagtgtcagcggttcagaaattgtgtcagtgtacaatccggattatgtcgatgcagaagcattcgcttctcgttttggcttggataaggcaactgataatcttgcgtcattctttcaggatatagaagctgtttatattgcgtcccctcaccttactcactataattatatataccgggctttaacggcgggtaaacatgtattgtgcgaaataccgatggtgttgagtgggagagaggccgatgaactttatacattggcacgggataaaggcttggtattgctcgaggcttccaagacagctcattgtccggcatggaatcatttacttgttttggttaaaagcggtgttattggtgaggtggtagatgtaaaggcgtcattgtctaaattggtcagcggggatgtgcgcgaacttgatgccgggcaagcaggcggatgtatgacagagttggcctcctttccgttaatggccgtcgtaaagttgctggggacggatgtaaaggatacatatttttattcgaagttacagaatggggtggatatatttacaaaaggaaatttggtatatagaaaagcaacagcttctatcactttagggctgggagtgaaaacggaaggaaatcttgtaatttccggtacgcgtggttatgttcttgtcccttctccctggtggctcacaaattatttcgaagtgaggtacgaagatcagaatcaaaataagaaatacttttatacttatcagggagacggcttacgttatgaattgcaggaatttctttcaatgatatatacgcaccgtttaagcagttaccggctacaacccaaagagtctgtgatgattgcagaattgatagaattgtatagaaagggagtgcataatacttatttggaatgataaagaaacaaaaggctcttattgtaggaggaagtaacgggattgggctggctcttgcaatgcgtttagtaaaagagaaatcggttttgatagtggacaaagtggaaccggattatagtcaggttccatcagatataaagcatttggtgtcatttcggaaattcgatttgctgttcgatgactattcattgtttgatgaatttaacgatattgatactttgattattacagcaggattcgggaagctatctctttttgaggatatgcaggaagacactatagtagatatgataagtgtgaatacaacatctgttttgcgtattatcaagcatttctatggtagcatacacagcaggaagccattctatacggcagtaatggtgagcattgcgggctttatgtcttctccttttttcagcgtttacggggcaagtaaagctgctttaaaaattttcatagaaagcgtgaatgtggaattaaagaaaagtggtacagacaatcgtattttaaatgtttctcccggtcgtataaatggtactaatttttacaatggggctaataatctttctttgttgtatccattggctgatgaaattatataccatatgaataaccggaatgatttgtttattcctgaatatgaagaggtctttaaaaaagttctggaacggtaccaccgggactttagggctgaaggcgaacattcttatgaatataaacaggaacaattaaagcgaaaataaaactttgatatattatgaccgaattacgtcatttgcaattggtaatccttgatataattaaagatatcgatattgtatgtaagaataatggaatagaatattatctattgggaggctctgctattggtgcgataagacataaaggatttattccttgggatgatgatttggatattattatgacccactctaattataatcgttttctcaaagtctgtaaggaacaattgaatagtaataaatattatgtacaagaggggttagtggattggccgcttgattattcgaagattaaattgcgggatactattctgaaagaacccgaaggctatattcccgcaaccggagagcaaggaatttttgtggatgtgtttaagctggacaatgtgtcatcgaatagattttttgcatattggcaatatgtttgtgcaaaggttctgttatgctatcagttgtcgttaagaacctataaaagcgccgatttgaagaagaaaattctaatgtatttggcttttccgttgagatgtggctatgtacgcgactttttccggaggcaagtggagcggctgaattgcagagagagtgagtattggggattcttctatggtaggacaaagtataaaacctcaattctgaacaaaagaatatatggaactcctatacgtgtaccgtttgaggataccgaattgcctgtaccggaacactatcatgaatacttaactaagatgtttggtgattacatgcaacttccacccgaaaatcagcgtgttggcttgcatctgctttcagttgattttggtcgatactaattaatctttggataactttcatgcctttttctgttatactttctatatattacaaagaatctcctctgtttttaagagaaagtttggatagtcttttttcccagacggtatgtcccgacgaggttattctagtaaaggatggtccgataggtgacgaattagataatgttatagattcatatgtgacaaggtatccgtatctgaaagttctttctctggtaaccaatcggggattaggaaaagctttgaatgaagggttaaagtattgttcgcacgaacttgtggcccgaatggatactgatgatattgccatgccggagcgttttgaaaaacagttggctgtatttaagaaatatccggatattgatgttgttggtgcgtggattaatgagtttgaagataatgtatccaatataaagtctgtaagaaagttgccggaactacctgatgatataagacagttcgcaaaacgccgtaatcctataaatcatccggttgtaatgtttcgaaagagcgcagtattggctgccggtggataccgacatttccctttatttgaggattactatttatggatacgtatgttgatgaatggagctaagttttataatattcaggaaagcttgctgtatttccgtttttcttcggaaatgtttaaaagaagagggggatggaaatatatgataaacgaattgcattttctgcaaatgatgagacaaatgcattttatttctttttctcaattcatgcaaaacctatttgtccgtttctctattagactaatacctaattctttgcgggcaattatatatacgaaattgattagatagatactgcatgaataattcctttatagcttggttgattttcagcgtctgaatatttttctgacttttttcatcagttttattccaagcatggctccgtcgaatacagccataccggtattaaatgcacgcatgatagctgttcctttatttgcagcaggggctatcggggcaaataagttccgggcggtatcattcatgacctgcttttgggcacgtaattcttctaatgcttcggccttttgtcgttggaggtcttccagtgtaagaatctctgtctggacggtatcattcatatccatgatattttagtttttattgttatctatgaataatccggcaatgaatttggtcattggattaataatgatttttttgcggaacgcaacaattaacgcaatcaataaaatatggaagcagcttatcatggcaaaacttaccattaatccgcctactatggggtctagtatgtaggccagggtaaaggagagataaaacaaagccaccatgccgaggatgacgaccaacaatacaagtataagcgttgagagcaatatggttaatttctccgctacttccagttgggtatatttcttttgtagttccagatatttcttgaaatcgaaaaatagctgctggatattctcaatactgttgtcatctgcaaacatagtggctttgttttgaaatgtggtttgatttattcgtttgcttcgcctttcagttctgctgcaatttcatcaacgaggttttccatttcattacggttcaaccggatacctttcttgcgaaggatttccgcaatcttgtgacgcgtatcttctcctttttccggggcaaacaaaataccgatggcagcacctaccgctgcaccacccaaaaaagctgctaaaacatttaatcctttcataataatactcctttctttttattaggtctaatatgacaaagctaacaatttattttgaatgattgttcattaattcgtgttttttgaaaatatatgcctcaaaaagagataaaatatgtattttaattatatttaacgacataggagaggctaagataagcggttcggagtacttttgcttcctaaacaaaaaagagatatatgaaaagattgctgaacgggacaatactattgcttttgatgtgtgtagcgctgggactggcgtcttgtatgaatgacggcggttccgactgggtaggaaaatggcagttgcgcgaatatcagtatcccgatggtaaagtgcagaaagtagacagtatcttctatggttttcaaaaaggcagttttctggcacattgtatgaatgaaagtggaagctatgaatctttttatggttattataagttgaaagatgatgaaatttctataactttgtggccggataatagttcaggaaatgagtctgttcatgaagaacttgtaaattcggatagctataagaagttctttggttggggagatagcggcgagagaacgttcaaggttgaagaattgacaaacaataagatgcggttggactatgaaggaacgaaatatgttttccgtaaatattgagtgttatttgagaatagatatagttactaacaaaaaataaaaagaaaagatgaaaaaattggcagtgttaggaatgggagtatgtattgtactggcattctcttcttgtaaatcgagtgaaagcgcttacaagaaagcatacgaaaaggctaaacagcaggaattggcagaaccgcagactactgcaccggtagaggaagttgctcctgtggttagcgctccggtagaagctaaggttgtagaaagtgcaccggtaggtacgatccgtgaagagaaagtgacggtggtatcaggtgctgacggactgaaagattatagtgttgtatgcggtagcttcggtgtgaaagccaatgcggagaacctgaaaaacttcttggataaggaaggttataatgctgtcattgcatttaatgcagacgccgctatgtatcgtgtaatcgtaagtacatatgcagacagaaactctgctgccagcgctcgcgatgctttcaaggctaaataccctaaccgtcaggatttccagggtgcttggctgctgtatcgcattaattaatttgaattctttttggtaattcataagaaaggggtatttccctcctttcaagatagggcggtaactgggaagttactgcctttttcataatctgttgaaaatgattatgaaaactctgttttgggtgattgtgaaaagtacttataaatatctctttttcgtttaaaagaagttataaaacaaaattaaaaacttttggcggtaaaaaagtttttaattttgcaccttatatattttgagaatacaatatggaacgacaatatatacttgatgcgattgatgcagcactttgtgccggcaaagatatcctctctatttacaacgatccgacctcagattttcaaatagaaaagaaagcggataattctcctttgacgattgctgataagaaagcgcatgcggctattgccggctatctgcaaaaaacgccttatccattattgagcgaggagggaaagcatttgccctatacagagcgatgtgcatggactactttatggattgtagaccctctggatggtaccaaagagtttatcaaacggaatggcgagtttaccgttaatatcgctttggttcgtaattccgttccggtaatgggggttatataccttccggtaaagcgggagctttattttgccgaagaaacattaggtgcttacaaactttcggattttacagctcgcagcggagcgtcgttggaagagttgatggcgaaagccgttcatttgccgattaaggatgatcacgataaatttgtaattgtagcatcccgctcacatctgtctcccgaaactgaagattacattgaaaagatgaagcattgccactcggatgtagaattgatttccagtggaagttccattaaaatatgtctggtggcggaaggtaaggcggatgtatatccccgttttgctcccaccatggaatgggatacggcagcagggcatgccattgcacgtgctgccggtatggaagtatatcaggccggaaaagaagaaccgctacagtacaataaggaagatttgttgaatccttggtttatagtagagcccaggcgtaattaaataacgactcgtatatatgacgtttgaaatcatatttgtgcttttagcgttgctgggcatggtgatagccctggttttggataaaatgcgtccggggatggtgctcttttcggttgtggtactgtttctctgtgccggaatcctgacacctaaagaaatgctggaaggatttagcaataagggtatgattacggttgccatgctgtttctggtcagtgaggggattcgtcagtccggtgcgttgggacagcttatcaaaaagctcctgccacaaggtaaaaccaccgttttcaaagcacaactccgaatgctgcctacgatttcctttatttcggctttcttgaataatactcctgtcgttgtaatttttgctccgattataaaacgttgggctgagtcggtaaagcttccggctactaaatttctgattcctttgtcctatgtgacgattctgggaggtatctgtactttaatcggcacttccaccaatctggtggtacacggtatgatactggatgccggttatgagggatttactatgtttgaacttgggaaagtcggtatttttattgcaataaccggtattatctatctgtttctgttttcttccagactattgcccgatgtccgtaaagatgcggtgaaaccggatgatgaaccggaagaacatagtgatctgcatagggtagaggctgtcttgggtcctcgttttccgggtatcaacaagaaactgaaggattttaactttaaacgtcattatggcgctgaagtgaaagagataaagcgtaacggccagagttatgtgcaggatttggagaatgagtatttccgggaaggtgatactttggtggtaatggctgatgattcttttgtgcagacgtggggtgaatcttctgtcttcgtgatgcttgccaacggtaaggatacggagcctgttgcaagtaaaggcaaacgttggtttgcccttgccctgctgattctgatgataaccggagctacggttggcgaactgcctgcagtgaaagaggcttttccggatatcaaactggatatgttctttttcgtgtccgttacaaccattctaatggcatggacaaaaatctttccggcccgtaaatataccaaatatatatcgtgggatatcctgataacgattgcctgtgcttttgccatcagcaaggcaatggtaaactccggagtggcggatgccgtggccggatacatcattggactgacggatcattacgggcctgcggtgttgctggctgttatgtttgtcattaccaacctgtttaccgaactgataacgaataatgccgccgctgcacttgcttttcccttggcgctttccatttcatcgcaactgggcgtaagtccgacgcctttctttgtggttatctgtatggctgcatcggcaagtttctcgacgcctatcggttatcagaccaacctgatagtacaaggtatcggcaattataaatttacggatttcgtccgcatcggacttccgttgaatattatcacttttcttatatccatattccttattcccttaatatggccattttgattgaattatgacagaaaataatatatatcctatttttgacagaatgttgtcgaggcaagacaaagaagagcttctgaaacaacatagcgtgatgatttggtttaccgggctgagcgggtcgggtaagagtacgatagctatcgctttggaacgtgagttgcataaacgcggattgctttgccgtattttggacggagacaatatccgcagcggcatcaataacaatttgggctttacggaagccgaccgcatagagaacatccgccgtatagccgaggtttccaaattatttgtagatacgggcattataacgattgcagcctttatcagtcccagcaacgacatccgcgaaatggcggcgaatattatcgggaaggatgattttctggaagtgtacgtcagtacacccattgaggaatgcgaacgcagggatgtaaaaggcttgtatgcaaaggcacgccgcggagaaattaaaaactttacgggtatttccgcgccattcgaggctcctgcacatccggcattgacactggatacatctgcgttgagcctggaagaatccgtcaataaattattggaattaattttaccgagaattcagaagaaataatatagcatgaaagaagaatataaactgagccatttgaaagaactcgaagcagagtctattcatattatccgcgaagtggctgcggaattcgagaatccggtgatgctgtatagtatcggcaaggactcatcggttatggtacgtctggccgaaaaggcttttgctccgggtaaggttcctttcccgttgatgcatatcgactctaagtggaagttcaaggagatgattcaattccgtgacgagtatgcccggaagtacggctggaacctgattgtagagagcaatatggaagcttttgaagcaggtgtaggaccttttacgcatggcagtaaagtgcatacggacttgatgaagacacaggcactgctgcacgcattggataaatacaaattcgatgcggctttcggtggcgcccgtcgcgatgaagagaagtcgcgcgcaaaggaacgtatcttctctttccgtgataagttccaccagtgggatccgaagaatcagcgtccggaattgtgggacatatacaatgcgcgtgtccataagggagaaagtatccgtgtgttcccgttgagcaattggacggaactggacatctggcaatatatccgtctggagaatattcctatcgtacctttgtattttgccaaggagcgtccttgcgtggagattgacggcaacctgattatggctgatgacgaccgcttgccggaacagtatcgcgagaagattgaaatgcgtatggtgcgtttccgtacgttgggttgctggccgctgaccggggctgtagaaagcagtgccgatacaatcgagaagattgtggaagagatgatgactaccaccaagagcgaacgtaccacccgcgttatcgattttgaccaggaagcaagtatggagcagaagaaacgtgagggatacttctaatgaaattaagaattaaaaattgagaattaagaaatggatgattcaagacttgatataaaggctttccttgataaagacgaacagaaagatttgcttcgtttccttaccgccggttcggtggatgacggaaagtccacgcttatcggacgtctgttgttcgatagtaagaaattgtatgaagaccagttggatgcgttggagcgcgacagcaaacgtatgggtaatgccggcgaccacatcgactatgccttgctgctggacggtttgaaggcggagcgtgagcagggcattactatcgacgtggcctatcgctacttctccacgaataaccgtaagttcatcattgccgacactccgggacacgaacagtatacgcgtaacatgattaccggcggctctaccgctaatctggcgattattctggtagatgcccgcacgggtgtcatcacgcagacgcgccgccatactttccttgtatctttgctgggtatcaagcatgtggtgcttgccgttaataagatggacttggtggacttctccgaagagcgtttcaatgaaattgtaggcgagtacaagaagtttatcgctccgttgggcatccccgatgtaacttgcatcccgctttctgcgcttgacggcgacaatgtggtggagaagtcggagcgcactccgtggtacaacggtacttctttgcttgacttcctcgaaaccgtacctattgataacgaccacaacctgaaagatttccgtttcccggtacagtatgtgttgcgtcccaacctcgacttccgtggtttctgcggcaaggtggcttcgggtattatccgcaagggagatgaggtgatggcattgccgtccggaaagaagtcccgcgtcaagagcatcgtgacctatgacggggaattggattatgctttcccgccgcagtccgttaccttgacgctcgaagacgagattgacgtatcacgcggagagatgctggtacatcctgacaatcttccgatgatggagcgtaacttcgaagccatggtagtgtggatggacgaggaaccgatggatgtaaacaaatcgttcttcatcaagcaaactaccaatttgagccgtacgcgtattgacaatatcaagtataaggtagatgtcaatacaatggagaaactctcccttgacaacggccggttgacgaaagagaccctgccgatgcagttgaaccagattgcccgcgtagtgttgactactgccaaggaactcttctttgacccttatcagaccaacaaagccaccggttctttcatcctgatagacccgataaccaacaataccagcgccgttggtatgattatcgaccgcgtggaagataaggatatgcatgtatccgaagaactccctgttcttgacttgccgaagctgggcatcgctcccgagcattacgaagctgtagagaaagccgtcaaagaactggaacgtcagggagtggcagtgattattaagaaatgaaaattaaacattaacaaataagagtcggatgagaattgcggactggcccgaaaggctgttctgcaatcctcaacttacaattctcaattaaacaagaatgggtttattagaattcaacaaactgccgattaacacactggtcggtgcagactggaaaacgttcaacgccattacaaaaggacgtgaaatagatgccgcgtacaaaggtaaattccggttgacgaaagccgtttgccgcatgctttccatattggctcccttgcaggacaaacgttatgagaagctgttggcggacaaaccgctggagcacgaccctgtatttattctcggtcactggcgtagcggaacaactttcgtgcataatgtgttctcttgcgacaagcatttcggctataacacaacgtatcagaccgtatttccgcatctgatgatgtggggacagcctttcttcaagaaaaacatgagctggctgatgcccgacaagcgtcccacggacaatatggagctggcggtagacctgccgcaggaggaagagtttgcgttggcgaacatgatgccttatacctattataacttctggttcttgcccaagcatcagcaggagtatgccgacaagtatctattgttcgacgatataagcgaggcggagctgaaggtgtttgaggaaacatttaccagactcatcaagatttccttgtggaatacgcacggtacgcagtttctcagcaagaacccgccgcataccgggcgtgtgaaggaactggtaaagatgttccccaatgccaagttcatctacctgatgcgtaatccttatacggtgttcgagagcacgcgcagtttcttcacgaatactatccagccgttgaaacttcaggatattactcctgcggaactggagcagaacatcctgtctatctatgccaaactttatcataagtatgaggcggacaaggcaagcattccggcgggtaatctgattgaagtgaagttcgaggacttcgaagccgatgccatgggaatgacggagcacatctacgatgcgctgtccatacccggttttgcggatgcccgcactgccatcgagcagtatgtaggcggtaagaaaggttataagaagaataaatataaatatgacgaccgcacggtgcaactggttcaggacaactggggctttgcgctgaagcagtggaattatgaactttaactgattgtaggagaatagagaaatgattcgtaaaagacttcgaatgttgagtttgctgtccgcaatgctttgctgcgtagcagtatcggcacagcataaggttgagatgattcctttcggaaatatggatcaatggattgaccgccagattaaagaatcgggaattatcggcggtgctaccaaaaatgtatatgctatcggtcctacggcaactatccgtgaaaacaagccgtataagaatatgggcggttccccgtgggctacttccaacgtgatggcgcgtgtggcaggcatcaccaaaaccaatacttcggtatttccggagaagcggggcgacggcttctgtgcccgtatggacacccgtatggaaagcgtaaaggtgttcggcatcgtggacattacggtgctggctgccggttccatatttttgggcgatgtacacgagcccatcaaggggacgaagaatccgcagaagatactgaattcgggcatcccgttcaccaagaaacctattgccattcagtttgactataaggtgaagatgtccgaccgtgaaaaacgtgttcatgccaccggtttcagcaagataaccgatgtggaaggaaaggatttccccgaaatgaacctctttttgcagaaacgctgggaagacaaagacggaaatatctatgccaaacgcgtgggtacggtggtggtgcgttattacactacaacggacgactggcgcaacaatgccacttattccattatgtacggcgatataacgggtaaccccgaatacaaggcgcacatgatgcgcctgcaagtgcaggaacgctatgcggtgaacagtaagggcgaaagcgtgcctatcaaggaagtggcatggggaacggaagatgatatccccacacatatccagttgcagtttacgtccagccacggcggggcatatatcggttctccgggcaattcattctatgtagataatgtgaagttggtatattgatttcgttcctataccggcatgtgtaattttgcctatggcgaaaaaactgtttgatgtatatcagacgggattttcaccataggcaaaatcttttttgatacgtatgaaaaagagttcaaatataaatcgtaattttgtagcccattatgagtagaataatagctattgattacggtaaaaaacgtacgggcatagccgtcagcgacacgttgcagatgattgccaacgggcttaccactgtgcctacccatgaactgctcgcctttatcatggattacgtggcgaaagaaccggtagagcggatacttgtcggactgccgaagcagatgaataacgaagcttccgagaacatgaaacggatagagccgtttgtgcgttccttgcaaaagcggttgcccgatatgccggtagagtatgtggacgagcggtttacttcggtcttggcgcaccgcaccatgctggaagccggactgaaaaagaaagacaggcagaacaaggcactggtggacgaaatcagcgcgactattatcctgcagacttatctggagaacaggcgcttctcctctttataaatgtttggaaaataattcataattcataaattaaagaaatgattttacctgtttatgtatacggacaacccgtattgagaaaagtagcggaggacattactcccgattatccgaacctgaaagaactgattcagaatatgttcgaaaccatggaccatgccgatggcgtgggacttgcagcaccgcaaatcggtttgcctatccgtgtggtggttgtagacctggatgtgttgtcggaagattatcccgaatataaaggtttccgtaaggcatatatcaatgcgcatatcctcgaagtatcgggcgaagaagtatctatggaagaaggctgcctgagcctgccgggcattcacgaatctgtgaaaagaggcaataagatacgcgtgaagtacctggatgaggacctggtggagcatgacgagattgtggaaggctatctggcccgtgtgatgcagcatgagttcgaccatttggacggtaagatgtttatcgaccatctgtcgcccttgcgcagacagatgataaagggaaaactgaatgccatgctgaaaggtaaggcacactgtacctataaggtgaaaaccgtaaagtaagcaaaccatataataaggtataaaaggctcaaaaaatataaaaagtcttcggtatatcctgatatgtaaatgaataaacgctacttttgttttgtttacaagcatttataagacaagatgataaaaaagatattgctggcaattctgttattgcccacgttgttatatgcgcaaatcaatacggaacgggtgatgaccattgcccgcaacgcattgtatttcgaggactacgtgctttctatccaatatttcaatcaggtaatcaatgcgaagccttatttatacgagccttatttcttccgtgcgctggcaaaaatcaacctggacgattttcagggagcggaagcggattgcgatcaggctattcagcgcaatccttttgttgtaggcgcttatcagataagaggtttggcacgtatccgccaggataagttcgacggtgcggtcgaggactacaagacggctttgaagtacgacccggagaatgttgtactttggcataacctctctctttgtcatatgcagaaagaggatttcaatgctgccaaagaggatttgggcaagttgctcgccatagctccccgctatacgcgtgcgtacctgatgcgcggtgaggtcaatctcaagcagaacgatacgatacaggccttgaaggattttgataaggccattgatatggaccgttacgaccccgacggctgggccgcccgtgccattgtccgtcttcagcaatccgactacaaggaagctgaaaaggatttggaccaggcgatacacctgagcgcacgtaattcgggcaactacataaaccgggctttggcgcgtttccatcagaataacctgagaggtgcgatgagcgactatgacctggcgctggatattgaccccaataacttcctcggtcactataaccggggactgctgcgtgcacaggtaggtgacgataaccgtgcgatagaagatttcgactttgtgctgaagatggagccggacaatatgatggcaactttcaaccgtggtttgctgcgtgcacaaacgggcgattaccgcggcgctatcagcgactactccaaagtgatagaagagtatcccaacttcacggcgggttactaccatcgtgccgaggcccgcaagaagattggtgaccgcaagggagccgagcaggatgagttcaagcttatgaagatgcagctcgacaagcgcaacggcgtgacaaccggcggcaatgacaaggatgtggcggataatgcggacggcaactccggaaaggataacggcaaaacccgtaagaagtccgacaagaatatggataactaccgcaagattgtgattgcggatgattcggaagtggaacagcgttataagagcgactatcgcggccgtgtgcaagaccgtaacgtgactatcaagctcgaacctatgtatgcgctgacctattatgagaagctgagcgacgtaaaacgtaccgtgcattatcacaagtatatagacgagttgaatcactccaaactgttccccaaaccgttgcgcatcaccaatatggagtcgcctctgacagaagagcaggtacgtttccacttcgcattgatagacgcccatacatcggatattgtggcagacgaaaaaaatgccggaaagcggtttatgcgcggtttggatttctatctggtgcaggactttgcaagttccatagacgattttacacagagtatcctgctggatgatactttcttcccggcatatttcatgcgtgctttggtgcgctacaagcagttggagtacaagaaagcggaagccggcatgaacgagggtgccgtttccggtgcgcaagaagtaaagaaggcggaagtaacggcgatggattacgatattgtgaaaaatgatttggatcatgtcatccaattggcgcccgattttgtttacggttattataaccgcggcaatgtattgtcgctgctgaaagattaccgtgcggcattggcggattacgacaaggcaatcggactgaatcccgactttgccgaagcctatttcaaccgtggcctgacgcatatcttcctgggcaataacaggcagggaatttctgatttgagcaaggcaggcgaattgggtatcgtttccgcttacaatattatcaagcgttttacgaatacgcagcagtaacatttttttgctaaaaaatagaatatcaataaagaattagctatttttgcgttctaaaatttgaattatacatagcattatgataaagataacatttccagacggctccgttcgcgaatacaacgaaggagtgacaggactgcaaatagcagaaagcattagttcacgtttggcacaggatgtattggcttgtggcgtgaacggagaagtttatgatttggggcgtcctatcagtgaagacgctgaagtggttctctataaatgggaagacgaacaaggcaagcatgccttctggcacaccagcgcccatttgctggcggaagctttgcaggagttgtatccgggtatacagttcggtatcggtccggccatcgagaacggtttctattatgatgtggatccgggagagactgctatcaaggaagctgacctgcccgctatcgaaaagaaaatggcggaactggcagccaagaaagaagcggttgtcagagagagtatttcaaagacggatgccttgaagatgttcggcgatcgcggcgaaacttataaatgtgagctgatttccgaactggaagacggtcacatcactacttatacgcagggtgcgtttaccgacttgtgccgtggtcctcacctgatgactaccgcgcctatcaaggctatcaagctgacttccgttgccggtgcttactggcggggacaggaagaccgcaagatgatgacacgtatctacggtatcactttcccgaagaagaaaatgctggatgagtatctcgtattgctggaagaggccaagaagcgcgaccaccgtaaaatcggcaaggagatggacttgttcatgttctccgatacggtaggcaagggacttccgatgtggttgccgaaaggtgctgcattgcgtatccgcctgcaggagttcttgcgccgcattcaggcccgttacgactatcaggaagtaatgtgtccgcctatcggcaacaagctgctgtacatcacttccggacactatgccaagtatggtaaggactcgttccagcctattcatacgccggaagaaggtgaagagtacttcctcaaaccgatgaactgtcctcatcactgtatgatttacaagaactcaccccgttcttataaagacctacctttgcgtctggcggagttcggtacggtttgccgctacgagcagagcggtgagcttcacggcttgacccgtgtacgcagctttacgcaagacgacgcgcacatcttctgccgtcctgatcaggtgaaagatgagttcctgcgcgtaatggacattatctcaatcgtattccagtctatgcacttcgagaactttgaagcacagatttctctgcgcgacaaggtgaaccgtgagaagtatatcggtagcgatgaaaactgggagaaggcagaacaggctattatcgaggcttgtgaagaaaagggactgaaagccagagtggaatatggtgaagctgctttctacggtcctaaactggactttatggttaaggatgctatcggccgccgttggcagttgggtaccattcaggtagattacaacctgcccgaacgtttccaactggaatatacgggagccgacaaccaaaagcaccgtccggtaatgattcaccgtgctccgttcggttctatggagcgtttcgtagccgtgcttatcgaacataccgccggcaagttcccgttgtggctgactccggaccaggtggctattctgcctatcagcgagaagttcaatgattatgctcaggaagtgaaagactacctgaagagatacgatgtccgtgccattgtggatgagcgtaacgaaaaaatcggacgtaagattcgtgacaacgaaatgaagcgtattccgtacatgctgattgtcggcgagaaagaggctgaaaacagagaagtttccgtccgcaagcaaggcgaaggcgaccagggaaccatgaaatttgaagattttgctaaaaaagtgaacgaagaagttcaaaatatgataaataaatggtaactttgcgcccaattgtaaaagcatagcatacatacgatgttctaaagaccgcttttacttaacaaaaaaataatttggtagtaataaacaagaaacaaactggaagtaaacgttatttaatgaagaatgacagcttaaaagggcaacatcggattaatgagcaaatccgtgccaaagaagtccgcattgtgggcgatgaggtggaacctaaagtatatccgatagctcaggccttgaaaatggccgaggaaatggaagcagatctcgtggagatttctccgaatgcacaaccccctgtttgtcgtattattgattactctaaatttctttatcagttaaagaagcgtcagaaagagcagaaggcgaagcaggttaaggtaaatgtgaaggaaatacgtttcggtcctcagacagacgaccacgactataacttcaaactgaaacacgccaaaggctttttggaagatggcgacaaggtgaaggcatacgtgttcttcaagggtcgttcaattctgttcaaggagcagggcgaagtactgctgctgcgttttgccaatgatttggaagactatgcgaaagtagaccagatgccggttctggaaggaaagagaatgaccattcagctttctccgaagaaaggtgcagctccgaaaaagcctgccgcaccgaagccggcagaagctccgaaagcagctccggccgaagacaaaagcgaagactaaagaaatgagtaacgccgcaggtatagtgcgttgccatataattaaataatttaaaaataagtaagatgccaaagatgaagactaactccggttctaaaaagagatttactcttaccggaacaggtaaaatcaaaagaaagcacgcttttcacagtcacattctgactaagaaaaccaagaagcaaaagagaaatctgtgttactctacaaccgttgatataacgaatatgagccaggttaaggaactcttagctatgaagtaatcaaaagcgtacgaagtattattaaagttattaaccgaatgcattagctttaagtccgttgcgtgaagtaccggcgctaacattcaaaaacaagtaaaactatgccaagatcagtaaatcatgttgcttctaaagcaagaagaaagaaaattttgaaattgaccagaggttactttggtgcaagaaagaacgtttggaccgttgccaagaatacttgggaaaaaggtttgacttatgcgttccgtgaccgtaagaataagaaaagaaacttccgcgctttgtggattcaacgtatcaacgctgctgcacgtctggaaggtatgtcttattccaaactgatgggtgctctgcacaaagctggtatcgaaatcaaccgtaaggttttggctgatttagcaatgaatcatccggaagctttcaaggccattgtagctaaagcaaaagctgcataagccggggtaaaagaataaacctgcaaggcgctgattacgaatacgtaatcggcgctttttgtttttggcagtattgtggaaatgtgaaaacatcagatgcaggcaaacaattttcttgtttttcttgtttctttcgtagaaactcactacctttgaagtagaaaaaatagccgcattgattggatcgggaaactcatcaattctaatgaaataccgagacaagcttcagttctcaatggcgggccacgcccttcggggtaactcttgagtcggtggattacaaagaggacgagcactcaaatcatgtcatacggagtttcatcacatcatcggtgcggctttctataaaagaggaacggtaatcttggttgactaccgttcctttttcttttgtcgttattttacggttttgcttcttgaagatcagagagttcagtaaaaattggattggttgcagtgagggggaaaagtccaggcttttgctcgtttaactccaggtgtttactcccgaaatgcctgaagttttaggttggaatgcccggtgtttgggaagtaaattccgggagtttcgggagtataatgcagggatatttaccggtatggcacggcttcattaacggttgaaactggacataccggtagaatattatttgttatcccgcaagtcttttaccctgacggctttgccttcgctttgaggcagcgagcctttcttgaccagcttcactttaggagtgacaaggatttcatctttcagtcggcgggaaatggctttgcgtactttctccagttctatatagttgtcggtggataagtcgctgagctctacttccacaatcatttcatcttgattgctgatggtttccagagtaatgaggtagttgctgcccaattcggggaattgcaccaataccttttccacctgcatggggaagatgttgacacccttgattataaacatatcgtcgctgcggcccttgatgcggtcgatgcgcagatgcgtacgtccgcaggggcatgtatccggaagtatgcgggtaaggtcgcgtgtgcggtagcgtatcaacggcatcatttcacggtcgagggtagtcagtaccagctctccaatctcaccgtcgggaaccggttcgccggtttccggattgatgatttcaaccagatagcaatcttcccaaaggtgcatgccgttttgctcggtacactcaaaggcaacgccgggaccgttcatttcggtcatgccgaaactgttgtaggctttgacacccagtatccgctcaatcttcctgcgctgttcgttcgtatgaggttcggctccgatgacgagggttttcagagtagtcgatgccgggtcgataccttcttcctgaaatacttccgccaggcgtatggcataactgggaatggcatgcaaggcggtggctctgaagtccgtgatgaacttgatttgccgtttgctgttaccggcagcggcgggtacggtcagtgctcccaggcgctcggctccgtattggaaacctaatcctccggtgaacatgccatagccggaactgttttgaaaaacatcggtctttcgtatgcctactgcgtataggcaacgtgctacaaggttggcccaggactccagatcgtgccgggagtggacgatgacggtgggcgttcccgtggttccgctggaagagtggatgcgtacgccgtcttcgtgcatattgccggccacaagtccgaaagggtagttggcgcgcatgtccgccttggtggtaaacgggattttccggatgtcttctatcgaccggatgctgtctgccgtaatgccgtgcttttgaaaaacttgtttgtaatagggggaatttgctgcaatgccgattgtcttcctaagccgccggagttgcagtttgtgcaactcctcacgcggcatggtttctatctcttcttcccagtatttgtcattcatggttattggtattttgatttacatcaggttttctgcaatttccttaccggcaaccaaggccttgaggttcagttctacgatggcttcgcctttacgttggaagatgtcgcggatgctgtcctgtactttctggtaatcaatgccgaggaacggaatggtagctcccaacaacacgatgttggcaacgcggggagagcccacttctttggctacttcgttcacgttcagtacaatcttgtgaggaagcctgtcaagttcggctttgagagcttcttcggcaggatagtgggggatattgatgaaaggggcttcgttggttaccagccagccttcgggactgaggtagggaagatagcgcagcgcttccatgggctccagcgatatgataaggtcgcatttgcctgtagggatgaggtcggaagcgataggccggtcgctgatgcggaggttggactgtacgtctccgcctcgctggctcattccgtgtacttcggcctgtttcatgtataatccgtctttaagggctgcctgcccgattacggtagcgatagagaggatgccttgtccgcctacgccggaaagtataatgtcttttttcatggctttacttgtttcgtttcttacgtgctaaagtttgaatacattctctgcggggaataatgacggatactccgcagtattcgatttcttcgcggattatctgcctcatttcctcgtagttcttcttcaatggaactactacgcggatatgttcgggcgctacgccgatacctgcacagatagcttcgagacggccggttccggctgaatcctgtccgccggtcatggctgtggtttcgttgtcggagatgacgatggtgacgttggcgttttcgtttacgcagtccagcaggcctgtcatgccggagtgggtgaaggtggagtcgccgataacggcaaccgcaggatggactccggcatccgaggcgccttttgccattgtaatggaagctcccatgtctacgcaggagtcaatggcattgaaaggagcgttggctcctaaggtgtagcagccgatgtcgctgaataccttgtggctggggtattctgcccggagcacttcggtcagcacggtgtacatatcgcggtgtccgcaaccttcgcacaaggctggtgggcgcatttcaacgagtgagggaacagcgaattccgctttgttctctttgcctacggcgcgtgctacgctgtccggattcaattctccgtcctgcgacagtgtgccgtccaggcgtcctttgacttttacgccgatgccgaggcaacctttcagttgtttttctacaaacggttgtccgtcttccagtacgagtatttcgttgcaggcttctacaagctgcatcagttgtttcttgggaagcgggtactggccgattttcaataccggaaattcgcagccttcgggatagttctccataaggtagttataaccgatgccgcaggctatgatgcccagttttttgttgggaccgtctatgtacttgttataaggtgagttttccgaggctttgacaaaatcgtcctgatgctgcaacagaagtttgtagcgtttgcgggcgttgccggggagcaggatgaactggcgcgggtcgtcactgaaagatacctcgttctgaggctgttgcgccttgcgttctacgccggaacgggaatgtgccagccgggtgaccatacgcatcagcagcggttcgccggtttgttcggaaaaggcaaatccgttgtaaaccatgtcgtaggcttcttgctggttactcggttcgtacatcggaatcaatgcaaagtcaccgtagaaacggctgtcttgttcgttttgtgacgaatgcatgctggggtcgtcggctgcaacgacaatgatgccgcctttaacgccggtcacggcggagttgataaaacagtcggcagccacattcatgcctacatgtttcatgcagaccagtgaacgttttcctgcgaacgacattcccaaagctgcttccatggcagttttctcgttggaacaccagcggttgtggatacctttttcggcagtaatcgctgctgtctggatatattcggtaatctccgtcgaaggagtacccgggtaggcgtacacaccggataggccggcgtctaatgcagcctgtgcaatggcttcatcgccaagtaagagttgtttgctcattttttagtgtttaagtgttaatcatggttttagtaacaatcgcaaatatagctttttgcttttgttttattatgatattagttgaaaatctttctttcgtttaacgccttccaatactttctggcatttttcatgtgttcggcgtagttggctgcaaaattatgggttcctgaaaaatcttctttggcgcacatataaatgtaattgtgtctggtgtaattcaggactgcgtctatacctatgggggtgggaatgcggatagggccggggggcaggccgaggttgcggtaggtgttgtagggcgaatcgatggtgaggtgtgcattggcaatacggcgcaggctgaagtcttgcagggcaaacttgatggtagggtcggcttgtagcggcatgccggcgtggatacggttgatgtacaggccggcaatcatgggcttttcctggttgttgtttgtttcctcttcaacgatggaagcgagggtgcatacctcttcctgtgtcatgccgatggctttcgctttattgagccgttcccgattccagaacttctgatgttctttctgcatccgttcgaggaaatcctctacgctcatgttccaatatacctggtaggtttcgggtatgaaaaggcaggctattgtcgctttgctgtatcccagccgttgctggagcagagagtcatttatcactccggctatttcggcggaatcaatcatcagttgtttccctacgttacgcgccagcctgtccaaagtgcgtacgcttccgatggtcaggttcatgggggcttggtatcctctgtagaaacggttgaatacatggtaaacgttctcgccgggacgtatcgcatagcgtccggtgtggatgttgccggagtaatcgcgccattgggacatccatttgaaaccgttgaaactattgggctttccttgtgcttttatcttattgtatatggagtctgtcgtatcgtcgcggtcgatgtagatataaactgtcttttgcggatgaaattgcggagtgaacaggtagtaatacattgtacccgcacttgcaatgcctatgaaaagaataaccgccagtgctccgaaaaggattctttttttctttttttccatcataatcttgattgtttttgagtcgggcaaagttagcaagatttgggaataaagagaatgcttcccttgttttattcatgacaggaaggggggg

SEQ ID NO: 4146 - DNA, 46954 bp, Unknown
  gut microbiota DNA sequence
cgtgttttccgcgtaatccgtgcctaaacaaagaaacaaatagtaagcggattttagttttggcacacacacattctcttcggatgtttcagcacttggatttcaaatcccgattaatcgtcatcgtcgtcatcatcatcgtcatcgtcgtagtgtcgacaatgtctcttgtggtgttttttcggctttttgtatttgtgtttcttatggtggaatttgtcatggcgttcacagtatgaattatagtattcatgccagcagtcactgtggtgatggactctgttatagaaagggttataatacatacttcccggctttatgccaatctccacaaggatacggttccatccgtaacgatgataccgcttgtaatagtcgcatacatcacgcattttttttcctgaagttctggctatctcaagtgcaattcccacatttccccagtcattgccacagcgtctgtagtaatcgtctaaggaatggtttgaaatattatattccaggcataggcgctttctgtaatcagagagttccacagatgcgtagcggttagctctgccgataaagacggaaatgccatcctgggcaggcaaagcgcatgcaagcaggagaaacagcagtagcaaattaatctttttcataatgtttctaagttaaatggagttctgttccttactgtgcgaatatttggacagttttccggcaacttctattccagtttttctttggctttttcaatttcatcgccggcttcatccaaagccttctttacctcatccgctccctcttcaatctggtcctgcgcctcttcgagggcttcctcaacagattcctttacattttctacacggtctttaaccttgtctttagcctttttttctctgcacgatgcaaaggcaagtgtaattgtacatgccaacatggcgaataataattttctcatatacttacattttggtgatattgtgtaattagttaaaattcaaatgtagaaataaatattgtgtttggcaaattacgaaaatatttttgagtatcatacatgagtaaaatgccctgcttattgatacgttctacacagtggagttttttttgaactgtcggataattaaagagataagtctgctttgaaatatgtttgtgagtatataaaaagctatctgcttcagttagccactccttttgcaggtaaatgccatctgttctattatgatatgtggggaatagagggaatgagaaaaataatttttttattcgcacgacggctttaaaaagggaaaaacgctgattatttatttgacaatcagcgttttttaggagagccgctagccagacttgaactggcgacctacgcgttacgaatgcgttgctctaccaactgagctatagcggcaatgggttttcgattacgaggtgcaaaggtacatctttatttgaatttgcaaaaagaattgcctgattttttagaaatatttctgtctggcattttttctatatttgtgtatttatcggagatattatggataaaaccgtatggtaaagacgtttaactctattgggtgattggaaaagtactgtttggtataagtggagtttgtggcaaaataccggttatattgaagccaggaattaattctttttccaaaacttcaaaaggaaataaatgtatattatgaaaataatgtattacctttgtccccaattaaaaacattactagataactaaaagattaatcaaagatcttacttatgcgtaaatttatactattgtgtttgttggtatttacggtatcaagtgtggtatttgcccaacaaatgacggatgaacaagtcattctgtacgtgcaagaggctcagagtcaggggaagacacaacaggagatgttggttgaattgatgaagaaaggagtcacaaaagaacaaatccagagaatacagtctaaatattcaggcaaatcggacggaagctctgaggaaaatgccaatttcatgggagaagcaaactcccgtttacgtacgcagaaaacttacgagaacaaaaacaagaatatctctcaggatgaatccggcttggataatctcggttcccaaaagcaaagtattaaagggctgcgggcgaaatcggcccagcaacgcaatggatatggaacgggggtgaataacagtggacagccgggttatggttataatggtcctaaaagcgcggaagacgcttttacacaacagattttcggacataatattttcgataacgaatatctgacttttgaacccaatataaatgtggcaacacccgacaattatcgtttgggggcgggcgatgaagttattattgatgtttggggagcttcccagactacgattcgcgaaaaaatctcgccggagggtactgtgcaaatcgcaaagttaggaccggtttatctgagtggaaagaccgtagaggaagccaatgattatttgaaacgcgaatttgccaagatatatgccggtgttgcgggagaaactcccaatacgcaaataaatttgacgttaggcgaaatccgttccattcaggtgaatgttatgggtgaagttgtcgtaccgggtacttacaccctctcttcattcgcttcagttttccatgccttgtattgggcaggcggagtaaataaaatcggtagtcttcgaagcataaaagttatacgcgacggaaagacggttgcagatttggacatctacgattttatcatggaaggtcggctgaaggatgatatccgtcttcaggacggtgatgtgattcttgtcaatccttatcagaccttggtgcagatattgggtaaggtaaagcgtcctatgtattatgaaatgaagcctacggaaacaatcggtacgttgctgagatatgccggcggctttacgggcgatgcatataaaaaagccatccgtcttgtacgcaagagcggacgcgagcatcagattttcaatgtggacgaaatggattattcggtattccgcttggaagatggtgatatgcttacggtagattccgttctcaaccgtttcgagaatcgtgtagagattcgcggtgctgtttaccgtgagggcttgtatcagctgagcggagaggtgaatactgtgaaacagttgataaagaaagcggaaggtgtacgtggagatgctttcctaaatcgtgccgtaatcaatcgtgaacatgaggatttgacgcgcgaggttatttccatagatttgaaaggcttgttgaaaggtgtggttgcggacattcctttgcaaaagaatgatatactttatattcccagcattcaggatctgaaagaagagcctacggtgactatccatggtgaggttgctgatccgggtacttatctttatgccgacaagatgaccatcgaggatttggtcttggaatcgggtggcttgcttgaagcggcttctacaacgaaaatagatgtatcgcgccgtattaaatctcccaaaagcacggacgacagtaatattgtaggccagacatttacctttgacctgaaagacggcttgctgataggagcggggagcgagaatttttatttggagccttttgatgaagtgtatgtccgtaaaagccctgcttatcgcaagcagaaaaatgtggggataataggagaggcattgtttaccggtacttacgcgttgtccaagaagaatgaacgtttgagcgacctggtcgctaaagccggtggtgttacatccgatgcttatgtaagaggagcccgtcttatccgtaaaatgtcggaggaagagcttcgcagaaaggaagatgccacccgcatggctataaaggtcggtgcagattcaactactttatatgtatatacggtaggtattcatctggatgaggctttgaaaaatccgggttctgattatgatatggtgttgcgcgagggggatgtattgtttattcctgaatatgtaagcacagtgaaaatcaacggtgccgtgatgtatcctaatgccgtactgtacaaagagggagagaacagccgttactacatcaatcaggcgggcggatatgcttcgaatgccaagaagcgcagtgcttttgtggtttatatgaatggtactgtatcccgcatacgctccggtagtaagacggcaatcgagcccgggtgtgagattatcatcccgactaaggatccgagtaagcgtatgagcgtggccgaaatggtaggtatgggtacttctattgccactttaggcacaatgattgctactttggttaatctctttaagtgataaggacaatggacgaaagtaaaatacaaaaggctccgcaaaaactggaggaacaggaaatagatttgattgagttggctcagaaagtgtgggccgatcgtaaaatgctttataaggtatgcggtattgcggcagtgattggcttgattgtaggattcagcattcctaaagagtattctacggaagtgacattggctcccgaaagtgcaagtaaagtgaatgccgggagtatgggggcattggctgctatggctggcatcaacttagggggttctgtcggagaagatgccctgtcgcccgaactgtatcccgatatcgttaagtcaactccttttctgctggagttgtttgatgtaagggtcaaagaccagaaaggcaaaatagatacgaccttatatgcttatctggataaataccagcgttcgtcatggatgggtgctgtaatgtctgcgccattcaaggctttgggttggaccttgtctttattcaaggataaaccggagaagaaggaaggaaaaatcgatccgttccacctgacattggatgaggcgaaggtggcggatgctttgagtaagcgtatcttggttacgattgataaaaaaacaggggttacaactttggaggttactatgcaggaccctttgatttcggcttcgttaactgataccgtgatgcattgtttgcagaattatatcacaaattaccgtaccaataaagcccgtcatgatttagcttttacagagaaattatataaagaagcaaaggcggattatgagaaagctcagaaaaaatatgctacttttgcagatgccaaccagaatgtggttctgttaagctatcgtgccgagcaggaacgtttaaaaaacgaagttgagctggcttatactgtttatacccaggtttccggacaattgcagatggcaagagccaaagtgcaggagattactccggtatatacggttgtgcaaccggctacggttcctttgcgtgccgccaagccgaataagattatgattcttataggttttgtattcttggcaggagtgggatgtgttggctggatattatttgtgaaggatttatttaaagattggagaaaagcaaacaaagcaatatgatggctaataatgatatgagtcgttggtgtgttctgtatacggcgccaaagtcggagcgtaaattagtgcagcgcctgcatgcagcaggatatatggcattttgtcctatgcaaatcgtattcaagaagtggaaaggacagaccaaagaagtgtttgcacctctgttccccgactgtgtttttgtagaagaagcggcgggtgtggagctttttattgcttcgcagggtggtgtatctttcttactggacgctgagggtcagaagctgtttgtttgcgccgataaagcagagttgccggcaaagtttgtgcatttgttgaaatagaggacattttcttcccggcataaaaaaagctacattccaaatgtagctttttttatgccgggaagcattgttttttaatcaaacaaactcttgaacttcttgaaaatcttctccttgatagaagtattcggcttgaagttatccgacctttccatttcttccagcgcttttttctcttccttgttcagtgtttcgggcacatatacgctgacattcaccagcaggtctccggttccgtatccgtttacgttaggcagtcctttgccgcgcaggcggagaaccttacccggctgtgtacccgattcgatttttaccttaaccttgccgtcaatggtgggtatttctaccgcaccgcccaatgcggctgtcggaaaactgagcaacaggttgtaaatcaaatcattctcatcgcgaatcagttccttgtcctgctcttcctctatgagaatcagcaggtcgcccggtacgccgttgtgtttgcccgcattgcctttgccgctcatggagagctgcatgccttcggctacaccggcaggaattttcacggtaacgacttcttcgccgtaaacgataccttcgcctgcacattccttacatttattcttgatgaccttgccttcgccaccacaggtaggacaagtggtacgcgtctgcattgtgccgaggatggtctgctggttgcggattaccgtaccgctgcccttacaggtagggcaggtttccgcaccgccgtctccttctgcaccggttccatggcaatggctgcacggtacatattttttcagtttgaatttcttttcgactccggtagaaatttccttgaggttcagctttacctttacgcgcaagtccgaaccgcgataacggcgttgttgtgcaccaccgccgccaaatccgccgaacccgctgaaaccgccgccgaacccaccgctgtgtccgccgaatatatcaccgaacatggagaagatatcatccatggacatgccgccactgaaaccgccgaacggtccgccgttaccggcggcaccacccattccggcatggccgaattggtcgtaacgggcacgcttgtccggattgcttaatacatcgtatgcttccgccgcttccttaaacttctcctcggctaccttgtcgccggggtttttgtcggggtgatattggatggctttcttgcgataggctttctttatctcttctaccgatgctgttttttcgacttccagtacttcgtaataatctcttttttccatataactgtgtatgttattctccaaccactactttggcatggcggattactttgtcgtttagcgtgtaaccggtttgtacgcagtccagaattttacctttcaaagcttcgtcaggagccgggattacggcaatggcttcgtggtagtctgtgtcaagcggctgttctttggtttcgattactttgacaccgttctgacccaatactgtcataaacttgttgtagataagctccacaccttcttttacggcagctacatcggtggcggtctccatgtttttcagggcgcgttcaaagtcgtccatgataggaagaatgctactgatgctcttttctccgccgttcaggatgagttcggccttttctttcatcgtacgtttacggtagttgtcgaactcggcagagagacgcaggtacttgtctttctggtcttcaatctcagcgttggccttttgcagttcctgagtgagtttttcttcctctgtcagggcaacttcttcttctttctctgttgtttcttcacaagtttcgtcttgagcgtcttgtgcttttaactcttcttcgttgatgttttctttttctttagagtccatattgttatgcttgttattcttgtaaaatgattttgctttcattgttgttaagggtttaagttaatatgatacggttttaatagcaaaaactttgccaaattgacggcttttgccaaaaacgctgcaaaggtaatatttttatgtcagattgacagcgtaatgtgctataaatagagcgctaaccttgtgcggacagtaagttaactcgataggttgcagtctgttacctttgttgtatgtatcgggttaacttcatatcatgcaataagttaactcgttgtaagctgttttaccgtattatttcgtatctttgtacccgcaatttgcagagttataggtattaaattgtaagtagtacataataaaacagtaaatataaagatgattacagtctcgaacgtatcggttcaatttggtaaaagagtgttgtttaatgatgtaaacctgaagtttacaagtggtaattgttatggtataatcggtgccaacggtgccggaaagtctactttcctgcgtactatttcgggcgatttggacccgacaacggggtctatcatgctgggaccgggcgagcgcctgtccgtattgagccaggaccacttcaagtgggatgcttatacggtgatggataccgtgatgatggggcacaccgtgctgtgggacattatgaaacagcgcgaagaactctatgccaaagaggacttcacggacgaagacggtctgaaggtatccgaactggaagagaaattcgccgaactcgacggttggaatgcagaaagcgatgctgccgccttattgagcggactgggcatcaaggaagacaagcattatgtgctgatgggcgagctgaacaacaaggaaaaagtacgtgtcatgctggcgcaggctttgtatggcaatccggataacctgctgctggacgagcctaccaatgacttggacatggaaaccgtaacctggctggaggactatcttgccaattttgaacataccgttctggtagtgagccacgaccgtcacttcctcgactccgtttgtacgcataccgtggacatcgactacggaaagattaacctctttgccggaaactacagcttctggtacgagtccagccagcttgctctccgtcagcagcagaaccagaaggctaaagccgaggagaagaagaaagaactggaagagtttatccgccgtttcagcgccaatgtggcgaagagcaagcagactaccagccgtaagaagatgctggagaagctgaatgtggaagaaatcaaaccgtcgtcacgtaagtatccgggcatcatcttcactcccgaacgcgaaccgggcaatcagattcttgaagtagccggactgacgaaaacgctggaagacggtacggtgctgttccgtgatgtgaacttcaatgtagagaaaggggataaaatcgtgttcctttcacacgatccgcgtgccatgaccgctttgttcgagattatcaacggaaatatgaagccggatgcgggaactttcaactggggtgttacgattaccaccgcttatctgccgttggacaacaccgctttctttaatacggatttgaatctggttgactggttgagccagtttggcgagggcaatgaggtatatatgaagagtttcctcggccgtatgcttttctccggcgaagaggtgctgaagaaagcaagcgtactgtcgggtggcgagaagatgcgttgcatgattgcgcgtatgcagttgcgtaatgccaactgtctcattctggatacgccgaccaaccaccttgacttggaatccattcaggcattcaacaataacctgaagacctataagggaaacatcctgttctcgtctcacgaccacgagttcatccagacagtggcaaaccgtatcatcgagctgaccccgaacggcatcatcgacaagatgatggagtatgatgaatacatcacttccgaccacatcaaggaactgagaacaaaaatgtacaataaataggggttagtggttagcgattagtgattaatggtgtgtcaaaacaaaaaggtgattatggtaatattatcttatttgttggttttttaggcacggattgacggatttactttattttggggtaatattatcaaaacagttggtatattaccccttattctttttccgtgaaatccgtaaaatccatgaaatgcgtatagtccgtgtaatccatgcctaaaagaaattatcaaaccacatcccactctcatcaccaacccttaacccctaatcgttaatcgctaatcgttaacccctaatcgctaatcactaatcgttaatcgctaattttaaaatcactcctgttcccactatcatcagcaccgtacaaagtacggagccttcaaagccgaaagcgccaccgtttatcagattggcttcgggcagccgaagggccagcaagccgttacagaatttatttccactgacctcatagcctaataccgggccttgtatccagttccagaaccagtgtagagctatcgggaagcagaggttgcgtgtgtatatataggatgaacctaaaaggatgcctgccagaagtatgttgataaaagacagaaagtcgaagttcggattgcctatatgaatcaaggagaacagggcggcggagaggaacaaggcacaaaacttattcaccccgctttgcagcaggcgttccaatacaaatccccgcaatgccagttcctctgttacggctaccagcaggaagaatacaaggctgatcagtaaggaagaaggattgaatgccactcctgcaatctctaccgcacctgcccacaaggatatgccaaaccctaccgcataaagaacggttgccagcagtattcccgacagccagtccttccaacgcatcgttaaagagcgtccgagcccttccagtgaaaagccgcgtaaatgccatactatccatgcggaaaggaatacgcctgccagcatcagcgtctcgctcaatatgaaataggacatcgtatcggcttcttcctttcctaacttcagcaatacggttgcgaaagggacgcttattattgtaatgatgatgacggcaagcgcggcgaatgaaacaatgtcgattgccgcttttccaaaacgtttggctttggattcatttccgatggtttccatgagaaaaataagttcggttaattaatatccgacaaaaatagcaataaaaagagaaatcattattcacggttggcgctttcttcttatatttgaaaattaaatcaatctgacacaaaacatgaacctgaaaaagatacttttagtagccggactgggcattatgatatcgaacgtcttcgcccagacttccaggagatataccgttgccaaacccggtactttggtggaaatgctcaccgaagaagaagcgaacgagattacccaccttgtcctgcaaggcaagctgaacgcagtggatttccgccacctgcgcgatgaattcaagaaattgcaaatactggacatctccaatgcatccatcagcatgtatgccggaaagaacggtacgcatcccgaccgcttttacatctatcccgccaattgcatcccgtcctatgctttctgcaagcagcttggcgacagcacttttgccggaaaaacatccttgacggaggtaatcctttccgacaagaccaagaacatcgaagacggcgcattcaagggatgtaccaacctgaagatttgccgcatacgcaagaaaactccccccaacctgttgcccgaagccctggcggacagtgtaacggcgatattcgtccctctgggtagcagcgattcctatcgtcgcggcaagcggtgggagacattcgctttcatagagggcgaaccggtaggagctttggtgcagatagccaccatgggtagccttgccagcgaactgcttcgtgcgggtatacagcccaaagatgtgaacttccttacggtagaaggtaagatggacgaggcggactttacgttgatacgcaactacatgcccaatctggtgagcgtggatttgtccaagtgcaatgccacaactatccccgaatacacgtttacccaaaagaaatacctgctcaatatcaaactgccccatggcttgaagagcatcggccagcgtgcgttcagcggatgcggacggttgtgcggcacgttggagcttccttccggcgtaactgccatagagtacggtgcattcatgggatgcgacaatcttcgtcatgtcctcgccaccggcgataagattacaactttgggcgataaccttttcggcaatgacaaggacaagctgatatatagggattaggggttagtgattagggattagtgattagggattagtgccttgcggtgtgagtgcgcagcctgctaatcactaatcgctaatcactaatcactaacccctaatcgctaaccgctaaccccaatcatcgtcagttgtatacgtttccgttcggtatctacgctgagcacctttacgcgtacctgctgatggatggatacaatctcattagggtttgatacatacttctgcgcaagctgggagaggtgtatcaagccgttttccttgatacctatatcgacgaaagcgccgaagttggtgatattccccacgatgcccggcagctccatgcctatgcgcaaatcatcgattgtacgcacgttcttatcgaattcgaacaccttgataggcccgcgcgggtcacgccccggcttctccagctcttgcaggatatccttcaaggtcggcattccgacggtgggagagaggtagcgttccggctgtatcttccggcgcagttccttgttggcaatcagttcggccacgctgcatcccaggtcctttgccatctgctccacgatgtggtaactttcgggatgcaccgccgtgttgtccagtggattctcggcatccggtatgcgcaggaagccggcacattgctcaaaagcctttgcgcccatgcgcggaactttcatcagctccttgcgcgatgcgaatgctccgttctcggcgcggtagttcacgatgttctgcgccagttgagggccaagtcccgatatatacgtcagcagatggctgcttgccgtattcaggtttacgccgaccaggtttacacagttctccacagtctggtcgagggatttcttcagcttgctttggtctacgtcgtgctggtattgccccacaccgatggacttcgggtctatcttgacaagctccgccagcgggtccataagccggcgggcgatggatacggcgccgcgcaccgttacatcatattccggaaactcatccctggctatcttggaagcggagtagatggatgcaccctgctcgctgacaatgaaaatctgcacttcccggttgaacgtctgccgtttcaggaaatcttccgtctcgcggctggcagtgccgttgcccacggcgatggcttccaccttataggcctctatcatcttctgcagtttggcaaacgcctctttgctttggttcaccggcggatgcgggtagatattctcgttgtgcagcaggttgccctgcgcatccaggcacaccaccttacagccggtgcggaatccggggtctattcccatcacccttttctgccccaggggcgatgccagcagcaactgccgcaggttttccgcaaagacgcggatggcttcatcgtcggcacgctccttgctttgcgcggcaaactcggtctcgatggacggtttcaacagacgcttgtaggcatcctgcacggcttccgctacctgcttcccgcaggcgttgttactttgtacaaactgccgttccagccgttccacacactcttcgtcgttggggctgatactcactttgagcagaccttccgcttcggcgcggcggatggcaagcaggcggtgcgagctgcatcgcttcaggggttccgaacagtcgaagtaatcccggtatttggcgccttcctcctctttgccttttatcactttggcggtcagcagggcttggcgtgcaaaggtattccgcagcatgttgcgggcgcgttcgttctcgctcacctgttcggctatgatgtcgcgtgcgcctttcagggcatcgtccgcatcctttacatcgccttttacgaaggcggcggcacgctgttcgggatgaggctcgcgctggagcatcagcagggtggcaagcggttcgagtcctttctggcgggcggcttccgcacgggttttccgtttgggcttgtagggcaggtagatgtcttcgagggcggtgctgtcccacgtgtcgtcaatgcgcttttgcagttccggggtcattttcccctgttcgcggatggtggcgacgatggtctccttccgtttcgccgtttccttcagtttttcgtaatgggtacggatggattctatctgcacttcgtccagtccgcccgtcatttccttgcggtagcggctgatgaacgggatggttgctccgtcgtcgagcagggagagtgtctgcccgatttgtttttccgatatgccgagaatggcagctatcatgctgtgaaagatttgtgtcatgtcagcttctttttttgataatgagcgccaaaagtacgaaaaacaatctttccctaccgcctttttgtgagttttattatatctttgcgctgtttacacatggtatttatacattaacagaacaacgaaatgaaaagactgacctgctgtcttgcgtggatgttcctgctgattggagcagttgctgcgcaggataaagaagtaaaactgaaaatagtacagaccagtgatatccacggtaatttctatccccacgatttcatccttcagcgggaggccgccggaagcctggcacgcgtgcacgcattcgtgcagaaagcgcgcgaaacctataaagacaacctgattctgctggacaacggcgacatcctgcaaggccagcccaccgcctattactataactacatcgacacggtatcgctccacgtaaccgccgatatgctgaacttcatgggctatgatgccgccaatatgggcaaccacgatgtagagacgggacgtgccgttttcgaccgttgggcaggcgactgccgtgctccggtgttgggtgccaacatcatcgataccgctacgggcgaaccccacttccggccctacaaggtgctggagcgcgacggagtgaagattgccgttctcggcatgataacgcccgccattccggtgtggctctccgagaatctgtggcgggggcttcgttttgacgacatggaagagaccgcccgcaagtggatgaagataatccgcgaaaaggagcgtcccgatattgtaatcggtatgttccatgccgggcaggacgccttgctgatgggtggcaaataccgggagaatgcctcgctggacgtagcccgcaatgttccgggcttcgacatcgtgcttatgggccacgaccacgcccgcgaatgcaagaaggtgcagaacgtggcaggcgactccgtactggtgatggaccccgccagcaacggcattgtggtgagcgacatcgacattaccgtgaccctgcgcaacggtaaggttacggacaagcagattgacggcgtgctcaccgaaaccgccccctacggcatcagcggtgaattcatgaaacgtttctcgccgcagtacgccaccattcaggatttcgtatcgaaaagaatcggacgcttcacgaagacggtctccacccgtcccgcctatttcggttcttccgccttcatcgacctcatccataccttgcagctggacatcagtggcgccgagatttcattggcggctcccttgtcctacgacacgcagattaaggaaggggatatttacgtgtacgacatgttcaacctctacaagtacgagaacatgctctacaccatgaaactttcgggcaaggaagtgcacgatgccctggaaatgtcctacgacctatggaccaaccgcatgacttcgcccgacgaccacatcctgctgctccgcgaccaaccccgcgagggcgctgcggacagggctgccttcaagaacttcagtttcaatttcgattccgccgcgggcatcatctacacggtagacgtcacgaagccgtgcggcagtaaggtaaccatcctcagcatggcagacggcaccccgtttcacatggacaagatgtacacggtagccctgaactcctatcgcggcaacggcggcggggaactgctgacgaaaggcgcgggcatctcccaggacgagttgaaggaacgcatcatcagctctaccgacaaggatttgcgctattacctgatgcagtacatcgagcagaagaaggtaatcgagccgcgtgcgctcggccagtggaaattcattccggaggagtgggctgttcccgcttccaagcgcgattatgaatttctgtttggtacaaaccgaaattagtattacctttgccgtccctaactcaagaaacaaaccgtaagacgtgagaggaataaaaagaaccatatgcgcattatgcttgctggcgctcttcgtggcgtaccaggcaagcataacggcgtttacccacgtccactacgtcaacggggtgctgataacccactcgcaccctttccataaccagcattcgcactccaccgactcgctgattgtcatcggcctgctgtcgcacttcagttcggacacgccggactgttgcgagctgcaacacccgatgcgctctctgttgcaggtgatggaaagcgaaaccgatacgcccgtcataaagggaaaagcgtgtcggatgccctctctccgcgctcccccttattccgttaccctttgatagtgttgtaccaacgcctggtatgctccataccaacgttgggtattcgttgtaccgatgcttggtattcgatgtaccaatctttggtactcgccgtaccaatgtttggtatccgtcgtacctgcctttggtacttgccgtaccaagtaccggtacagaattggtatcattaagtaactgaaataaaagcgattattcaaatgaaacaaattatattggcgttgatgcttgctgtggcaggtatcggtgcagccgttgccgcaaaccctatcagggaaggcaacatgatttccggccatgttcttgtaaaaggttcggaagagaatataccgtatgccaccgttttgattgtaggcagcggacagggaacagtgtccaatgaagaaggtcagttcgagttcaagaacctgccgacgggcaaatatacgttgcgcgtatccgccgtaggctataagacacaggaaaaggcgattgaagtaaacaaggactttacggcggtggtgcatttccagatggaagaggaaagcttcatgaccgatgaggttgtggtgtccgccaaccgcaacgaggtgagccgcaaggccgctcccgtggtggtgaacgtaatgagcgccaagctctttgagatggtgaactccaccgaccttgccaagacgctcaactaccagtcgggcctgcgggtagagaacaactgccagaactgcggtttcccccaggtgcgtatcaacggtctggaaggtccgtactcgcaaatcctgataaacagccgtcccgtcatcagtgcgctgagcggggtatatgggctggagcagataccggtgaacatgatcgagagggtagaggtggtacgcggcggcggttcggcgctgttcggcgccaatgctgtgggcggaactatcaatatcatcaccaaagaccccattaacaactccttccaggtgtcgagcatgttctccaacatggacggcaagtcctgggagcagtacatgggtgggaacgtatccctggtggccaaagacaactcctacggcatcgccctctacgaaagctaccgcaaccgcaatccgtacgaccgtgacggcgacggtttctccgaactgggcaagctgaacatgaacaccttcggcttccgcgcctactaccgtcccacgcatttcagccgcatcaacctggagtatcacaccaccaacgagttccgccgcggcggcaacaagttcgatcttcagccccacgaggcggacatcaccgagcagaccaagcacatcattaacagcggcggactgagttacgacctcttctggcgcgagtataaacataaaatctccttgtacggctccatccagcacaccgaccgcaacagctactacggcgcacagaaggacatgaacgcctacggcaagacggacgacctgacgtgggtggcaggcggcatgtacgtgggcaacatgaataactgtcttttcgcccccgccaccttcacgggcggactggagtatcagaacaactccctgcacgatgtcatgacgggctatcaccgcgatatgcagcaggatgtgcgcatcgccagcgccttcgtgcagaacgagtggaagatgaacgtactgaccatgctcgtcggcgcccgtttggacaagcacaacctgatagacaaactgatattcagtccccgtgtcaacctgctttataagcctaccgaggacttccaggcgcgcctgacgtactccaccggtttccgcgccccgcaggcctacgatgaagacctgcacgtcaccgcagtaggcggcgaaggcgtgcaaatcaagctggcggacaacctgcgcgaggagcgttccaacagttacagcggctcggtggactggaccgcccacctgggacactggcaggcaaacatccttgtagagggtttctataccgacctgcgccacgtattcgtgctcgaggacatcggtaaaaacgatgtgggcgatgtaatcaaggaacgccgcaacggcaacggcgcccgcgtgtacggcgccaacctcgacgccaagattgcccacggcaaggaagcgcagctccagttgggctttaccgcgcagcgcagccgctacacccgtgaggaagtctggacacaggtggacggcaaggatctgaccaccaagcgcatgccccgcacgcccgactattacggctacttcaccttctcgtccgctccgctgaagaatttcgacttctccctctccggcacgtatacgggcaagatgattgtaccgcactatgccgggtacatcgcggaagaccgcatggagaccacgccccagttcttcgacctcaacctgaagctgaactataccttcgtgctgcacgaccacatcaagttccaactgaacaccggtgtgcagaatatattcaacagcttccagaaagacttggataagggcgagttccgcgatgccggttatttctacggtcccacgcagccgcgtacgttcttcatcggctttaaaataatgaattaggataacattcacgatttttaaaccaataattccgtgaataatcctatatttgccggcaaagcgcatgaataatgaatacaaaacagatacgcaacgttgatatctccggtatacaacacctgcccatgattgactttatcggcaatgatttcgctattttcgatgatataagggacatccctttcacgccatatccaacgcgtctgaacgctgcctgctttgccgtctgccggaaaggctggtgcaagctgaatatcaacttgcgggattatgaaatgcgtgaagggatgctttgcatcatcctgcccgagcagattgtgcagcagggcgagcgttccgatgatttttcaggcagcttcatagccgtgtcccgcgacttcatggacctggtgatacccacgatgcagcaactgtttcccatgttcttcatgataaaggagcggccttgcatcgctgtcactgccaacgagttgcaggcgttcgaggaatatcactctttcctgtggagtaaggtgaagctgaaggacaatccctaccgcaaggagattacgcagggattgttgatggcgctgtgctacgagatatacgacatctatcagggacatgccgtgaaggagcgcactcccaaaagccgcaaggaagatttgttcgaacgcttcatccggtacgtgtacgagttttacaaagaggagaggagcgtgtccttttacgccgacaagatgttccttacgcccaagcacctctctaccgtggtgaaagaggtgagcggaaagacggcgggcgattggattgacagcctcgtgattctggaagcgaaagccatgctgaaatcctccgagcagagcattcaggagatagccgacgagctgcactttgccaatcagtctttcttcggcaaatacttcaagcatcacaccggcttttcgcccaaggaataccggaaacagtaatatccggcaacctcccggttccggcaggcaaataaaaaaccggacagctacggcaggaatcttttcctgtgctccgtgtgctgcccggtatttttttagtgtaccctaaaaaactaacctttctctttcaaaaactaatttactctatcgttttctaaatgacgttgcaaatttaaagagttattttaaggtactgtttgatatatatcaaaaaaggattatttcctgaaccggctccagaaaccgcctctcttttgttgcggagttttatcggtatcgcgatacagctcctcatacgtcagcttctcctgaaccatgcggtagatgtctccccagtcgggcaggccgcccaggttgcggtcgtcaatgaagaggtccgctttcaccttgcgcgagaagccgtgatgggcggcatcctcttcgggatagtcccggttgacggcataaaactccacgccccgttccctgcaccattccacggcctcgtccagcagctttccttcacgtacggtccacagtatcaggcggtggcggtctttaatcagcatcttcagcgtatcggtggcaaaagggatttcattccctattttagggtagcggtgctctacgattgtgccgtcaaaatcaatggcgatagtcatgatgcttatgtattgctttaaaaacggtaacttgttcctatggaagctcctaagacaaacgtatattctccgcttgtgtaggtacgtgccgaaggagtaatcttgccgttataacctctcagatactcttccgcaaagatgctccagcggtcgttcagcttgaagctctgttgcagaccgccctggatgccgaaataattcttgtcttccatttcgtggtgcgtatagacaataccggcaaaggcgttgaggtcgaatatgcggttttcgctataattgcctatcatgttggtaaggttcagcatgtagtcggcggtgacagacagcggatacacacccccgtgctgataagcataccgcccaatctcgatgcttcctcttacggcagacagcggcgtgtactggcgtcccacacccaggcttatctgttgtcccagcatatcgggaatatccttcatcttcacacctgcggtgcgcatggggaagttggttcccacggtggcatacgcaaagttataaggctggaagaagccgcgtttggcatcgaagtcggcctttcttctacggtactgcacaccgaacatcacgcctacattctgcatgtgtctgtcctgtgtgatgccgctcttgaacggttgcgtatagaagctcttgctgtatcgcgcctcacccgtgataccgatttggtctgacaggaaatataccagttgcatagaccccgtaggaccgtggaatgtacggagcttcttggcatagtcgctgcttctgtgcgccagtgctccgaattcgtagccggcggaaaggttcacttccagtctcgggtcttccacactcggcgaaatcagtgtattcaggttcaccagcacttccgctctgccgcctccatacacttcctcgctcttgaagttgtccgaattgaacgtatagtggaaaccgccgaagccgctgatgcgccatcccagcggcatgaaccatttacctatcgccagtgaagcggcaggacccaacggttgcagcgccggcagattgttgcgcacgggctttccgaaatcgccctgcgtaccgatagccgcttctatgaacatattatcgcccatatcttccgatttcatcctgatggggagaccggtaaagcggtaggtcagtccggtgtacacgccatatcccacgtcataccgtttggggcagtccgcaccgtctattccgtcggtatagagatatagtttgggttccacataccagtcccagtttcccgacagatgatagcgtgcctgcaagccgccgtgcactccgccggctattttggcatccataccgtcgcgcttgctcacataaccgcctatacccaatacggtatacaggctgatgtgtgcgccgcttttgtacccgccgatataatcggacaggttgaacaggtggtccagctcgatgccaccttgtttcagctcatcgttgaagccgcccagcagagacacccggtaggagttgaatgaacttacatccttagtcagggcaataccgccgttgaaccatgccggcagtgaagaactgcccctcagtttgttcacaccgcccattaccgacagggagaaattcttgcccggctggctgttgttcacttctcttccctgcgggatataccgtttctgcaatacatagtccattgcattgaaaggtctttcggtgctgtccttcttcaggctgtcgtcctgcgcatggagcatttccggcattgccgtacatgtgcagatgcacagtgccggaatcatatatttcaatttcattttcaatccttattatggttataggttagacatatccatagctgcctgtatgatatcctcgttaaattcaccatcgttctgtgcggtagccacgaagctcttgtcgcgtttgaaacattcggacagggcaatcaccgtattcatgaactctatctcaccctctctggcagacaaggtggctttgaaataccaggtcagtgcgctgtcctgcggcagtttggcaagcgaagccttggcggcggcgttgccggcgcggttatccagcgccatgtacatcaccacttcgttctggggcgatgaagccttgatggtttcaaaagtcttgtgtgcacgttctttctcttccggagtcgttccgccctggaagtagccgcccaaagcccatgtataggctttcagcaggtcgaatttgctgtcctccggcagaatcttcaccaatacgctggcgtgctcgaagtctcccttcttgatgtacatgcacagttggttggtcaccacttccagtcggttcacgatttccgtacggcttccgtcggcattcatgcgcgaatagtcggtggagtggatgctcaggtctatcagcggttccagtatggaagtatccacggtatccctctccaggtaagaagccgccaggttgttgccggcaagcgcccacggatgcttttgttccagtgattcctcgtaggcacggcggtacagagcttccagttccttttcatcggttatcagttggaacagcttccagtactcataacgtgtgtagctgcctttcagccctttttccctgtattgtgccatgacttcctcgtcattcggttcgcggtatatctcgtagaggcagttatagttcaccacgcggagctcgtccagataaggcacgatgacggtagagtaccagtcgagttgtttcagcgctctgccctgcgctccgatatccttatgctttgccagaatttctttcaccttgccggcttccgtgcttttaccgtcgcgttccagcagtttcaccacttcttcccacggagccacttcggcatgcgggttgcggtaaacgcgttccagggtatattggggcaatatggaggtaatctcctgttcaatcttgcgcatacgtctttcggcaaggctcaggttactgctgtaatgcccgtccggagaagccgtacctgccacgtgaaactccttcaataccgtacccggagattcggctatctctttcagcttgtttctcagcatggtaaggctttgtttgttttcaggcgtgtccgtcagttggtcggagttgatgaggaaagacagttgtatcttgtccgatgtatttcttttttctatctgcgccctttccttgtgctgcaacggatccatctgctccgagaagaggttgtattgcaggaacttcatcgggcgtttggtctggcacgtattgatttggtacgttctggagttcgatgcgctgtaatcttccaggttcacgatggcaaagcaactgtagttccggttggggtcgggcacgatgatggtatccgtccagtccaggttcatggcccttgtagtcagcgcctccgctttgatgtacggacgcagcgggtcgcggtccatgtcatagcccattttgcgttcctgcgtcagggcatattccttgccgtcgtatacggacgggcgtgcaaaggttaccgtatcgttcgtttcgcagtccagtacgtacggctgtataatcagtcgcgagaagcggttgccgaagtaaggaggcagtttgaaggtattgtacggaatcagcatgtttccgatcatcttcggcgctttcggttccggtttcagaaccagccgcatggcggttacggtcacactctccagcatcactccctcgtcgatgctcacatctattttcatctgatgtctcacttccttcaataccgagggcgagagtcccactttgaaaatcagcgcaccgttgtccggaaccagtatttcataatacccgttctcgtcggtggttgttttcccttcctggtccagcagcaatgttttttcctggtcgttgctgtccagtatcttcttcatgtcctcgcccacggctacggtcttggcggcatacacatccaccgtcacgtccgagaaaggcactttccggttttcggcaatgttatatacggtacccgataccttcaccattttctgcgccagggcagtgccggtaccgcatcccgccacaaccagaagcaggatccatattttcaatctttcagtaatcattctccgtattatttaaaaatgtaagtacacgaaattcccagtcccatgggcatcaccttgtgtccggtggtgttgtagtctcccggtgcgggcaatcccttctcgtagcgtttctccctgtaccacatcagtgatattccggcgctgaattctatgttgaagcgtttgcccagcggcagtacatatccgtacaccattcccgggcctacggcatcgccgaagtggtgtgtatccgagaatgtggcgttatacctcatgccctgtatgcccaggcctatgaagctctgcaccattgcccgtccgctcacccagtatctcacttgcgcttccgcacctttgatgctgcaatccagcgggttctggtcaaggctgtagaaagctcccgccataacgctggtccggttcgatgtcaccagttccagcgagaagttcggagtcaggtttccccaaagcagtgcgtttgttcttccggcaatgagctgtgcctgcgcattacttgccgtgcatgccagtacagctatcactatcagcctcgcccatatacttttctttttacaatcttttgtcatacgaatctcttatttttgtctttgactgtacttgtttctgatagagctgaagcggtacacgaatcctacgcgtatatcgctcactacggggtagggcaggaaatgcctgtctctgctctttgtacgtatcaggtggttatcttcatatttatatttgtcatattcggcataggctgctcccacgctcagacccagatccaggtctattgcgccctgtttgcatttgtatacgggcagctgccatccgccggtcagtccggcatggaacatatcgccggcgatgcctttgctccatgctccggcaaacttgctgtatccggcatagaagccccagtagtaggtacgccagaatttgggaatcttggactgtcccgtctttacggtaaaggaaggtttggcatatcttttcacttccagtctgtaatcgttgattttcatctgtatgcgttcgttcatactgattttggcattgccgttccatttggcgcctatgcccactacccaccggttgtcggtagaacttgaaaggtcaaattccactttggcattcggcaacagcaacagccagtccattgcattggtttcaaacgcccaccgttctttgggcgaaatcttttcggaggttttctgttgggcgtacgctcggacgcttatcgcgcccagcatagccagaaacagaaacagtacctttgtcctatttgtcatcagttgtcaatgtttagttctatattctgtatatcagaagttgtaggtcagtccggcagtcagtgcggctgcaccttcccctttctttccgctggcgcatccgtccagcttgtcccctacgagattaccttttagctcgatattgatgtccaaatgttccgataccttaaagcggttcagcacacctacggtaagcactcctgtggtggtattcagtccgggggcattggccacaccgccgcccaccagcggaatgaggctgtatgtacgttcttcgttcacaccgcaccaccagttcagcacgtccaccatgatgtcggcatgatacatcatgaaattccacgattcgctgcttccgttcatggcttcgcccgaagcgtgcattccgcttatctgcaatctggcacctaatacgggggtaatccatttaccgccgcttacgtcgcccgtaatggaaatgcggtttccgaatttcgtgtgcatgtcataatcgcctacgtatactccggctcctaccgaaccgcttacaaaccatttctcattggccggataggcctccattttgccttgtgcggcaacggtagtccctgccgaagcaagaactaccgctgccaatatccaaggtcttagactaaaaaaatgtttcattatttcaaagtagttattaattacttcaattgtataaaataaaagaataatatgtttatatgaagtgttgttctttgtagagcatgctacgctattgcctgtcacattggaaattacgtggaacaggtaaaatggataagttctaatgcgcggcaaagttactaactaaaataataaaaaacaactttttatttacataatgatgtagaataatggcgtaaataaaactgtgtcagcaaagaataaaataaaactttgctgacacagactattttaattacctataaagtaggttaggactattctttttctttcacttcgccgcggcgtgccttttcggtgtagcgcagttccttttcaatggtcatatccttgcccagaccatacgtatgcagtctttcgggttctatacccactttcacgaggaacttcttcaaggcttcggcacgtttcagcgtcactttcttgtttatggcttctccgcccgtatggtcggcatagccgcagatgtcaatctgtacttccggattctctttcagtgttttggcaatggtgaagagttcgcgtgcatacttgtccgtatccagtttccattttccgcgttcaaagtatacggcgggcaagtctttcgggaaacctttgcataccactacttccggagatttttcaagcactttctgttcgatgtagatagtatcgtgcaccactttcgtaacggtctttgtagcgcgcttccacataggcagatagcccggagcgtacatgatgttgtctttctttccgctctttccattgcctattttccataccagacccacttgtgcggtaaacatcgtatttctcttgcagttgcagatagttttgatgccgtcaaatttgttgttgttaatccacatcatgccgcctttcaactgggcgtccaaatgtttgttgatgcggtaacgcaatgctacatctccgcccaatcccaaattgactttgttgctcagcttatctgcaaaccggtttccactgcctttttcttccacttcggttgagaatttctgcatgtatatacccggagctaccagtaatgcccaccggcgattgccatcgctgcgtcggaacaggttaaacatattcacttcaaaattcagtccgaagttccacatcctgatgtcactgcgcagctctttgtagtatttggctccttccggaaaatctacattgtaataggtttccgcatttggcatgaggatgaagtcgtcttcataatctcgcgaaccggctttgttggcggcatagtccacagacagccgtataccgaacaacggattgaactggtatccgccttgcagtcctatcattccgccccaataaccgttacctttggttacggaacggaagtctcctgcaaaaaacggaacaccgccgttaatacctatgctccactgtgagtaatcattgtacaaagtttttttgctgggataatccttccagggatcatccacttttattgtttcttgagccgaagcattcatgccggataagaatataaggcatgaagcggctgctatattctgtaacaatttcataatactgtactttttaagtgattggatcggttatttctttaacagttcaatgcagacgaatgccggttttccgtagaaatatccgttttcactggcttgcagtcgcactactactttgtaaccttcgatggaagtaacattcacacccggattcagatgttgtttcataaatatttttccgtcagtggttactcctatatgactgtccatgtggcttaccgcagttccatttttatcatacgccattatataagagtatattacattcagcttttttgttccgtcatctttcgggctggcttttacatcttcaccttccaaaaccggttgtgtgcctattatctccacaagattatttcctaagtcctctatatcggcaagaatattgcgtttatagatatccgtatcgttaaagtcgcttaagtctgatccggtagcaacatttactggaatattctcttggaaaaagtcataatctttatttccgtccataacatcgttgggagagaagcgaactccgcagtatccgctctgactacagtttccgttttctgcgtttttgttaaatacaacagcaacctgacatgctaaatctttggcaacagaactcggcaatccttccacttctgtggcagaagctgttacagtcaatgttgcttcatcatacttttctactttttctacggtaaactccggaccagcttccgcacttcgtgtcacgggagtcactttgcgactatcaatagaaatggcatccttctgttctatcatttcatctattactgatgcaggcatcacttttacattgattttcaaggtatacttgctgccatcctgtttcagaagaacgctttggttgttgaagtctggaataatatccatctttttgatgcgattagcaagttcatcgatctgttcctgcaatttatcaatctgactttgcaatttatcaatctgactttgcaatttatcgattttgctactcaaattttgttccacttcattaagcagtccctggaatttgttttccagttctgtcagcttttcagccagttcctcgtcggtaatgccctgattgccggttaggttatctatctgctcttgcagttcttttattttatcgttcaagtcattaatcttgttttgcagttcggctttggcggtttccaatgcttctctcagttctttcaactgagcttcgcaatcgacatcgcaaccgcccccattgtttccgttctgtaaatcctctatttgcttttcgatagtggtaaccctttcttcaagactggttatctgctccttaagttcggtgtaactgttttctcccgctttcagttggttacggatgatttccaattgaccgtcataatctttttggcagctggtcattaaaaaacagctgcttcctgttaatagtagcatgactataaacagaaacatttttgaatttcttttcataactaattttgttttagggtaaaacgtttgatattttgttcttcttttaagctacataccagcagtgcgtcgttccattcggcaatgattattgattaatatgtttggtgagaatcatttgctgatcgatgtagattgtgtttataattgtttatagacacttgccacttcatctgcaatcctttcccagtcatatttattcatatcatatttaatatgttcgagaggtgaattgataatgttttggagttttgaggctaattcatcaacatttccacagcgaaaataactattgtcagataaccctacttctttatttgcaggaatatcacttactacaactttcacgccatagctcatagcttcgagtaaagcaataggaagaccttcgtgtgaagaaggcaagcaatagcagcggcagttagtaaggagtgaatggagttttctccctttgatgaatcctgttaatattacgccattttcctttgcttgtttttttaatgaaagtgaataagagtcttcgaaatcagtatcacctgcaagcaccaatttgcagtctgctgtgtcaatcttgctataggcttctacgagatggtgtagatttttttctggtacgaatcgacacatgccaagaatatattttcctttttcgataccaagttcttgaaagtattccgggtagtcgcaaatatcaggttcagatacaccattgtatatgagatgcaccttttttgtacggttatatttgtgcgcaattagtcttctgataacatctgaaataacaattacatcatctgcaaacatgcatcctatccgttcaccaagctttaatataattttggcaattcttccccatttgtcacggtcatagtcaggaccatgatgagtaaatacgactttcattcctaacagttttgcgtatgggacaagtaaagcgttaccaatagcatgaacatgaatgatattagctttctgtcgtcttgcttcattaatggcacgataagtgtgaattattgcttcaaaggattttttcttgggagaagggattgttatgagttttactccattccaatcttttaaatcatcatgtacataattagatcttcgaattatcgttatgtcaaatccacgttttgctatgcgggggaaaagttcttcacagtgtgtttcaactccccccattatattagggatgccacgggtgcctattactactattttcataaagtatttattcttgttttaaaaaatggctataaaaagctataagtcttggataatagttttcaagacttagattttcatgggcaaattctaacgttcctgcacttaatctttgatatgcttcgggagtcagagaaaatatttttttgatagtttcctgtaaattatcactattacctgttgtgaattgatatcctgtttttccatcaatgattatttctggtatgccaccaatttttgcgccaataacgggagtgccaacagaataagcttcaatgatagtcatagggttgttttcataccattctgatggtacgataacagaatatgcattttttactaaatctataagctccaatccacgtttatagccaagaaattcaacattgttcatgctgttgtttgagacaaacaactttaactctttttcttttgggcctgtaccaacaatttttaaattacattcgggtagttctttgaatgctttaagtagtgtttttactcctttttcataagaaagacgaccaaagaacagaaaatatttatttgttggtatttgtttggatgtggtagcaatggaggttgtaaaattgtaaagtgtgatattatgtgtttgtctaacttcaggcatatatttttcttgaatttctttagcaaatttacttacatacaagaaaccgtcaatatattttgcagggttaaagaaccaattacggaaatattgttcagctgccattactgcactcattgccttgcttcctttgcaacatgtgtgggtaaaacatttataaaaatatttgcctttacaatcctcacaaattattccttttccgttacgaaaagtataagcaggacaaacgatacgataatcatgtactgtaaataaaatggggatattatatctttttaaaacaggaaaaatagaaggagttatctgtccccataataaatgaatatgtgcgatatcaggtttttcatctttaactagttgctctattttttgcgctgcttcaaaatgataaaagtaatttattacgttttttacagttttgaagaatccggttctagttgctttggattcaggaaaatatttgctatagggggaagggttattctctttccattttaaacagaagtatacaacttgatgtccatgcttttccaataatttacctgtattgaaacatactgtttctgcgccacctttattaaaattatatacgtctattagaagtattttcatttatataataatattttattgtaaagtttgctcttgtttatattgattcaatgttccatttattagcaagccataaaaagtgggcttaccgttaatctcttttggaaaatattgtttccatgtaagtttatacaaaaatgtatttttactgattagtttccatacgttaggatcgtatggctgtcctagcactttccacaactcgtcgcaatatggattattgggtggaatttgcataaataaatcagctaatggcttaatatgattttgtgcaagtacaatagcataatccgttagtagataatcaataagatgatcgtagtgtttccaataattgtataaaaaatctctaataactgcatatgcccaacggttttcgtaactgcatcctagtgaataatttgcaaaatatccgcttgcaatggaacagtgtaaataatctgggcgtttaatggaccataaaggtaattgcatataatgttcaaaactttttcccgtacaaaagaatgtcgaatcaatccatattcctccatatgttgataaaaggtttaagcgtaataagtctgaatatattgttttagatatgataccatgtttgcgcttttcctctaaccaatcaggaaactttacatattgcttatagttctcatctgtaatgattaatacttcatattttccggaattacgtttgatagattcaacacatgtttttacaatttcaggtgcattgtcaagtccttgccaccaacatacccaaatcttatttcgcattttttcatcacattctggcattgtatttaggtattggtagttattccaatatgagctaaattttttctctaaaaaatttaacattatttgatgcttgtataataatctatttttaacgttttcaggttctttgaatccgtttcggttcataatttgaatatcaatctttgcacggaatgttactaatgccgctttccatgaaataacttgtgctacatcatatgttgcttttaactcttcgcatattctgtgaaatatacgcttaaaagtattatgtttttgtttcatatttatttgttttatgttatttgaaagatataataggaatgaggctttgttgtattattttttcccattgccatttttccatagatttgcgtattgtttggctgttgtattctcttctgtgttgataggtatcatatagagcttttgcaaaatcagaaattgtatcattgatgagtataccgttattggaatgaatgacttgtctattttcataggtatttgttgctatagtatataggccagataaagcatattcaaatgtttttgttggaggctgatattcataacattcaagttgggggatataagatatacctatattatgggtatcaagaaaaggttttaattcactgtacggtagtctaccatatgtgtgtatagtgctttctaacttttgcatatgtatatagttctttatttcataaagttcctcgccatctccaataatgctatatataagaggtatttctggatatttgtctttaaacattttcactccttttactgtatcaataatatgtctattacttaaggtgcccatataaagaagttttaaacaattaaagtctttatctgtatgtgaaatgatatcagcaccgagaggaaggatgaatgtaggcaaatttgtttttaagtgaagtttttgtttaatgcctttggatataaaagaggcactatcaaatacattaaccgcatgttctatacttttattttctatttgttgttgttctagtgatttgtgtacagataatgttcggatatcaatatgcatttttttgaagggtagaattttttttagccaatgacattttggaaaatagacagtaaaaatcttacctttatagaagaggcagtatagaatacaagttatgagaaaacggacattcttaaataattttccaccggatgaagaaacataaatgatctttacttgagggatttctatttttttgcgatgttcatcaaaacagatgtatgtaatattaaaatggcaatgcaaatattcacaatattttaaagtgtctgtaagaatgcctaattgtcctctatcaataattaatagttttgttttcattttactgttttgaattttaatctgttttaaaaaaaagatacagtgaaaggggcatcccaaataaatgcggtcttatctgtaggcggaaagaataagtatttaaggaattcatatgcaaaccatacgagaaaaatacttactaatttgtcgaatttactccatcggggagtcttgtaatgtagcacaagggatactggaaaaatccatgagtaagctaatacttgtcctattctgtttagaatttcaaggttcctgaatagagaaaggattgaaatccctatgaaaaaagagttaaataaagtagcatttattgattgccctactctatgacataatattgttttgtaacccaaatataaaagtgcagatgttcctaatgcttctatagcttgtactgctacatttctagtatatagttcattcattccttctgaagaaaaccacttagatgagttttctgcataggcagaagctaattcattatgtcttgaaaaaatatctaaaataggttgtaaaatagaaaaatcaaatattttaggaagaacatatacgcacagcaaataaattggtattgtgatgctgtagtgcaaaggcttatgcataaagatatacaatcctgttactattaatatgtttacaatatttgcagaatgtatgtttagacaaataatcccccaaaaaatacataggaaaatagattttttattttttctccatatatgttttacacttttaggctttattttaaataggctattcatgtatagaaagaaaaaagaatagctgaaagcttgccttatcatatattcttcgaattgcatatatgccataatgaataatggaaatatccatttggcataggctttgtattcttttagaaaatgtgtggcgcataaaataaatacaaaagaataaataaggaatacgctgtatgcattaaagcctaataacttagcagtatcgttgataccgataaaaaggaagcctgttgtatcaggtgtatctccattgaatacttcgatgtaatgttggtagtcatttcctctcatatatctgcaaccctgtactaaagtgaataagaggatgcatggtaaagttgcagatttatatggggctccttttgatatcctgtttccgcaataagcgaagcaagatagaagtattatattaattattagataatctaaatcaaagttcggcatatgggatattgctcttttattctgatatagaatctttacaccaatccaaaaaaatttcgtacgaagtaaatttgtaggggggggggagaaggttaggttttccgtcgtaatagattgattcttcggatagctcatctttatagggatatcgtccgtatctttgataaaaatacatgacattctctttggcttctaaaggtgccacttttaaacgttttgcaaaatagtcatccaatgagcagattactttacaaggatttcctacggctacgcttccagaaggaatatcatgtgtcactgtagaaccagcgccgataatacaattatctcctatatttactcctttaagtactgtcacatttgccccaaaatagatattgttccctatcgttacagcaccgcttgaatttaacatttggttatatttacctataaatacacgtcctccccaatcatgtgtatatatgtggaagtttacattcatgtcaaccctattacctatactgataagccatgggcgtgtgagatctatatatgtagtacgaggctctctgaaaatgcagtcatttcctatttttatacctttagactttaaaaaagaaatataactatctgaagaaatataatgtttttgcttcagaataaaacggaagatttttttgagcataatttagtgttgtagaaatttctgatatttgattacaatatcttgttcttacgtagattttttaaagagataaatggcgtagcaattgcggacaaatgtattgtaattatgcttacaatcgtttgtttatatattgtataaaatgtgtacgctacgctttcgcttatcccatgttcaaaggataaacgaaatccaaaacaataattgataaatgtcctgcaaaattacagattaatcataaaaaaacaaaactttccgaagaaaaaagcatatgaaagaggtaatgtatcttcttcggaaagtaatgatttttactctttcagcttaggaaataaagtttttaccccttcccgatagatacgttgtgcgttttccggtgttgtgaactctttaaatgcgctcagaatgatctcgtagctgtctacctcataattatggagcccttttttatgtcctcaagatagttttgcttcatgtgacaggtggaacggaatgcttctcttcggataccaagctgttccagttcttttttgaggaacgcaccgaattccggatgatcggaaataaatctgttcgatttcataataaatttgttttagttaataaaatagaaatatttgattcctgtacctacatagtgggtacaggtaatttgggtacaaaggtatacctttgcaacagtttttaaaacaatttaaaatataaatgctatgaaagcacataaaactactctttccgtacgggagctgcaaaagaccatagggcagtggaaaagtcggaaaattacggattccaccattgcaaagctgttggaactgatgttggggatgactgcctacatgaacgaggatgcggtttatcccgtggagaatttctatgatatcagcaaggcgctgaagtttaagaacgcgcggtatctggtggaagcggtcaggttgagcggagcgttcggcatcgtacccggcgacaatgtgtacgggatgagttcgttctattcctacctctggaaagagaaagaaaaaacggatgattctgcggaaactttaccagtaactttaccggtaaaattaccgcagggggatatatataatatatatactatacaggataataagaataatacatcctccggaaggatttcttctgcggaaaaaagcctggaagccgcacgtaatttttttcacctcatcaacaaaaatccgatggataagatgcggattttcactccgctcatcgacggcttccagcagaaggagggactggcgcgcgaagatgcctgcgccaacctggtgtacctggtgaacgaattgttggtgccttacttcgcaagtcaggaacgctttatgaaatccacccatgtagggcggctgtgctggctgagcaacctgctgaaatccgccggcgggctgcggatgctgaaagatgccacggatgccggaaggcggcaacgggtacagaaccttgccgacatgcggagtgaacaacgcaacaaccacccgctctgcgagtttgagtggacggataaggaaagcggcctgcgcttttacgacgacccgctggaagggatggtgaacataccggacaatgcaccgccccgcccgggagcgggagcggagtggaacgtgctgagcggagcatggggagagttgtgagttttgaattatgagttataaattataaatttcggaggatgaagccgttttattatttgagtgattttcccgagcgtagaagagcggggaagaattatatagcagagtgtcccaagtgcgggaaaaaacatcttgccatttcgcgcgatacgggattgtactgctgcttttatgcggggtgcgactttcacgggaagctgaaggacttctggacagagcgcagaagtacgggatggcaggatgccgggagtccggcgggagcttcgccgatggcaaaaggaagtgccgggaaaggagagccgggcggtatggcatcggtaggcggagggaacgccgcatttgaggtgtcgatgattcccgaagactacaaacgactgtcgcctgaggttatcgccaaaatcaaaccgctgaccgatgacccggagacttccgataccggacagcttgccgcccgccgttatcttgccgatatgggaatctcattgaaaacagccatcgacgcacgtatcggctgcctggtgcaccgctgcttcggaggcaaggacagcaaggacggaaaggataaaaagaatgctgcggggatgatgtaccagtgcatcgcctatgtgaactatatcaacgggcagcccgtcaacgtgaagtaccgctcgtgtgacgccactgcttccggctataccaaatgctggagccaggattcgcccactacgccttgcccgccttacaacatcgactgtatcaacccgctgctgattgccgaagagaatattccgcgcctgattgtcaccgaaggggaaagggatgtgctgactttacgcgaggcgggctacccgtatgtcatcagcgtgcccaacggcgcggcaagcgacctttccaaaagcttcgaggctttccgcccctggctggaccgggtacaggagctggtgatttgcggtgacagcgacctgcccggaaggacgcttgtgaagcatcttgccgactatttcggtacgcgatgcctgttcaccgtcctgcccggcggctgcaaggacatatccgacgtgcttgtggcgtacggcgccgatgtggtgcgcgagattatcggctcggcatgtccgcaccgtacatcggacatcatcaccgtgagcgaacgtgcggatgagattatgaacgtgctgaacggcaattacgaccacggctacgatgtgggttacggtccgcttaccgaccgggtgttccatccaaccgaccagggcggactgataattgccaccggaaagcccaacagcggcaagacggattttctgaacgacctgacctgccgcctcatggccaagacgggacgtaacgtgtgctacctctcctttgaggttcccgacaagaacaaacacatggcaaatcttatccgcctgatgctgggcaaggtgaacacggcggcatacacccgcgaacagttgcagcccatcgtctctttcctggacgggcacatggtgcatctggacctgcacgaggtttcgcccacgcccgccaacatcatagagcgcgcggagcgggtgaaacgcgccatgccgctgaagtatctcatcatcgacccgtacctcttcatggaaatggaaaccggacgctacaacacggagacgcaggccatcaagggcatgctgacgcagatgcaggcgtgggggcgtaacaacggtgtctgggtgattatcgtggcgcatccccgcagcctgaaaaaactgaacgggaagaacgagctggaggagatagatatgtacaccatttcgggcagcgccaactgggcgaaccttgccgatttcatcttttccataagccgcatcgaggaaccggacaggcgctatacccggctcgatatgctgaaagtgcgcgaccaggatttgtgccggacgggaagcgtgctgtttgtgaggcagccttgcgggcggtatgacgaacgggaatcggaggagcagataatgaccgagatgcaggggagggttctggataaggacaggctgccgtggatggggctggtaaccccgtgagtttgctcttgaaagaccgggtgtttgcttccggaatgcctcatgtttcaggctggaaagcccggagtttcagatgcaaactccgggcattcggtttttaaacgcctggcttttcgggagctatggttctcccaatgcttctacgatgacgtgcacctgaatcggagtgtagcacttggcattgggaagcatgccggtggcggcaagctgttccaggagtccgggcttgaaggctatccaacggttgagcttgcggacggctgccttgggcgtgatgctgggactgtataagattgccagctcgcttttgctgtagctgcgggggatgaaagaggatttttccatgttctttattacttgtttttatgatgtaaagttagtgaaaattagtggtttgcgaaagaaaaaaggacagtttattgcgtcgtaaggtgtcataagttgcagaaaaacgctttatggtgtgcaatgatgtgcgaaggagcggaaaggggcggaagcgggtggggaaggtgctatctttgtatcgccggtcagaagaaagggccccttcggattgagcgatgaatgatttacaattaacaattaaaatttaagaattatggcaacagcattggtggtacgcgcacagcgctacaagaagattggcgacaagacgtctccgttggtttatatcctgaaaagaaaaccgcgcgacgcgaagatgtatgatttgaaacgcatctcggaagaaatagaggctttgggaggtatgtcggcagaggatgtgctgcacgtgggcaaggcgattgtgagaaacatgcgcgagaagctgaccgacggcaacagtgtccgtctggatgatttcggaattttccgcacttcgtttcactgcatagcaacggaaaatcccaaggattgtacggtgaagaatattgacaaggtgcggattaatttcaaggtcgccactacgctcagactggtgaacgactcggttgccaccacgaagggcgcacccaacaacattaatttcgagctggtgtccgacgacaacaagacatcgggcggtagcggcaacggcggcggaaatgccggcggtgaggaagagaacccgttgggataaggataaggtgctttgaatgatgaattttaaatttttaaattgaaaaaaaagaagtatgggaaaaagtaaaggtttttgggatacgattttgaaagtggtaattgcagtggcttcggctgtgctgggtgtgtttggtgcgaatgcgatgaactattaggagatgagagcgattgacctgatagtaatccattgtagttccacgcgcgagaactatgcgttgaccgaacaggcgctggaggcttctcacaggcttatagggttcgacggaacggggtatcatttctatgtgcggcgtgacggaagagtcctggctacccgtccggtaagcaaagtgggggcgcatgcgcggggctacaatgctcactcgataggtatctgttatgaaggtgggctggaccgttacggaaatccgaaagatacgaggacagagtggcagcgacattcgctgagtgtgctggtgggaaagttattacaggaatatcccggtacgtgtgtagtggggcacagggacctcagtcccgacctgaacggaaacggggaagtggaacccatggagtggaccaagcaatgtccctgctttgatgtagggaaggaattctgatagcgggatgctgaaaaggctgtagggtgatagtaaaatcatcgtacagccttttcttcttgttgccttctcttctgtatctcttttgccttctgtatttcttttgtctttttgttcttttgtccttccatttcctccccctttttctcgacaaatcctataggcacatccacatgcgcgcaccccaacatatccagccgcacagcaactttacttttcccgttcacagtgataagctctccttcgagtccggcaagcggcccttttattactttcacggcatcgccgggagccagcggggcgctgcacatttccaccgcttcgggactgtaatcgagcatgaagcggaaccggtccatctgttcgtcggggatgacggcaggggtgctttcgccgcgcagtaccatatagcggctgaccgcctgcaggctcaggggaagcggccgttcctgcggagtgacatgcacgaatatcatcatgggaatcacaagacgctctacccgtttgcggcggtcgctccactggcgaatctcgctctggacgggcaggtagcactcgatgcccatagcggcaagccgttgtgcagtctttttctcaaggcacgactgtacataggccaccagccattggcggggtgctgtattgttttttgtttctatgtgattcgtattctgcattgttttttacgttcggttgggttaaaaagtatgccgggcagcagcgctctgctgccacagcatacaagcaaacaaacaaaaaataagcccggaaacaaggacagcattgcatgtagaagttccccaggcttatggggtgaatatcttatttcgaatcagaagtatcgccataaccgtacccgtagccatagccgtatttcttgccgtagccgtagtacctgccgtacttgccgtagccgtaatagtagccgtactttttctttttcatgtccaggccgttgataacggtgcacagaccgggcaaacgcttgttggcgtacagctcgttgatgagctggtagtcgttcttatgcgtatagtcggcacggcatacgtaaacgctgatgtcggcaacgcgtgctatgagctgcgtgtcggtgaccatgccgataggggcggtgtcgagcacgacatagtcgtagtcttttttcaacagttcgatggcatcgtccagggatttgcgcgccaacagctccgtggggttgggcgggatagttccgccgggcaggatgttgaggttggcagacaggtccgaagactgtatcatgcttcgcagatctgtactttgcggagcaaccagatattgggtgataccgcgttccttgtgcgaaatatggaatactttgttcaatcccggcttgcggatatcaagtcccacaatgactactttcttacccaatagcgccaagctgacagcgaggttggaggcgatgaaagtctttccttcgccacttgtggtggaggtgacgagaattactttcttgtcagggtcgcccaacatgaaaagcaggttggtgcgcaggctgcggaaagtctctgccatgatgtcgttgtcgttttcgcggacggcgatggcgtacttttcatcggagtcgttcaagggaacatcgccgataacaggaacacgcgtaagtctctcgacatcagaatgtccttcgatgcggtagctgagcaggctcagtatatagatgatggcaaccggaatgccgaaaccgagtaccagggctgccaggtaaattatctttttattgggcgatatgggtacatcatccgccaatgcgtcatctatgattttagcgttgttggcggtggcggcaagcgcgatattgttttcttcgcgtttctgcaacagcatcaggtaaagccctgccttgatttcctgctggcgctggatgctgacaaagcggcgttcctgtgcaggagcattgctgatttgaccggcatatttgcctgcctggcggtcgaggtcggctttagtgatgagcaatcccttgtatacgctgttgatggtagtcagaaggctggcatgcatatcgtcgatattgctgtcgagccggcggactacagggttggagtcggaagaagcgcggcgcagacggttgcgctccagaatcagtgcattgtattgggatattaaagatgtgagcgcttcgtcatctaagcctacattgaccggcaatgtagtattggcattctccggtttgttaagataatcggacagatattttatcagattcaattgtgtgccgttttccacgcatagcttttcgtatccggatttttcagcaatggcaagtttggcatcactgctaaggtcggtcagcccggattcgcgtttaaaactttccaactcctgttcggtagttcctaattcctgattgataatggcgatacgttcatcgataaagcgggcggtattttgagccacttcattcttgtcgtcattggcatcgcggttgtatatctctaccagtttattgataaagtcttcgccgcgttttttattcgtattgcttattgatatggtagccacagaggtggtcttgctggtaggttcaatggcaagtgccttgcggtagttttttgccacggcaagcggatgttggattgtgatttcgagctttccgttctctgtaatgggaacttgtgaattgggcataaaagttatagtgcctttttcaccggacaatactgccggcaattcggtaaaacttttattgaaagtcttttcctcgtcgcttcccttgccggtagttacattaacttctatccgtccgtttttctgatagccgacagtgagcaacatgggtgcatcgagcagttctgcatctttgggagaatagtggacaagtataggcgatgagccgtaaaggtctacggttttgaaacctttggaagccgtgtagtcgatatagagtcccaattcattaaccacatcctttatcaaggacttgctttgtaaaatttctatttcgttgtcgatgttttttgacgggttgaggagtccaaggtcttcgagtcctgaaaattcgcttcctaacatgccgcctttcttctcatccttgataaggatagatgcattgatattgtaagcaggggtgctttgtttcaggtaaatccatgcacatgccatacagacaatgacggatgcaacgaaccagggccagcggatgatgtacttgaaaaggctggctttgaaatctatctgttcctctttgtcttcgaatatgtcgtcgtaaagttcttctttcataaaatcttgaataaactataatgatgatgctttccggttgtggttatttgatgattgtagtaattaaacttgccaatgaaacgagcgttcctactacgctgatccatatagtggtgctattactgataccggagttcttggaaatcgttttattgggagtgacataaagtatgtcattctgctgcaaatagtaatagggcgaattgatgatatcactgtcattcaggtttaaggtaatgatttcgcgctttccctgattgtcttcccgaatcaattttactttgtcgcggataccatatacggtcatatctcctgccatggcaagtgcctcgaaaatgtttaccttttcattggagatggtaaatgtgccgggatgggcaacttcaccgataacggagattttatagttgaccatgcgtacggtaacaatgggtatttcacggaattgaggttggagtttgtcttttatcaattcttccgcttcgctttttgtcagaccgcctatgtggatattaccgatgatagggaagtctatgtcacctttattgtctaccaaatactgttgcagtacaggctggtttgtcaggtagttgttctctttgcttaatggactcgtcaccgttaaattgaacggtatcgccaattccggttcttcggggcaactcactacgatagtaagtaggtctttcggcatgatgcgtgcatcatacaacggcatatcagctgtgctggtatctccggcagcaacttcttgcagtgcatcctgaagataaggaacttttttatagctttgacaccctgccagcaatagcggcaacaacaataaaataatcagactttttctttttctcatgtgttttgatttttaactctcagctttcaactcgttttagtaggcttctttttctccttttaccgcattcttcacggttttgtagataatgtacaggtcgagcatgaatgtccagtgttccagataccagatgtcacgctccacgcgtccttccatttgccagagttccttggtctctccgcggaagccggtgacttgcgcccaaccggtgatgccgggtttgacaaggtggcgtaccatatacttatcaatcagcttggagtattcttcggtatgtttcagcatgtgcgggcggggacctactacggacatgtcgcccaacagaacgttgatgaactgcggcagttcgtcgatgcttgttttacgcatgaaattgcccaaacgggttttgcgcgggtcgtttaaagtagcctgcaccttatcgctgtccttgttgacacgcatggaacggaacttatagcaccagaattccttgttttcctcgccgctgcgcttctgcttgaagaagataggtccgggcgaggttatcttgatagccagtcctattatgatgaagatgataggaaagattgtgcataggaacaatagtgagaacacgatgtcgaacagacgttttgccaatcggttttcgggttgcgccaacggttcctgacgaatgtccagtacgggtacgtttcctatcagttcaaggtgcatgcgccgtttcaggtagttgcgtacgttgggcacgctgtaaaaatgaatcaggttgttttcgcagtagctgatgatgggcagaatctctttgctatgcgaggaagtaagaccgcagtacaactgttcggccttacttttcttaagataagggattacttcttggggagtgcccagatagtggcattccttcggataattgtcggaaggatgctcggcaaaatagcccactaccttgaagccggaagtagggtcggcggtcatctcttcgtagagttcgaccatattggagccgtcgcccacgagtgcaacagtacgacggttgcctcccttgcggcggtatattttgacgaaatgtctgaatatgagtctgtatgatacaagcagtgcaaggaatgccgtatagaatataacgaggaagcgtgtggacaagctgccgaaatgcaccagcgtgataaggctgatgaatactaccgcatggcagaatgtattgcgtacggcacgcattacgatatggtctgcacgtacgatgcggcggtgaagcacgactcctttggaatagttacataagagatagaccaaattcaacaacaccaacaattgcggcagtgaatcggagagaaggatacgctgggtatctgtgtccaatacataatacaaggttataaagagtgcattgagaatgcataaatcaccggcaatgatgatgctcttgataattttgttgaaacgtaaaatttgtttcatggtcttcgtaatgtcctgtcaatcattgaatttttgtaaataaaataattgatttccctgtcttatttgttatgattaattatgggttctcttacttacaaggtaagaga

SEQ ID NO: 4147 - DNA, 13993 bp, Unknown
  gut microbiota DNA sequence
cttagcttcttggcactcagcagatattcccgaaacttgttacagaggtcgatgtcaatctcttcaaaagtgcatttatcatgtacgaagttactgaaatgcagatagacaaactcccatttctggtcatgcttacggagctgcttgcgataatactccagaaagtctgccttgagtttgtacttgtcaaagaagtcataccgttcattgactaccgactcgaacctgcggcaacggatggcttcggctttctcggtcattacctcgttgaaattctgttcacgtttgtttctcggattggcatagatataaataccaagcgattcatgacggataactttcattgtctctttgtctcgataccccggataataatccagatagaaagacatcatcctgccttttagcggacgtgtccttaatgtcacggtcttgcattcatgcataatgttatatttttatggttattattaattcgtcggcgaaactctataatgtaatcatgcagattacctacagcagggattaatttttgaataatttacggatagtcataaattagactatttgcggacacccattacccggtcaaactccactttcaggaatctgacgaaccgtccgttcttctcacggttgatctgatggaattgcagaataccgtaaaccgaatcacgagagagcttgaatttctccatcgcctccttgacggtgtagtattccgccttgctctcctgctcggaactcttcgagaggtcgaagtggagctttgagtagaatatctgcccatgctccttcttggatggaatgttgttccgatacacctgcgaacggatggcgacacgtgtcatgccgtacttttcctgaatttcttcgggcgtgtaccattcggtcaggtcggaatccacttcgtatttggcaaaggcggcatcgatatgtttcttgctgtaatagttgaactggcgaattcgtaccttcggaactttgtgctgccgtgtataagtccacacccatttggcgttgaccttatatttctctgcaatttcttcagcggtataatactcggtgatgccgaaatcttctttgggcattatacgttcataaggtttggttttcatcatcagttcgatgtccgcacggcggatgagcgacttcttgccgctgatgcgtgaagcccgaagtttcgattcctttaccaatttatatatgtattgccgagttacgcccatcagttttgctgcttgggcaaaagagaagaaatcctgtccctcggcggcttgtcgaggttgcaataattcttgcgaccgtttcaactgtcgcttacgttcccggatgcgctccttgtagccaagattggaacactggtggctacaataacaggtcgttgttttttgagctatgaatggttttccacaccattggcaaatctttcttacttccatattttcctcctttacattggggataatttcgccttatttctcccgatttttgtcaatacatgtaaaccactgtcaacacacgtcaactaatgcgtcactgtgacattcgggctaaccgtgaatttctgtcgcggtagaaatatgatagaaaaatatagataaaaaccgttatctccaaatacggactggaaagtgttaaaatataaaagtcgctgaaatacagcgactttattctaaatggttatagttagttatggctgtttacaagccatcacttgccgatgcaaaagtgctgaaatatattctgtaataccatatcatttgtcacttctcccgcaatatcgctcaagtggaaaatacaatcccgaatatcttgtgatatgaaatcaccggaaatattattagtcagaccctcttgcactcgatggatagcttctaatgcattgtttaatgcctcataatggcgtacattagtaactataacatcattttgcgtaattgtaggaagatgggcagatgttatcagcattcgttgaagttcttcgatatgttctcttttttttgcggatagggtgattgactgtacattatcaggaaaattgtcaggaatactattctgtatattatccactaaatcggctttgttataaacaaggataagctgctttctttcacaacggggaaggagttgaccggccaactgtgttatttgagcttgggcattcgtagcatcaatcatccaaaggacaatttctgcttgatccaacttttggaaagtgcgttcgataccgaggctttcaattgtatcgctagtttcacgaatacctgctgtgtcgatgaatctgaaagtaatgccacctatattgacagtatcttctattatatcccgtgtagtgccatgaatgtcgctaacaatagctttgtcttcattaagtaagacattgagcaatgtagactttcctgcattcgtttcaccgataatggctacaggaacgccgtttttgatggcgttacctacgttgaatgaattaaccaaacgagctatgactttctctatgttgttcgctagttggcaaagttcggagcggtcggcaaattccagttcctcgtgatcgctgaaatccaattccaattcgatgagtgaggtgaaatggagtaattggtcacgtaaggtagcaagttccttactgaaaccgccccgcatttggctcatggcaagacggtgggtcgctgcagacgatgaggcaatcagatcggcaactgcttctgcttgactcaggtccattttcccatttagaaatgcacgctgggtatattcgcctggggcagccatgcgacaaccattcttgatgagtagttgtaatactttctgaagaatataggcagaaccgtggcaagtgatttccgtactgttctcaccagtataggagtgaggagcacgaaacagactaacgagtacttcatctataacttcagagccgtcataaatccgtccaaaagtaagtgtgtaaggcttgctgtcccctaactctctattagtagcggcaggagtaaaaatacaagatgtgatttcgatagcttccggtccggaaacgcgaatacatccaatagccccgccctgggcggtagctatggcgcagatagtatcttggttcattatttacagcttgttttatgacgcaaagatagtgctttctcctgattttatatccgataagatatttaaatacgttcgagtactttaagaataagatggtcaattgtatttttatatccggtgttggcttctttaattaatcggttggcaattaccatgcagacagtcatggctttatgccccatcaaacgactgaggccggccagtgcggaactttccatttcgaaattggtaatcttataaccgttgtattcgaattgctcgattttttcgttctgatgcgggtctgccaggggaacacgcagttcacgtccttgcggaccgaagaaaccgccggcggcgatggtgacgcctcgtaccatatcatctcccgctatacggtctatcaattcggcattggcatcaattacgtaaggggcgggagcacacatgtttcccgaccatcccatgtggttgaggaaagcgcgttcaaagggcaggtcgcaaactgcattacgtccggcatagaagttcagcaagccgtcgaaaccaatggatttggcagaacatataaaagttcctacgggcgtgtaaggttgcaaaccgccacacgtaccgatacggactagttccaattgacgcagttggggcttttcctctctcgtctggaagtcgatgttagcgagtgcgtccaattcgttcataacaatatcaatgttatcgcaaccgataccagtggaaacaacggtgattcgtttacctttataagtacctgtaattgtcttgaattcgcggctctccacttcacattctttattctcgaaatgtgaagcaaccaatgctacccggccggggtcacctacgaggattactttatctgccagccattcaggctttacgtgtaaatggaacgcggaaccgtcttcgttaataataagttcggaagatgcaaaatactttttcatgttacgaggtattataagttcgtttataaagagataacgtcggcaactggtttctgttcaccggttccgacgtttatataggtaactttaccggtttatttgctcaatggctggttggatgtaccggttaccggtttggcaatgttctcgcgcatcgaagtgtcggcctcgatgtttttcatccggtaataatccattatgcccagattgccgctgcggaaagcttctgccatagccttaggcacttcagcttcggcttcgataactttagcgcgtgcttcctgtgctttggctttcatttcctgctcgctggcaacggccatggcacggcgctcttcggcttttgcttgagcgatatttttgtccgcatttgcttggtctatctgtaaagctgcaccgatgttcttgcctatgtcgatgtcggcaatatcaatagacaggatctcaaaagccgtaccggcatccaatcctttgcgaagcactaatttggaaatggagtcgggattttccaaaaccgatttatggttttcggaagaaccgatagacgatacgataccttcgcctacacgggcaaggattgtatcttctccagcaccacctaccaactgacggatattggcacgtacggttacacgggctttggcaatcaactggataccgtcttttgctacggctgtgacgggcggggtatcaatcacctttgggtttactgacatttggactgcctcaaatacatcgcgtccggcaaggtcaatggcggtggccatttgaaaaggcaattcgatgttggctttcgaagcggataccaaagcatgcactactttctcaacgtgtccgcccgccagatagtgtgcctccagttcatcgcgggtgatgttgctcaagccggctttatgtgcttcaatcaggccaggcacaataatatagggcggcacgttacgaatacgcatcagaaatagttgaaccagtgatatgttgactcctgaaactttggcagacagccataggaaaaacggtacatagtggaaaaacagtaccaggaaaatgataccacctatgatagtgaaggcagtgagatacatcgtgcttggatccatgattttagttattaatgattacttatttaatgatttgcaatttacggtttgtttttctccacaagtatcactccgtctgtaatgcggtttactataatgggagttttctcattcagaaaaccgtctgtggattttacttctacgatatcaccatttatttcggcatacccaatgagggcaagacgggtagtggtaatgccggtatcgccaatttttactttctcttcggcactacggtctacttttgaagtgatgtttttcttcaaagctatcttatccagggttttggaacgcatgaaccacactaatgaaccaacgcaggtgatgatggatatggcaagtgtgatgaatccggctgttgctcctaaattggcaaaagcgtagtagttggcataaatgatgcaaccacctgccaaaaatccggcaatgctgatgcctggtatgataaatagctctacgaggaacagtataactgctgcaacgactaaaattgcgatgatgaatatgtccataactgttctatttaatggtttgcttttctaatttccgcacttggatagcagtacggtctacttcgtttgccaactgtagcactcgtttttccaaatcgagtatagctggagccattttgcttctttcgttctggttggcacgcgaatattgggtgcgcatattttccagtttattttgttgctggttatagctttctttcagttggagatagttcctgaattgcgcttttgcttgcggagagcggaaatcggcagcataatgatagatattcctgtcatcaattacaaactcaaattcgtgccgtttctttattttcattttttcctgcatcgtttcctgcaggcgtttccttgcatcggctaccaggctttcattcgtccaggtatctctgatggaatggagttgggcaagctttatcagtttgtttttatccatgctttcatagttgtatacttgtttggatgaggcgggaatgaatacatatacacatactttgccttccggctgataacgatctgatgcaaaccagccgaggttgttgaattcgtctataacgtacatataatcattataaggcgaattgaaaggcatgcctacattttccggggtcagataagtgtctgtgtttgtattgtagcgtgttacgaaaatatcgtatccacccattgatgcaggaccgtctgctgcataatagatagtgatgccatcagccaatacgtatggataactggcattcatggactcgttgatactgccggggagcatattgcctttgccccattcgtccatcattttattgcgcgataagatgttgagcgtactgtctttctgtaactcgctataatagattttattccctaactccgtttcatatacagtgccgccttcgctattggaattttcaaagtaggtatcgtacatgaacaatttcccggattcaggactgattttgtacgcttcgagaaaatctttcttgtctacgacaaaactgtcgatgaagcacacttcttctacgcctttcagcagacggaggttggctttgctcttttccagaagtttttcggcttcagcggtcgaacgtcttctttttgtcagttctgcaatatagtcttcgtaagtgccgacggcatcttcaaatcggtaaacggcattataagcctgtgccaaatagagttgtccgctggtgacccggcgttttacggctgtttccagatactttatagcttcttccgcttctcccgtattcagacaacatacgccataccacaaattataattcccgttattaggttgtgattttacaaatttcttaaaaacgggctttgcctgttcgtattgtcctttttcatagagtatttttgcttgggcaagggtttgtgctgaagcatgtattccaaagaagccaaacaagaaaagcagtatatatttattcttcatactaaaaaatcttttttaatgagttcaaaaatacgaattaatccggaataaagctcttttccgtaattctattatgttaattcttctttaaatgattcttttcagttacttttgcagccaattttcaactgatttttatggcactatttacagaggaagagaagacattacggcgtatagagaaacgctttgccaaaggagtggtggagtacggactgatagaagagggcgataaaatccttatcggactttccggcggcaaggactctttggtgttggtggaactgttggcgcgccgttcccggattctgaagccacggttttcggtggttgctgcccatgtggtaatgagaaacatcccttatcagagcgatacggattacctcagaagctatgcggagtcgcagggagtgcctttcgtgctgtacgaaacggagttcgatgcgagtacggatactcgcaagtctccttgtttcctgtgttcgtggaaccggcgcaaggctttgttcactgtggcaaaggaacaggggtgtaacaaaatagccttggggcatcacatggatgatattctggaaacgttgctgatgaatattacgtatcagggggcgttcggttcgatgccgccgcggctggtaatgaagaagttcgacatgacgattatccgcccgatgtgtcttgtgcacgaatcagatttggcggaattggcggcgataagaaactatcggaagcaggtgaagaattgtccttacgagtcgcagtcgagccggagcgtgatgaaaggtatcctgcatcgtctggaagagatgaatcccgaagcccggtacagtttgtgggggagcatgagcaatgtgcaggaagagttgctgccccggaagaatgaaggcgggacaagccgttgacaagcaatttctaatcactaatcattatatgaaagctttttacaccattttacttttaattgtatccaatgtcttcatgacgtttgcctggtacgggcatttgaagttgcaggagatgaaagttatctccaactggcctctctatgccgttattttgttctcgtggatgatagcgttggcggagtattcatttcagattcctgccaatcgcatcgggttcataggcaatggcggtcctttttcgttgatgcagcttaaggttatccaggaagtagtgacgcttatcatctttacaatattcactaccgtactgtttaaaggagaatctctgcattggaatcattttgcagctttcgtttgtctggtattggcggtatattttgtcttttataaataggatgaatgtgatgtctaacggttggaaccggtagctttatcaggggaaactttttgtttttgccgcctgaactaaaagttttatgctgataactaatgcgttggctattgtttagctgttgaataaacaagtaggtgtactttctctcatttcggagctgttgaactgctcagccgaaatctggacgatacaggacgacacaacgtgtgacagctacttgtagggatttttatctgtcatacttatctgtcacgctatagtctattgtatgatagcttattatcttatttttgtgatagcgtgacagatgtttttcaaaataaaacttcgcggaggatgaaaaccgggacgaatcgctattttaccgtcatatatttatccattcctttcgtgtagaacatccggagttcccctttttcgtccgcatatatgaagcatgcgtcgaggtcggggtgtgaatcggcaaagcgttcggcttcttccaggcccatgaccatgaaagcggtggcataggcatctgcactcatgcagtcgcgggcaatcactgtggccgacaggatactgtgctgcaccggatagcctgtgcgcgggtctatagtatgggcatattttttgccgtctttgtagtaatagtttcggtaatttcccgaagtggctatgcccacatcggtaacttgcagtatggtctgcaattcttggtttacggcgagcgagtcgtctatcggcttgttgattccgatgcgccataaactttttttcgggttttctccgcgcaccaccacttcgccgcctatatctaccatgaaattgccgatgcctttcttttccagcaattgcgcaatgacatctactgcatagcctttggctacggcgctgcacgaaagcatgatgcgggaatcctgtttgataacttttccgtcggcggataacgatactttcggatagcctgtgatgtccagcaagctgtctatcatagcagagtcgggaaatgcgcctttcttaaatccgaatccccatgcgttggcaagcggggctatcgtaatgtcaaaagcaccttgggtctcccgggagatttccatgctgcggcggaatacgttggtgaagaaagtatcgggaatgatttcttcgttccggttgatgcgcgtaatcgttgccgtatcgttaaacggagatagagatccgtcaaaccgtttaagctcagcttctatctcggctttcaaattgctgtcgtactgataggttatgttatagaccgttccgaatatcagtccgctgacagtttgataaggaacagcgcggttgtggcgtgcaagtattccgatagtgccgagggcaagcagggcaacccataaaaaattacgttgtgctttcttctccataatgtatgatgctgtataaataaattaagcgatcttcttttttatccttctatcagactgccttttatcggacagcctgccgtttcttcgtttttcactctttatttaaaagaacaagtgctctatcaatatcttcgttccgataacgatgaggataatgccgccccacagttcggaacgcagcttgcgggcgatgccgcatccgcaccggatgccgaacatcaatcctgccagtgataaggcaaacgacacaaatcctatgatgccgatagggggcagaatggatgcaaagttgcaaactcccagaaaagcgaacgaaacacctaccgccaaggcatcgatgctggtggctaccgccaatgccgctactactttcagcttggtaggatcgaactcgtgccggcaatcttcatccttgaaagattccataatcatacgtccacccagaaaagctaaaatggcaaaagctatccaatggtctatactttcaatgagatggctgaaaaaactggcgcctatccagccaagcaatggcatgagtgcctgaaaaaaaccgaaagccaatgccattatcagcatcgggcgcaattgaacacgttttaatataatgccgctggctatggatacagcgaaacagtccatagcaagccctatggcaagcaaccagatttctaatcctgtcattatctcttagaatggtagtttataagttattgtataggtaaccccggttgtgtttccgttgtacttcccgtagcccggtacgtaccatggatcaccatgctcggcaacggaagaactcatacggaatttgaaacgtaacgcccaacccatatacaggtctttccatacatgcgcccgtataccgacacaaaattcggcccattgcatcgagcctttcattcctttataattaaaaggcaggctgtttccccaaatgccgtctatcaaattcggattacccaaacttcccccgtattcagggtcgttgatgcctaacgcttctacatcatatttaaagctcgttgccgcatagcgcaggccaacgagtatcatatgtccgtgttttttgttataaagcgcgttatagtccataccgatacggaaatagggagcaccggttttataatgtattcctttgtcgctccaagtatcagtattgccatatcctaattctacaatcgggaaaaagcgatttttaagattgacatcgacagctacctcactgctgaaaaagtcactcccgaacagtttgcttccgggtccccataaatctacactgacagaaataccattgtacagcggatagtgcacttcctctttggcctcttttttctcctttttgggcggagtgtttgccggcggagcggaaatgtcactgttttgtgcctgtaatggaagagacagcagcaaacagaacgctagactaatagaatagtttaagattttctgctccataaattccggcttctttatttgcaacgcgaatagaatcaagactgtggcgactgtatcggacatctgttatggcttgtttcatttgataaccgcaatccattgacaagaagtaaggtgtgttggtttggtgaataacaagcgtatctgtcaatgtcttgctgtaatgaaacacgagtacggtggagtcggtggtatatctcagtggcaacgagagatcgtgcacttttttttgattgttgatgatgacggaatccgtgccaaaggcagtaaccgtcaaagagtctaaggtatcattggataccactttggtgtcaggatccaatgtatataggtaacattgcatcatggctcgcgttgtcattgaacagtctgcttcttccgaacaggatattgctatactgaaaacagggaaaagaacagccccgaatattataaatctgactaatgctttcatggttaaatcattttctctatttggtacttattgcgttctggtgcattgcgggatatcaactctccgagaaaacctgccacaaataactgcgtgccgataatcatggatgtcagtgacaggtagaaatagggagaatctgtcacaaggcggtagggcatcccttgattcatgtaatacagcttgctggcgccgacaataatgacggcaacgaatccgacgaagaacatcagagaacccaatatgccaaagaagtgcataggcttgatgccgaaggtggaaaggaaccaaagggatatcaagtccaggtatccgttgaagaaacgattccacccgccgaattttgtcttgccaaatttccgtgcctgatggtgtacgactttctcgccaatcttcttgaaaccggcattctttgccagataggggatatagcgatgcatttcgccgtacacttctatgttttttataacatctttgcgataggctttcaagccgcaattgaaatcgtgcaggttctttatgccggaaaccttgcgtgccgtagcgttgaacagttttgtcggtatggtctttgacagcggatcgtatcttttttgcttccagccggacaccagatcgtagtcatcttccgtaatcatgcggtatagttccggtatttcgtcaggactgtcttgcaggtcggcatccattgtaatcacaacatcgccctgggcctgttcaaaaccgcaatagagagctggtgatttgccataattgcgacggaactttattccgcgcactttatcagattttgtttgtaattgctctattatttgccaggaacggtcggtgcttccgtcgttaacgaaaataacttcataagaaaagtcatgggctttcattacccgttcaatccatgcaaacaattccggaagagactcctcttcattatataaaggaacgacaactgaaatatccatttgcttatttacgattttactatattatactatacctgatttatttgaaatttgtctgttcttgtcattcctttttacgcctcattacaaataaggcagtaggaagcgcgagcaatgaaccgcaaaatacattccatgacaccagttgcatggtgatatctatgggagtgagcgatttcacagtctccaatgtttcttgaaacatgtttgtataggcttctatgtccggtacaccgcttttgtttaagatatcaatttgagattcgtaggcattgataacgaaaccatgatcgatgaaacggaaataaatgtagtgtgccactgccgtcagcaatgcggcaaacatatacatgaatactgtgaatatccatgcatgcaagaagctgatactgccgctgcatacagtattacgatacattcgtacataataatagcccatgaaagggacacataacgtgagccctacgaaaaggaaagataaaaacggaattgtcaatcctaaagggaagaggatgaattttaaaatccaatatcctcccaaataggtgccgaacaacattgcatattgcatgtaacctttattttctgccatttttctaagaaatatggcgcaaagttataaataatattggttgtagaccctgtattcttgttaaagttgaaaaaagttaggggaaggtattgcagatttaaaatttttatctacctttgcactcgcaaaacgggtaagtcctatacggccagctcccttcgaatcctccagggcttgatcgcagcaaaggtagttggttgtagcggcgcgatgtagatagcttacccaccccgcctctttagctcagttggccagagcacgtgatttgtaatctcggggtcgttggttcgaatccgacaagaggctcaaacaagaaggtgtgtcgtaatgcacgatgcaccttctttcttgtttatcaccgatataaatcggtttattttcttcaagctgcgataattcgaagatttctttgatttatgtgtctccagcatctaaataaagcgacagtaagctcataaaaccatcctatcagccagttcataccttcttttgtcagttttgcacacatcttttttatattgaaggcaatggctaggaaggcaaagtccatgaagaccttgtcctttccaaaatgtcggaaacgtttgtagttcatattgtttttaatttgtccgaacacggcctccggttctatgcatctctgccctctgtgtttcagtcctttctctgagcagagcagttctttggctctccgcttgtattgtctaagcctatgattcagttctatcgtcctgtttccttttgctttaaaacagcggcatcgcaggg

SEQ ID NO: 4148 - DNA, 252 bp, Unknown
  gut microbiota DNA sequence
ttcactccggccatgctgactgaaatggcaggagaattgcgtcatgcactggaacaggtttccgagccatccgcgaaagaggaaaagactgaactgaaaaagaaacacaaacagttgaaggaactggaagaacatagggacaaactgcaggaatacgactgactgccatctggaaacgctgcaagagaggaattcctattccaagacggacaaggacgctacttttatgagaatgaaggaggatgccatgcg

SEQ ID NO: 4149 - DNA, 1489 bp, Unknown
  gut microbiota DNA sequence
caccgggaacttgggcggaacattttattttcagtgtggtatcagaaaagattaagtgcccgaatagtggctttttgcatatcttttcatatcctttactctctacggctgcaaatagcaattcgttaaacggccgttactctttcgttagacagttgttgccctttcgttagactaaggtttaacgaaagggcaacaactgtctaacgaattaaaaataaacaagcaactatttatttacagcagatgtaccaacagttatcaccttacaaatattttattcagaaaggacaacttacaacgacggatacgaactatgaaccatgaagtaaactttttgaagaattatcgcaagaatattaaaaataactatatatttgtattcaattctaaaactaattagctatgaaactgattgcggaaagtggttctacaagaactgaatgggcactggttgaagacaaccacttgatacagcgtgtttttaccgagggattgaatcctttttttcaaacaagaagagaaattagccggagtgtacgtttaggattgcccgatatttttttcaaaaagaaattggaacaagtatattattatggagccggatgtacctcttatgaaaaaaagaatatattgggtgcatctttagtagcacaattcaagacccctattcaggttgaaagtgacctgcttgcagcggcacgcggtctgtttaaatgtgaagccggcattgcctgtatcttgggaacaggctctaattcatgcttttatgacgggaaaatagtagtcaagaacgtcaaggcaggtggttatatcctgggcgatgaaggcagtggagctgtgttaggcaaaatgtttctgtctgatgtgttaaaaggcttggcacctaaggatgtaatggccgatttttttgaaaaatttcgtatcagctctaatgaagtaatggaatcggtatataaccgtcctttcccaaaccgtttcctctcaacaatttcttacttcttggcagactatacaaacgatgactatgtatttgaactgataactaataatttaaaaggatttttcactcgtaatgtctgccagtacgactataagaattatcccatcagatttgttggctcattggcctatagctatgcggacatcttaagagaagttgccggtgagtttggaattgagctcgacgtaattgaagaaactccgatgaatggactgatagaatttcattctttaaatatagaagaaccttaaactctaatatatataaggtatataaagactgcctttgcaaatttaaaagtataagattaaaaaaatgcaaagaaatgttcttgatattgaataatataatatctttgttacgtgtgaagtacacaaaatactttatcacctttgttaataataagatttatctcttaaaacgactggcaaggttaagaaattaactggatttagtttaaaattaatatataccaagttcccggtg

SEQ ID NO: 4150 - DNA, 2527 bp, Unknown
  gut microbiota DNA sequence
aacatcatgccgctttgtcttgtcagtgcggcaatggagtcccagtcttccggaatccaggttacttccagcggaatgccagttgcaagccggttttcccgcaggtatgctttaaggttcagtgagcgtgccagtgcattcatttcgttctttttcaggtttccggcaggtgccccgtatcctgtaaccttcactttcaggagttccgttccctcttcccgtcggatgttctgcaaagcattgcgcagccggtggtatatttctaagttctgtttgctttcggacaattctcccagcgttttctctcctttttcctgcttccctttgccaaagtaggggatggaccccgtcactgcatgcagtgtgtctttgccgggtgcaggctcgatgaagttcacccaggccaggtatttcctgtccgtatccatgtcccaggctgaagtgcggttttcgggcaggttcagcctgccggcaatcctgtcttcgtaggccttgccctgtttgccgtggcaggcgcattccttcgttctcatcaggagccgggcgtccttcatccattccttatagggcactgccacccggtatcggaaggagcgcgccatcctggcgtcgttccttatcactactgcgggtatgggggccggatgcccgtttccggcaaattccttttgccgctggtacactttctgcttttccttgccgttgatgagtaccgccggcagggcttgctcgttttccccgctgatgagtacgggcgtcagggtcagcgattcgtccgagggcattctcagtccttcgaaatcgactgagaggtcaatgttcagacgcccgtccgcaagcgagaactgctgtccggtgacgaacatttccccccggtagaattcctgtgcatgacctgcccggcagcagagcgccgatagtgccattatcataggaatacggattaagtttttcatactttcaatttgctgttgtaatttatcttgttattattgcatcatatacactaaggatatggaggctttggtgggagcgatgaaattcctgtttccgcttcctgtcttttctccgcagtgcgcgcagcggtagcgttcgtatcgggtgtgcaggaatcctacgccgatgcttgtctccagtccccagcggggggagaggatgaagtgatagccgtatgatattcccactcccgtaaagtctccctcgtatctttcggaacgtacccctttgaacagcccgaaaggcagccttgccttggctacgttgtacacgccgtacatcaggcctgtcccgaagaaatgtcctccgtagggctggcacatccagtagcgcagctccggctgcacgaaccagtgtttccagcgtttgtctcctcctgccggaaaggggttgtaataaaccccggcctccagcgtgaaacgttccgacagctttagttccacaccgaggttgggcgaggcgagcatgccccccgtaagcaggtcgcttttcacggcaacggtttgcgcccctgccttgcctgcacacgacagcagggcaaggagcatcagcatcggtatgtattttctgcttctcaatttctttgttcctgttataaatctgtcagtgtaatctccttcaggtatatcctggttatctggtttactattccgagtttttgtgcggctcttccgtattgtgcatagaaccgctcggtaatggggctgttgcagttcagatgtcctcccgtggcttcgagaatatccagcagggatatttccatggctcttttagcaggaatataggactgtatttccagcggatgttccttttctttcaggatgataagtccggcattggtgagctgtgtcagcaatacccgcatctgcccttctgtaagtgtgcactgctttatgcaagtaccgtagtctcttgcatagatgcatttgagtactgcaatggcagtctgtgttttgggcgttatcatgtagttttcttgtttgtttgattgttggtatccggccgttactttgtaggtaacggaagattgccctcagataccctgcagaagcgtctgccgcatatgcatccgggttgtataaccgataaagttatataacagacgttttcccgctttcctaccggaaggcggcaaggggggctttgctttattggttgaagtcggtttgttctgttttgtctgctgccggtcttttatgccgtatatgataagattttatcttttttattttgtttttcaagttttatagttacttttgcggtaggaatatcctccgttacctacaaagtaatccctttgtaataatctgtatcatagttatatacatggaatgctcccttgtcatccttgtcggatactgcatttcttcacgtaagcgataatttttttattggtcctgtccagcatttcgttttcgaagggtttcagataggtttccgtaacctttaccgatgaatgccccagtgcgttgcttattactcccacggcgactctggtgtggaacgccgttgttgcccatgtgtgccttgc

SEQ ID NO: 4151 - DNA, 218 bp, Unknown
  gut microbiota DNA sequence
gtaccgtgcattttcgctgacatatccggatgcggttttcacattcctggtgcctatcctccgcatcctttgccccataggacagatgcagaagtcatgttcttcattgtagtagaagttttcggccttgaacgggtccggtttgaatctcggccgctgctccatgtggaaatagttgtactttacgtaggcttccatgccgttttcggacatgaagc

SEQ ID NO: 4152 - DNA, 229 bp, Unknown
  gut microbiota DNA sequence
tcattgcccgggagaagtcatcagagaacaatgaggaggttgagttcactccggccatgctgactgaaatggcaggagaattgcgtcatgcattggaacaggtttccgagccatccgcgaaagaggaaaagactgaactgaaaaagaaacgcaaacagctgaaggaactggaagaacacagggacaaactgcaggaatacgactgccatctggaaacactgcaagagag

SEQ ID NO: 4153 - DNA, 6535 bp, Unknown
  gut microbiota DNA sequence
gatagtaggtacggcggctggaattactgatgacccggttgatgaagaagtgtgtttgtttggaggtgaggttttccagaatcccgagaaagcctctggcatacctcacctgcttattggagcaaaagtaagggcactcattcttgaacttggctaaatgcttgggattgatggcactgcaagatataagctcttccggcgaaagcctttctgccaattgcctgaggcaagtttctgctttactgcattgccggttgatacaccataggaaattattgggaacatctgaaaatgcaagttctttttctttcattatgaattgcggtttatgtgaggactctgataactatctgcaaatgtagccattcttattcttaattaggcgtgagatgtttataaaaaaatctattattgctcttttatcaaaaatgtttattataatcttggaaagaaaagctaacttgttcaaataaaagcagtttgagtggctaatggaatttgaggtaatgacttgtactcatttctgcgctctgctttgcattgctttcaaaataactcttttgttcactgtaaaagtacaaaaatagtgctgacgagaaaaaagaaagatagtattttttcgccagcacttattgtaggctcatctattaaaatagaagcttgtgcatttgggtttatagtaatcattattctttgtctgcaaatttcttgcggtttgcaagtttggttactgttttggcaatcctgtcaactctggtctgctctccctttgccgaatatatccacctgatgtatttgtattgttcgctttcaatgagcgaattaaaaaactgcaaagctacgatgtcatcttgtaagcacaacaaaaattctttcgggatttctattggttcattgtctggatataaaacaatgtggacataatctcctgcctgtttctgtatctttttgcggatttcagcattgacagccagaaacagaaccccctttccagatggcattacatccccagatggcattaaacggtaacctttgatttgataactgtcaattgttcctcgtactttcacccaattgaacggggcattggggtctggcctaatttcaggaataatcgtatatgtccaaccgtacttgccgggcaatttctcaagtaaatattctttatcgactaatttttcatccatgtttttaaaacatatatatagtgagcaaaggtacaaaaaactgaggtaaattactcatttacttcaactttttgtttaatggacaatgaaatagagttatgattttattccttgcctctcctgtcgttcttgtagtttaatctcagtgaagagcagaaactgcaaatgtaaccattcttatataggtgtgaggtgtttataaaaaaatctattattgctcttttatcaaaatgttatgtttatattcgcaaaaaaacagaaactgattattaaggaaggatattatgcttgcatatacatacatcgaacatggaagattcggtctgttggacaagccaaagcccgaattgaaggactctcgcgacgctattgtccgcgtgacacttggtagcatctgtaccagtgatttgcatatcaaacatggcagtgtgccgcgtgctgttccgggaataacggtagggcatgaaatggtgggcgttgttgaacaggttgggagtcgtgttacttcggtcaaaccaggcgacagggttactgtcaatgttgagactttttgcggtgagtgttttttctgccaacacggatatgtgaataactgtacggatgtgaatggtggttgggcattaggatgccgtattgacggcggccaggcggagtatgtcagggttccttatgccgaccggggattgaaccgcattcctgattcggtgagtgatgagcaggcgctttttgtaggcgatgtgctggctacgggattttgggcggcacgcatttcggagatttccggggatgatacggttcttgtcataggagccggccctacggggatatgtactttgctttgcgtgatgctgaagaaaccgaagcgtatcattgtttgtgaaaagtcttctgaaagaattcggtttatccgtgaacattatcctgatgtattggtgacggagccggaagagtgtaaggagtttgtacttcgtaacagcgatcacggaggcgctgatgtcgtgctggaagtggcaggagccggagacactttccgcctggcgtgggaatgtgcccgtcccaatgcggtggttacggttgtggcgctttatgacaatcctcaaatacttcctttgcccgatatgtatggtaagaatctgactttcaagaccggtggagtggatggatgcgattgtgccgagattctccgtttgatagaggcgggaaagattgataccacgccgcttatcacacaccgttttcccctgacaaaaatcgaagaagcataccgcgtattcgaaaacaggctggacggggtgattaaagtggcgatagcgggaaaataaaaacaagcttcaggctttattttcctgttttattttccggaagctggtgtgcgaagttgccagaaagctacggcagcagcggcagccacattaagcgagtcgacgccgtgcgacatggggatgcggactacgtagtcgctcccggcaatggtttcgcgtgacagtccgtctccttcggtacccattatgatagccagcttaggttcggcggtcaaggcaggattgtcgataggtatggagttgtcggtaagcgccatagctgccgtgcggaaacctaagtcgttcagtctgccgataggagcgtccagccaagtccatggtacgaggaataccgaccccatggataccctgaccgcacgccggttgagcgggtcgcaagaggtgggggtgagcagcacggcatctatgccgagagcggcagccgaacggaagattgctcctatgttggttgtatcgaccacgccgtctatcactacgatacgccgggcttcccggcatacttcctcaaggctgagtggcgtggggcgacgcatggcgcaaaggacgccgcgggtcagggtatatccggtaagcgtggcaagcaactctcttgttcctgtatagaccggaatgtctccgctgcgcccaatgatggttgcggcatcacccgtaatgtgtttctgttcgcataggagtgccagaggtttatatcctgcatcaatggcaacggaaatgactttgggactttccgcaatgaagatgcctttggtaggttcgatgcgattacgtagctgagcttcggtaagcgtgctgaaaatttccactccggggtgggatagggatgatatttcgatgatgggcatgtggctgtttcttttttgttattgtttttgatgtgttttcgtgaatcgggattaaaatcaaacaatgaaaaagaattactcttcattggagtccataaccttatctgccagtggaaccagctcaaattcaagaatgcttgccggtatctcgcattctttaaataagtagttcaagatattgcgtttggtgtttgtactgcaagaagtatgaacgtaacaatgttctgtcactttgcttcttcctttggcctcggaagcatgtatccagtaattcttaccggctacataggtcattgtagaaggactttcattgtatatgagtttgcagacttgtaccagcatttccacccagtttgagactgcatgccgttcgtttctgtagcgataaccgatgatttgccgccaactcagttcatattcgtcgtcgtcaaatgaaaccaactcatattccttttccagtggaacatattccgtctgtatcatcggccatagccggaggaagttttcaagaagaatctgttgtctttctttaatctcgtcaatagtccatttagaacattgttttagatagtttgacaaacagaaagccgagtttttaaaaccgttaatcttgtttcctttgcggtctgtgtatccgtcctttttctcctgaaacgagtggttgctgtatgacgtattgaatccggtaagggttaggttggcaaaagtgtggagataggtgtcatatatctgctgccagttttctcccagttcttctttccactgaggtgttagtgtctgaggcatgatgtgttctatggtgaatatgccgtccttcattttttttacgattgtatcatttgcctccggactgttttcattttccatacgttcgaacaggaagaacttatagttgcttggaatacgataaatctgtctggttggaaaggctgatttaacatcgttgtcgtttggaaatgatacggttccttgtttcctgagcaaaatgaatttgaggatctgagagtacggtagaagtaactcggcatctctttccttatggcgtttgtatatcttcaaaatatcattatggagagtagcaaacatcttttgaagcgcatttgcagggtagttgcagataatccggcgggcccagtagttttcgattgtgtctaatacttcatactgttcggtttcgttcaggttattcgttgacgcatagtcaaagaacgacaacaggtagggcaagtgtacaagagattctatggtcgcaatctgtttcagcttgcggttgagacgggcatggctggtttcgcctttgagtatctgccgatagtatttggcaaacttcaacatatcttcaaggaggatttgacggtcgatgtgagacttcatatcgtatgatttgaagtcaaaatataagtcctcaatattgctgatcgtgcctttctttagtgtcagataatcacggataaacattgttggctctccatctgtcagtttttctattttgctctagtaggcatggtagtagtcttcctgcttcttggaagaaagtgacatgagcagatagttgcgtaccttatctgcctcttcaaggtctttgccgcacgagtttagagattcaaaaatcaactgtggattatctttcgcttccaaacgaatatcaatcacttccagtttctcgatggctttaataagctcctcaaaagtgaggttgcttatctgaattaattggtaaaaaagttcgtagtttgcagtaatgcctgtattcttgatgaaatcatctgaattgttggtaaacagtgcatcatatgcttcgatatctccttcaatcgggcgcagttttatctgtctgtcaattctttttcttatggcatagagatagtttttccttacttcctcaatatcttcattgccaggttgcatatcgccattggcaactgcattgaaagcggccagaatcaggagcgataaagttgtgatacgctgctgaccatcgataatcagcaaatcgtcttcaacctcgctggcttttgttgcaacaatacttccgaaaaaatggctttgcaattcttctttatgaatttttatcagatcttcaaataaacgtacacaatgctttttctgccatgcatacttacgctggtagaggggtataataaactgtgtctttgcgccgtagaaatagtcactaatatttaccgaacctttcattttttgcttttagtttaacagacttcaattgttaagtttgactcatagctgtgcaagaatatgcgcaatctatggttactctcataaccgagttcgatataaaaacggggttagacccgaagaataccgtttctcttgtgttttatactctaacataacataatatggtgttagagtgataagcttttcattgataataaataagatagcaataaaatgttaagtttatagtgccggattgtaacatttaaacgtttactgctatgttatcagcggctaaagttacagagatttattgtatgacggatgattttgcagggaatttatgttgcacaggaaaaaatatatggttgggaataaaatactgcaatatgttcaaattgtatgtaagtatccgataaagtacacattatatagttagggaatcctcagttactttgcaatcaaaaaagacataaaacttcttcatgctgaaaacggaggtgtggtactctatgtaaacgtttggaaaagagtatgctccacttgtcgccctatgacagcaaaaccaggtattatgcattggggtggaggaatttggtaatgatggtagaaggtataagtgataatcttaccgatgcagatagaatgggaaaatatatcttatagctggtaatcatgatattaagaatctcaggcagaattatacgaagtactttgaacagataacgatgcagatgcatattgaagtaaataaacagaaaatttatctgaaccattgtcccttcctttgttatggaggagcttactgtggtacatggtagcttttcggacatgtacataccagcaggtataacaccggaaaggatgttccgcgatggaaaatgcttttcccgaaaaactttatgaggaaaattgcgaaattggacatataacaaatacaaaatataggatttataatcagttactatgaatctgacgataagttttcacaaaaaaaattagtttt

SEQ ID NO: 4154 - DNA, 4974 bp, Unknown
  gut microbiota DNA sequence
atcgtgcattacgacacaccttctttttatttcagtactaaaaaggctcagtgccaagaagaaaaatgtacatctttatctatactgaccaaacccgttttttgcgtaaaatatctaaatatacaaagaagccaaccaatccacaatacatttcaaacgtgaattagttggctttttatattgcagagttacaccccatacacctgagatgaacttctgtcatcaaaagattataccagttttgacaatgcttccttgatacggctaatagcttccacaatattctcatcgctggtagcataactcatgcgaatacattcgggagcaccaaacgatgtgccgcctacacaagctacatgagctacttccaacaagtacatagccaaatcatccgaattctcaatcttacggtcaccggcagacttaccgaagaatgagctacatttcgggaacaagtagaaagcaccttccggtacatttacttcgaatcccggtacttccttagccagtttcacaataaggtcgcgacggcgttcaaaagccttacgcatctcttccaccggagcctgcgttcccgtataagcagcttcagcggctttctgagatacagaacacggccctgatgtgtactgcccctgcaatttgttagaagcctttacaatccattccggtcctgcaatgaaaccaatacgccagcctgtcatggcataagccttggaaacaccgtttacaatcactgtacgatccttcatttcagggaactgtgctatgctctggtgcttaccgatataattgatatgttcataaatttcatcagctatgacaattacctgcggatgctttgccaacacggcaaccaatccggccaattcctccttgctatatacagaccccgtaggattggaaggagaacagagaattagtgcttttgtttttggcgtaatagcagcctccaattgagccggtgtaatcttgaagtcctgctcgatgcccgctgtgacaatcaccggcttaccttctgccagctttaccatttcaggatagctgacccaatacggcgcaggcacaatcacttcatcacctggattcaccaataccagaatggcattgcaaaccgactgtttagctccgttagcacaagaaatttgcgcaactgtatagtccagaccattctccttcttcaatttttctacgatagcattacgtagagctggataacccggaacgggagaatagcgagagaagttatcgtctatcgccttttttgcagcctctttaatgtggtcgggtgtattaaaatcaggttctccgacacttaaattaattacgtctacaccttgagctttcaactctgcacttttttgagacatagccagcgtcgcagagggcgacaagctattcaaacggtctgataattggttcattctatttctatttaatggttgttatgcaaatccggttgcaaaataaacgattttctttgatataataaaacaaaaagacagttacttactaaaatggagagtgtgtcccatacgctctttcttcgtacgcaagtaacgctcgttatactggttcggagtagtttcaaccggtacattctctacaatctccagaccataagcttccaaaccgacacgtttcaccggattgtttgtaagcagacgcatcttatgcacccccaattcacgcagtatctgagcccccacaccataatcgcgttcatctgccagatgcccgagacaaatgttggcatctactgtatccataccgtcttcctgaagtttatacgctctcattttttccatcagaccaatgcctcgaccttcctggttgagatatacgataactcctttaccggctttttctatcacctccatcgccttgtgcaactgctcgccgcaatcacaacgcatggaaccgaatatatcccccgtagcacaggaagaatgtacacgcaccaacaccggttcatcgggagcccaagtacccttaaacaaggccacatgctccaatccgttggacttctgacggaaaggaatcaagcggaaatgtccatgctctgtcggcatatccacctctacacctttttctacgatagattcctgttgcaaacggtaagctatcatatcgcggatagaaatcagtttcaaattaaattcatctgccattttacgcaattcgggcaaacgtgccatcgtaccgtcttcgttcatgatctccataagcgcgccggcaggatagaaacccgacaaacgacacatatcaatcgtagcttcggtatgcccagcacgacgtaatacccctttctcctgcgcatacaaaggattgatatgtccggggcgaccgaaagtagccggagtggaaagcggatcggccagtgcctgaatggttgcagcacggtctgctgcagaaacaccggttgtacaaccttctaatttatcgacagtcaccgtaaaaggagtacccaataccgaggtattgtccgtcacctgatgaggtaaatccagctctttgcaacgagacaccgtaatcggagcacacaatactccacgtgcatgcttcagcataaaattcactttttccgatgttatcttttctgctgcaataatcaagtctccttcattttcacgatcttcatcatcgactacaatcacgaaattgccagccttaaaatcttcaatggcctcctctatcgtatttaactttactttttccatatctttattatttattctgattgacttttataatattctgtatctcttcgtttgtgtggataatccgctccatgtctttattcaagcggatacggaatgcccaaatacggaaataaaagaacaagccgacaggcactatcgctccacacagcatattcaaccaataattacggaaaggacgcacatgggcatgaacagctattaccgggtaattattcaatgctgtcaacaatggtatagaccttgtgttagacatctcgtctatcaaagtttccaaccgttcattgagagccaccacctcctcatcgtgtggcgcatcgttcatccataatctgaaataattgggtgctcgcatcagagttttcttttcggcatacgcacggcaatccgccgacagccgctgaagttctcccggcaaacgtacataatcaggatcgtgaataatcacttctttccggaacaaatggcggacactgcggatacctgctatctttttaaaccaattgatataggcatcagcattcagcaccaccgaatcattattggatttataagtaaggaatgcacccaatggcgccagcacagctgtactggtccacatacccatccacacaatccacttaccgtcacgagccatcttataacccgtattgttgataatgtaatagatgataaaaataagcacggacactactacaggcatgcccaaaccgcctttacggatgataccccccaacggtgcaccgatgaagaaaaaaataaggcatgccaacgaaagcgtcagtttctcgtgccaggaagtcatatggcgcctcaaactgttttccgtctgcgatatattgaaacccttgaaactccaatcacttgcagcactctccgcacggctgacagccgtagacattatcttctgtttctgcattaaagtagccacattaaacagactgtccacatcgtagctacccaaagtcgcagattctatttttatcgtatcagccttactcagcgtattggaggtcgccttataagtactcgccatagcctctttataataagtacgcccgatgctatcgttctgcaccttcatagaatcaatgccggcctgcagcattttcatgtccttgctattggattggttgctcataaatccggcatccaccatattgaaatccgagttgaactctataatcgcatgcttctcaacgaacgcttcccgacgataaggcacatttttctgattcatgctctgcgacttcagattttcaaactgctcaccgctgtaaaggtgaagataaagatgctgtttgtccgctgtcatttccaatctgccggaatccgatttgataatctgcgcattctcaaaccctttctcgaaattataaatcaatacatcgtacagcatacctgtcttacggtttttatgctttacgtaaaggttatacccgtctatctcatcataaaatactccttcgggaatgtccacttcaggcgacttctgcttcatggatactagcaatgtccataacttagtctgcgctttagggccaataacattctgaaaataaaaggaaacgcagcaaataatggatatgaaaattatcagcggacgcataatcttaagcaaagaaatacctgccgctttcatggcaagcaattcaaaccgctctccaaaattgccaaaagtgataagagctgccagcaaaatagccaaaggcaatgaagccggcaccagcgtcagcgccgaatagaaaaaaaattgggcaagaacattcatctccaatccttttcccaccatttcgtctacatatttccacagaaactgcatcatgaagatgaaaaggcagataaagaaagtgcccataaagagcatgcaaaagctctttaaaataaatatatctaacttttttatgcgcagcattttacttgtttcatgcaataaacgcacaaaagtagcacaaaaaagggagtacgggaaatttttaattgaaagttaactaaaaaccgcatgttctacgcaaggtatctacctgagattcccacaattcacgcaaatcatttgcttcgtctgcattggtgaaatctgttatttcaagtacaaaatcattggttaactcattgtttgtcatctttaattcaaaatactcacgcggtttttcattatccaaccaacgaaagcggataaaagagtatgcacgcactgcaatgatttcagcatcacgtctctctgtctttccccaaaagaaagatactatcttat

SEQ ID NO: 4155 - DNA, 18565 bp, Unknown
  gut microbiota DNA sequence
aacgaccggttgtctcaattataaaatcattttaagaagaaatacctttataattaattggcgaaaaatttctttattcaagtagaaatatctttctttgtactgctgattttaaaaatttggaattgaataccaacattaataaaaactgttatgaaaatttcgcacattgaacatttaggcattgctgtaaaaagcattgaagaagcacttccgtactacgaaaatgtattaggtttaaaatgctacaacattgaaaccgtagaagatcaaaaggtaagaaccgctttcttgaaagtaggtgacgtgaaaattgagttgctcgaacccacttctcccgaaagcaccattgccaaattcatcgaaaagaacaacggtaacggcggtatgcaccatttggcatttgctgtggaagacggagtggcaaacgctctcgcagaagttgaaggaaaaggtatccgcctgattgacaaagctccccgtaaaggtgcggaaggcttgaacatcgcattcctgcatccgaaatccacactcggcgtattgacggaactttgcgaaaaaggagaataaagatttatggtttgaaatcataaatccgaaaacataaatctgaaatcataaatcataaataaagaatatgagtaatcaacttgagaaaattaaagagcttattgaccgccgtacggctgcgcgtcttggtggtggtgaaaaagcgattgcaaagcaacatgagaaagggaaatatacagctcgcgagcgtatagcaatgttactcgatgaaggaagtttcgaagaaatggacatgtttgttgagcacagatgtacgaatttcggtatggaaaagaaacactaccccggcgacggtgtggttaccggttgcggtaccatcgacggtcgcttggtctacattttcgcacaggatttcactgtttctgccggttcattgtcggaaaccatgtctttgaaaatttgcaaaatcatggatcaagcaatgaagatgggtgctccctgtatcggtatcaatgactcgggtggtgcacgtattcaagaaggtatcaatgctttagccggatatgccgagattttccaacgcaatattcttgcttccggcgttattccccaaatttccggtatcttcggtccttgtgccggtggtgcggtttattctcctgccctgactgactttacactaatgatggaaggaacgtcctacatgttccttactggtccgaaagtggtaaagaccgtaaccggagaagatgtcagccaggaaaatttgggtggtgcaagcgtacactctaccaaatccggtgtaactcacttcactgcaaagaccgaagaagaaggtcttgcacttatccgcaagctactgagctacattcctcaaaataatttggaagaagctccttacacagattgtacagatcccatcgaccgtttggaagattctctgaacgatattatccctgacaatccgaacaagccttacgatatgtacgaagttatcggtgctatcgttgacaacggagagttccttgaaattcagaaagactattccaagaatatcattatcggttttgcccgtttcaacggacaatcagtcggcattgtagccaaccagcccaaatatctggcaggtgtacttgatagcaacgcttctcgaaagggtgcacgtttcgtccgtttctgcgatgctttcaatattcctatcgtatctttggtagatgtaccgggcttccttcccggaaccggtcaggagtacaacggtgttatcctgcacggtgccaaattgctgtatgcctacggtgaagctaccgtacctaaagttactatcaccctacgcaaatcctatggcggttcgcacatcgtaatgagctgtaagcaacttcgtggtgacatgaactatgcatggcctactgctgaaatcgcagttatgggtggtgcaggtgcggtagaagttctgtatgcacgcgaggccaaagagcaagaaaatccggctcagttcctagctgaaaaagaagctgaatataccaaactgtttgccaatccttacaatgcagccaagtatggctatatcgatgatgttatcgaaccgcgcaacacgcgtttccgcattatccgcgccctgcaacaactgcaaaccaagaaattgaccaacccggccaagaaacatggtaatattcctctttaagaattgagaattaacagttgagaattaaaaaataaaaactcaaatttatgaataaaacaaaaatcggaatattcctttcattgatgctggtgctagggttctgttcttcttgtggagaaaaggagtcaaactctaaactgttgctgaatgaagtgcttatcaccaacgaaagcaactttcaggatgattacggtgttcacagcgcatggattgagatattcaacaaatcatatggcagcgccgaccttgcaggttgctatctgaaattcagcagccaaccgggtgacaccgctacctatttcatcccgaaaggtgatgtcctgactttggtaaaacctcgtcagcacgcgctgttttgggcagacggagaacctaatcgcggtactttccataccaactttaagttagacagccagaacgccaattggatcggcttatacgattccggcaagaaattactggaccagattgtggtacccgccggaacattacaagccaaccaatcttatgcacgtgtcagtgatgccactccggaatgggaagtaaaaggagatgcgtccgataagtatgtaactccaagcaccaataacaaaaccattgacagcaatgctaaaatggagaagtttgaagagcatgacagtataggtatcggtatggctatttccgccatgagtgtagtattttccggattactccttctttatatctctttcaagattataggcaagatttctgtaaacctcagcaaacgtaacgcaatgcgcgctaagggcattaccgataaaaaagaggctaaagaaaaacaactgggagaagcaccgggtgaagtattcgcagccatttccctggcattgcacgaaatgcagagtgatgtacacgatgtggaagacaccgtactcaccattacccgcgtaaaacgcagctattcaccttggagttcaaagatttacacgttgcgtgaaacccctcagagaaagtaaagtcacctttaataaagataaaacgatgaaagaatataaatacaaaatcaacggtaacgcatataaagttactattggagatattgaagacaacatcgctcacgtagaagtgaacggtactccctacaaagtagaaatggaaaaagctccgaaagttgcagtcaaaccggtagtacgccctgttagtgcagccccagctgccccgactgctccagttgtaaaaccggctgctgcttcaacaggcaagtcaggtgtaaaatctccgctgccaggtgttatccttgacatcaaagtcaatgtgggtgataccgtgaagaaaggccaggttatcattatcctggaggccatgaaaatggagaacaatatcaatgccgacaaagacggtaaaattaccgctattaatgttagtaaaggagaatccgtactcgaaggtactgaccttgtaattattgaataatatgggagaatttatcacatttttaggaaataaccttgcagacttctggacttatacaggttttgccaatgcaacaggcggacatctggtaatgattctggtaggtttattcttcatatacttggctgttgccaaggaatttgagccgatgttgctgattcctatcggtttcggtatgctgatcggtaatatccctttcaatatggaagccggattaaaagtcggtatctatgaggaagggtctgtacttaacattctgtatcaaggggtaacttccggttggtatccgccacttattttcctgggtatcggagctatgacggatttctccgctctaatctctaacccgaagctgatgctagtcggtgctgccgcacaattcggtattttcggtgcatatatgactgctttggctatcggattcgatccgatgcaagctggtgctatcggtatcatcggtggtgccgatggtccgacagccattttcctttcgtccaaactggctcccaacctgatgggtgcaattgccgtgtccgcctattcctatatggcattagtaccggtaatccaaccgcctatcatgcgtctgctgaccagcaagaacgagcgccttatccgcatgaaaccgccacgtgcagtttctcatacggaaaaagtaatgttcccgattatcggtctgttacttacctgtttccttgttccgtccggtttgcctttgttaggtatgctatttttcggtaacttactaaaagagagtggtgtaacccgccgtctggctaacacagccagcggtccgctgattgataccatcacaattctgcttggtctgactgtaggtgcttccacacaagcatccgaattcctgactacagactcattgtggatttttggtctgggtgcattctcattcattatcgcaaccgcttccggtgtaatcttcgtgaagatattcaatatcttcctgaagaaaggcaacaagattaatccgctgattggtaatgcaggcgtatctgcagtgcctgactccgcacgtatctctcaagtagtaggtttggaatatgatccaaccaactacctgttgatgcatgccatgggtccgaacgtagcgggcgttatcggctcagcagtagctgccggtattctgttgggattcctgatgtaagcagtgaaaacgtttgcataacctgcataaaggataatagcggagaggtaacagccttctccgctattttttttaatttagcggagaaaataacgaaaagctaatatcatgaaaaaagtattcttcattttaggaacactcctactttccctcagtacgtacgcagccatgaacgtaaacaaaatcgatccaccattttggtacactggtatgcaaaaccccgaacttcagctaatggtatatggtgaaggcatcggcaatgcaacggtatctgtcaactatcccggcgtctcgctgagcagcacagtcaaattggaaagcaataattacctgctggtctacctcagactggataaaaacgtgaaacccggtaaaatgccactcaccttcacgcaaggcaagaaaaagttcgtcaaagaatatgagctaaaagaacgtgccaaaaaaggctgcgagcacaaaggtttcgatgcatccgacgcactctatctgttaatgcccgaccgttttgccaacggcaacccggacaacgaccaaatagcaggcatggcagaatataaggtagaccgcaacgacccaaatgctcgtcatggcggcgacctcgcaggtatcgaacagcaccttgattacttttccgatttgggcgtaactgccttgtggtttactccggtattggaaaacaacatgaccggcggttcctaccacggctatgccaccaccgattattataaagtagatccccgcttcggcaccaatgaagagtataagcagctcatcgaaaaatctcatacacgcggcattaaaatcgtaatggatatgattttcaaccactgcggtgtagagcatatatggataaaagacatgccttgcaaagattggttcaacaaccccgaccatgaaaataactttgtgcagacatccttcaaactgactccccacgtagacccttatgcttcgaaatacgatttcagccagatgaatgacggttggttcgtaaccgccatgcccgacctcaaccaaaagaatccgcatgtataccgttatctcgttcagaacagtttctggtggattgaatatgccgacatagacggtatccgtatggatacttacccctatgccgactatgatgccatgagcaattggatgaaagagttgaatgaagaataccctaactataacaccgtaggcgaaacatgggtaaccgaaccggcatataccgcatggtggcaaaaggactccaaactgtccgctcctaaaaacagcaatctgaagacggtaatggatttcagtttctatgataaaatcaacattgccaaaacggaggaaacagaaacttggtttaaaggattagaccgagtgtataacagtttcgtatatgattttctttatccgaatccggaatcggtactcgctttcatcgagaatcacgacaccgaccgctttttgggtgaaggcgaaaaccttccgatgctgaaacaagcctctaccctgttactcaccacccgacgcattccgcaattatactacggaacggagattatgatgaacggcataaagagcaagagcgacggttatgttcgtaaagacttccccggcggctgggcagacgataaagaaaccgcactgacagccgaaggccgcagcaaaattcaaaacgattgctacaatttctacaaaacaatactgaattggcgtaaaggaaacaatgtgattgccaaaggcagtatgactcagtttatggtacaaaacggcgtatatgcctatgcccgtcagtatgagggcaaaattgttttcgtaatgctgaacggtacagattcagaaaccaccgttcctttaaaattctacaaagaaattttgaaagacaagaaacaaggaaaagatattctaagcggcaaaacaattctctttgaaaaagagttgaagatggaagcgcgtgaatccctgatcatcgaattgtaaataaattcaagtttgacataaatcaggtacgaactaaataaatccataaagtccgtacctaaaaacaaatagggagtgcattaaaatgcactccctatttttataatcagattaaccttatcagtccaattgagccaatttgttttcagaaccaagcacgttaacgattttgtgcttgtaaagtttctccatgttgtcacgagccggacccagatatttacgcgggtcaaattcagccggtttctcagcaaacaccttacgaacagcagcagtcatagccaaacgagagtctgagtcgatattgattttgcaaacagcagacttcgcagccttgcgcagttgctcttcgggaataccgatagctgcttccaacttaccgccgaattgattgatagtatcaacttcttcctgaggaaccgaagaagaaccgtgaagaacgatagggaattcaggaagtttctccattacagcatccaatacggcaaattccaaaggaggaggaaccagacgacctgtagcaggatctacgtggcattgttcgggtttgaacttgtatgcaccgtgagaagtaccgatagaaatagccaaagagtcacaacctgtacgagtagcgaaatcgataacttcttcaggattggtataagtatggtgttcagcagatacttcatcttctacaccagccaacacgccaagttcaccttccactgtaacatcgaattgatgagcataatcaacaaccttctttgtcaaagcaacattttcttcgtatggaagatgtgaaccgtcaatcattactgaggagaaacctgaatcgatacagcttttacaagtttcaaaagtatctccgtggtcaaggtgaagaacaatttcaggatgtttgcagcccagttccttagcatattccacagcgccctgagccatgtaacgcagcaaagtagcgttagcatattggcgagcacccttagatacctgaaggataaccggagacttagtctctactgcagccttgatgatagcctgcatctgttccatgttattgaagttgaatgcagggattgcatatccacctttgatagcgcgagcaaacatttctcttgtgtttacaaggcctaaatctttgtaattaaccattttgtttaaagtttattgttagtgaattaaaattctacgcaaaagtaagcattatcctttaaaaagaagaacaagagaagaataaaatacctctactcaccagtcaaatccattctattttaaagctattggcttgaattaacagaatattgtaatctctatattacaaagtttttgcatctgtctgttcattctctccttttgcgttcttacctctataaacaaaaaagccggaaagcgagtttgttttccggcctgttatttacacattattatatattatcttttcagatagataatcgtaggtaaatggtcgctgtaaccgttcagccatacgcgcccgccatgagtacgcaaaggtgaacctttgtatttaccatcctgctgaatcaggtagtcgcggataaaaacctcgctatggtcgtaacgcagtccttttttcgctttcaccaacggtctggacagtacaatctggtcgaacagattccacttgccacgatagagcaaggttcccacacccttatcctccagtatttcccaccagggattgaagaactgattggctttcatgcccgatatatatttacgggcccctaaagtctgcatgctttcatccatcggatcgtcattcatatctcccataacaaagagtttcagctttttgtcttcatgcatcaaggagtccgtcaacgcctttacctgcctggcggcatgcacccgcaccggtgatttcgctccgcgggaaggccagtgattcacaatgaaacacacacgctcacccgccattctaccgtctacaataaggaaaccgcgcgtcagatgcaccgtatccccttcaaacggagcggaaagtaccagtttagagttcgtcacggcaaactgttgcggatcatacaaaagtgcacagtcaatgccacgtctgtcgggtccctcataatgaacaaacttatagttagccatagccggctgactgacaagatccgtcagtaccctatgattctcgacttctgccacgccaattactgccggtccctcaggaaccagattacgcgacaaggcactcaacacgtccgagagattatgcagtttagcttcgtactttttcgcagtccaccggtaactgccatcaggcaggaagtcatagtcattcttacctgcatcatggatggtatcaaacagattctcaagattataaaacgctatgctatacagtttgcgttccgtgttctgggctacaactattgtaacgctgaaccaaaaagaaaagaatacaatcagttttctcataggtgatatgatattaatctcctgcaaaaatctaaaataaaaagttataaacctatcaattgccagcttttttttgcaaaaaaccttttttcatttcatagaaaagcattatctttgcgcactgaaaaagaccattacactatttattaccaaaatagtaacagaatataaattaaaaaacaaatatcgaaatgaaaaaaggtattcatcctgaaaattaccgtccggtagtatttaaagatatgtcaaacggcgatgtgttcttgtctcgttctacagtaaatactaaggagactatcgagttcgaaggcgaaacttatccgttggtaaagttggaaatctccagcacttctcacccgttctacactggtaagtctaagttggttgacacagccggtcgtgttgataaattcatgagccgttacggtaaccgtaagaaataatctgtttttcaaagaaacggaaaaagggaatctgctacagattcccttttttactatatgcatactacccaacgtcagtcccatgcaagacataatttccacggaaaccgcatcatcctgtttaggtaaatcagactttcccgcggaacggcggacgcaccaccacagccttcaacttacggccgcgcatatcaatacagatttccgtaccaaccttactatattcgggcttcacataccccataccgataccgattttacgggtaggcgacattgtgcccgaagtaaccactccaataggagtaccttccggattctgtaactcataaccgtgacggggaataccgcgatctaccatttcaaaaccgaccaatttacgtaccgtaccctccgtcttctgtttctccagcattggacgattgataaagttcttaccctctacaaacttggtaatccatcccaatccagcttcaataggtgacgtggtatcatccaggtcatttccatacaggcagaatcccatttcaaggcgaagcgtatcacgagcacccaaaccgataggtttgataccgaactccgcaccagcctcaaacacggcattccatatttttattgcagcttcaggatagaaatagagttcaaaaccaccggctccagtataaccggtattggagattataacatccggctcacctgcaaattcaccatgcgtaaaggtgtaatacgaaagttcggaaagattaacaggtgtcagtttctgcaatgcttcgatagctttcggaccttgtaccgcaagctgcgccatacggtcggaagcattctccaactcagctcccatcgtattatgagacatacaccagttccagtctttctcgatattggaagcattgactaccaacagatatttctcctgctcgtaccggtagaccaataaatcgtctacaataccgccatcctcattgggaaagcaagtatattgtaccttaccgggagtaagggctgctacgttattagaggtgactgtctgtaaaaagtccaaagcatgcggacctttcacccaaaattctcccatgtgggagacgtcaaacacaccgacaccctgacaaacagtaagatgttcatcaatgataccggaatattcgataggcatattgtatcccgcaaattcgtgcatcttagctcccagcgagatgtgcgtttctgtaaatggagtggttttcatggtgtgacttataagttatagattatgatttatttgtcagcggcaacgagttcggctatcttgacgataacattcatggctttctccatattctgaataggaataaattcgtaacgtccgtggaaattcagaccaccggcaaagatgttggggcacggcaagcctttgaacgaaagttgcgcaccgtccgtaccgccacgaatagcttttacgtgaggctctacaccgacggcttccatagctttaaaagctgtatcgatgatatgcatcaccggctcaatcttctcacgcatattataatattggtcatgtagttcgagtgcggctgtaccctcgccatattcggcattaattttgcagacaaggtgttcaaattctttcttgcggctctcaaaacggacacggtcgtgatcgcgaataatgtaagtaaccgtggtctgctccacttcacccgtaattccaataagatgatagaagccctcgtacccctcggtatgttccggtgtttcgtggctgggcaacatggaaataaaacgattggctacgcggatagaatttatcatcttgtttttggcatagcccggatgtacattgcgtcccttgaaaacaatcttggcagaagccgcattgaagttctcgaactccagttcgcctacttcaccgccatccatagtataagcccattcgcaaccgaattgctcaacattgaatttatgcgcacccaaaccgatttcctcatcgggattgaaaccgatacggattttaccatgtttgatttcagggtgttctttcagataagctactgccgaaacaatctccgcaataccggctttgtcatcggcacccaataatgtttttccgttagtaacaatcaaatcttctcccttatggtcgagcaattcggggaatcgagcaggagaaagaactacttgctcatctgcgcaaagaacaatgtcctttccatcgtaattctctacaatgcgcggggaaacatctttcccgctcatatcgggactagtatccatatgggcaatgaagccgacaacaggtacagacttatctatattggcaggaagagtggcaaacagataaccgttctcatctaatgtaatctcttccaaccccaaagcttccaattcttctttcaagaacctggcaaataccatttgccccggagtactcggagttaccccactttcctcattcgattgcgtatcgaaacttacatactttaaaaaacgttctactaaagtcatgatgatagtgattatagttagtgattagtgattagcgattagtggttagtgatgaacgattaacggtcagtaggctacaaccgcgccctccttttatccgaacggcattaatcacttatcactaaaccctaatcactattttactgccgtaaaattaaaaaaaggattgtgaactgccaagcaattcacgaccctttttcattcattaataactattttgtcaatcaaaagtgactgctaccatcaaaacaatgggtacaaagtttacatttaggcagaccaatagcctcaaccaatgtttccagcgtattgaactttaatgatgacagtccaaaacgctcacggataacttctaccattttctcgtactccggcgaacccgtagtggcatatttctcaagatttttgttttcatcaccttccaactccttaatgacacggcgggtaatcaactccaaatctcctttggatgctgtgaagcctacaaacggacagctatatatcaacggcggacaggcaatacgaatatgtacttctttcgctccatactcataaagcacctttacattatcgcgcaactgagttccacggacaatggaatcgtcacaaaacagaaggcgtttaccttccagcatagcacggttaggaatgagtttcatctttgccaccaacgaacgcatttcctgcctgctgggagtgaaactacgcggccaagtcggagtatattttgaaatggcgcgatgataaggcactccctttccttcggcatatcccagcgccataccgacaccggaatcgggtatgccgcacgtacaatctacttccgaggtatcggtctgtcccattttcagtccggaaacaaagcgtacatcttccacattctttccctcatagcatgaagtgggaaagccataataaacccataggaaagaacatatctgcatctcctcattaggtttgcgcatctgctccaccccttctgcatgcagacggacaatctcgcccggtcccagatagcggtctatttcatatcccaagttcgggaaactactcgattcgcttgtggctgcatatgctccatctttcttaccgataacaatgggagtgcgcccccaacggtcgcgggcggcaataatgccgtcttcagtcagcagcagcatggaacatgaacctttaatatgcttgtatacattctcaatgccgtctacaaaagtcttaccttgtatcagcagcaaagcgataagttccgtttgattggttttgccggagcttaattcggcaaagtgcatattttgctccagaagttcggtttccaactctttcaggttcataatcttggcaaccgtaactatggcaaaacgaccgagatgggaatttaaaataagaggttgagggtctgtgtcactgataattccgatgccggaatttcccttgaacttatccagttcgtcttcaaatttcgtacggaaataggtactttccaaattatgaatggagcgtgtaaatacagcctcatcctgatcataagtagccaaaccgccacgttttgtccctaaatgcgaattataatctgtgccgtaaaacaaatccgccacgcaacttgccttggcgactgtcccgaaaaaacctcccataagttccttgtgttattagttattttattaacgggcacaaaggtacaaagaagtttccttgtgagcgatatattccacctctaaaaataataaaaaactccccgccaaaacaaagaagtcagtcctgcggggagtttaccaatacctaataagaatttctttttaccttaatcatttccattttttcacactcttcttctcagccggagtagcttcaatcaagctcaatgcgaaaccaccgctacgtgcttcccaaacggagattttggttttgttggttacaatacctttctttatctgataggaagtaggattctctttgtagtcggcatccttaccatcggcatacagagtagctacatattgcttgcccggcgtcagaaaatcgagagtaaagccggctgtgcgggcattttcatctgtaatgccgcctacaaaccaattatcagtacctttcgccttacgggctacggtaatgtaatctcccggttcagcttcaatatattcgctgtcgtcccaatctacggctacatctttgataaactgaaatgcatccatgtgcttctcgtaattctccactagatcggcagccatttgcaacggactgtaaagggttacataaagagccaactgcttggcaagcgtagtttgtacctgtccgtgaggcaggtcgcccatgaaatccagttttgtatcaaaaatacccggagtgtagtccatcggtccgccgataagacggttgaacggaagtagtgtggtatgaaacggcttgctaccgccaaatgcttcgtattcagtgccacgggcagattcgttgccgataagattcggataagtacggcacaaaccggtaggacgtacggcttcatggccgttgacacagattttatagtcggcagctttttttacggcataaagatagtgattgttcatccattgtccgtaatgatgttcgccacgcgggatgatatctcctacgtaaccgctcttcacagcattataaccgttatcgaccataaaccggtaagctttgtccatgtggcgttcgtagttgcggacggaagaagaagtctcatggtgcatcatcagtttaacacctttactcttggcatatgcattcaacatcttcacatcgaaatcggggtacggagtcacaaagtcgaaaacataatctttggagtgtccgaaccagtcttcccaaccttcgttccaaccttctaccagaacctggtcaaagccgtgggcagcggcaaaatctatgtatctcttcacgttctcattgttggcgccatgacgtccgttaggttttgttttggaatagtccgtttcgcccaacttaacagaaggcaggtcatccgtatacgcccaagtgcttttaccggcaatcatttcccaccatactcctacatatttcacaggtttaatccaagaaacatcttcataagcgcaaggttcgttcaaatttaaagtcaacttggaagcaagaatatcgcgtgcatcgtcactgacaatcaccgtacgccacggcgatttacagggagcttgcatataacctttatcacctactgcatcgggcgtcagccaagattcaaaaatcagatttttatcatccagattcagatgcatgcaggagtagtctaccaaggcagcttcgtgcagattgatatacaagccgtccgccgttttcatctgaagggaagtctgtacgcctgtcggagagaattgtgtctgcgacgcattaccggtaatggcagatttcataagaccgcggatttcagaaagtttggactctgtaaagtcatactcctgcgtatcataatcacccggaatccaaaacgccttatggtcacccgtcatggcaaattgggtacgttcttccttaataacaaagtagttcaaattcttttgtaaaggaaactcgtaacggaaaccgaggccatcatcgaaaagacggaaacggatgataatattacggtcttgcgctttttggtccagcgttacagccatttcattataatggttgcggatttgtttcacctcaccccacaccggttcccatgtttcgtcgaatgtagacgtttgggtatcggccagagtaaatccgttcatcagtcccggatcattcttcaattccaaacccagctttgagggctttataacagcttttcctttgtagaaaagttcataaacaggttcaccttgagaattgacggagaagtttaattgaagttgtccattgggcgaggtgatgctctcggccattgctgcactactcatagaaagtacgagcaggaagcaggttagtttaatgcaaattgctttcatgtttctcatgctatgatttataatttatttgatgcaaatataagcaggaaagtctcctgatttaaggttatcaaatgaaaatagatatgaaataaaagcaaacgtttgcataagtgattataaacctgttttttaaaagaaataccgctcactcggaaatacaaatggaatgaaaacactatctttgtcaactcaataccagacttcaattattatgactaaaatattgatagccatatttcttggcggcggcacaggcagcgtattgcgctattgcgtgcaaatggcactccatgaacggatagtaccctactcctttccttgggctacatttgccgtaaacatcatcggaagcttcctgataggattgttctacgtcttatccgcccgcttcaacttatccgcagaagtaagaatattgctgactaccggcttgtgtggtggcttcaccactttttccacattttccaacgacggattgattctgattaaacaaggattttacggattattcgccctatataccttattaagtatcttgttgggaatatttgcagtatggggcggaaatatcttagggaagaccttttaaaacagcaatcatgagaacaggcaaacccttcagcatgccgcccgtacgggtcatctcccccacttttgaaagtcaagtcgagagttccaaatcactcaaggaatggcttaggaccgaagaaactgtcagagggatatgtttcagcaaacaaacggaagaatcaatggattgttcttataaaagtatcaccaattgcactttcagccatgtacagttcaacaactgtaaactgaaagctactcactttacggatgtccgtttcgagcattgcgatttgtccaacatatcatttgcagaaagctctctttttcgggtagaattcatttcctgtaaactggtaggcacaaatctgccagaaacaatcctgaatcattgcaggatgcaggattgcaatgcgagatacctcaatttttccatgagtaaaatcaatcaggcggagttcaccacctgcgatttgcgtaacagcgacttcaacgactgcaagttgacttccatcgcttttaccaattgcgagttagtagaagcggaattttcgcatactccgctcaggggcattgacttgagcgattcgcatatcgagggtattcacgtcaatctgccggatatacggggagctatcgtcagtacccaccaagccatggacctgacaagcctgctgggactcgtaataaaagactgaacaattttccattttcacttgttatacctatggaatttacatttaaaataaaataagatgaaaatagaaaagattatcggacgtgagattcttgattcaagaggaaaccctaccgtagaagttgatgtaatattagagtccggctttatcggccgcgcttccgtaccctccggtgcatccactggcgaacatgaagccctagaactgcgtgacggtgataaaaaacgttatggtggcaagggagtactgaaagccgttaacaatattaataatatcatcgctcccaagttgattggcatgtcggttcttgaacagatgagtatcgaccataccatgctggccttggacggcacaaagaccaaatccaatctgggtgcaaatgcaatcttgggggtttcgcttgccgtagccaaagcagcggcggcataccttgatattcccctctatcgctatatcggtggaacaaatacatatgtaatgcctgttccgatgatgaatatcatcaatggcggttcgcacagtgatgcccccatcgctttccaggaatttatgatacgtccggtaggggcgaattctttccgtgaaggtctgcgcatgggcgcagaagtgttccacgccttaaagaaagtattgcatgaccgcggacttagtactgctgtaggcgacgagggcggtttcgctcccgacttgacaggcacagaagacgctttggactcgatcattgctgccattaaggctgccggctacgaaccgggcagggatgtgatgattgccatggactgcgcttcttccgaattctatcacgacggcatttacgattacagcaaattcgaaggtgagaaaggcaaaaaacgtacagccaacgagcaggtagattatctggaagagttgattgacaaatatcctatcgactctatcgaagacggcatgagcgaaaacgactgggatggctggaagaaactgaccgaccgcatcggaaaccgctgtcaactggtaggtgacgacctatttgtcaccaatgtagatttccttgccatgggtatcgaaaaaggttgcgcaaactccatactgattaaggtaaatcaaatcggctccctgacagaaacgctgaatgccatcgaaatggcgcaccgtcatggctacacgaccgttacgtcccatcgttccggcgaaacggaagattccacgattgcagacattgccgtagccaccaacagcggtcaaatcaagaccggttctttaagccg

SEQ ID NO: 4156 - DNA, 6262 bp, Unknown
  gut microbiota DNA sequence
ataaagacaggggtaatctttatcttttcatagaggaaagctacaaataaatccggtaaagaaaaatattttttctacaataagtcttgtattatgtagcgggaaattcatacctttgcatgcaaattaataaataggtaatatctattacaaaatgagcgaaaaagcaccttttatggtattctcaggaacaaactcgagataccttgcagaaaaaatctgcgccagccttaattgccctctaggaaaaatgaatatcacccactttgccgatggtgaattcgctgtttcttatgaagagtctatccgtggcgcaaatgtattcctggttcaatccactttccctaattccgacaatttgatggaacttctgctgatggttgatgcggccaaaagagcatctgccaaaagtgttattgcagtaattccttattttggttgggcacgtcaggacagaaaagacaaaccgcgtgtatccatcggcgccaagttggtagctgacctgctttcagttgcaggcatcgaccgtttgattactatggaccttcatgctgaccaaattcaaggtttcttcaacattccggttgaccatttgtatgcatcggcagtattccttccttatatcgaatcattaaagttggatgaccttgttattgcaactcccgacgtaggcggttcaaaacgtgccagcacattctccaaatacctcggtgtacctttggtattgtgcaacaagacccgtgagaaggcaaacgttgttgccaccatgcagattatcggtgacgtaaaagacaagaatgtagtattggtagatgatatagtagataccgcaggtactatcaccaaagcagccaacatcatgatggaagccggtgctaaatccgtacgtgccattgccagtcactgtgtcatgtccgatccggcatcattccgcgtacaggaatcaggcttgactgaaatggtatttacagacagcattccttactccaagaaatgcgataaggttaaacaattaagcattgccgatatgtttgccgaaactatcagaagagtcgtaagcaacgaatctatcagttctcaatatattatttgaaaattgagaattaagaaataaaaaataagggctgcgcagtattcattcagaatcgcgcagccctctctattttttagggacattttaccgaatgccccttttcattccctgatttcaattactcaaccttcccattttataggttcctttccgcaccagctttccatttttatccgtttccacaaacggaccgtcttttttgccttgtttgaagaaaccttcatagcggtttccgttcttatcttcctgcacgccactcccctcttccagaccatttacaaaaccgcctttgtattttgtaccgtcggtaagaatcagagttccctgaccgttgaatttattatctttccattcgccttcgtaggagtcaccgacgttccatttgtaaacgccatagccattgcgctggttgtctttccattgtccgtcatatacagcaccgttcgcccatgtaaacgtaccgtgtccgtcctgcataccgttcttgaagtttcctacatatttattgccgctggcatgatagtaaataccttcaccggtacgttcaccctgcacataagaaccttcgtaacggtcgcccgtatgaaagaagtaaatgcccttgccatgctgcatatcctctttccaatcacccacatacttatcaccattggcatattcaaacgtacctttgccatcacgcacatcattcttccattgaccgtcgtatttgcaaccgtcattccagactaacgtgccttcaccgtttttcttatcgtctttccacgaaccgatgtatttggaaccgttcttccaaacgtaagtaccctgaccttcacgcttgtcatttatccaatcgccttcataaaggtctccgttatagtagtacatagtacctttgccatgctggtaatcctgataccacataccgtcataacggttattattcataaaataatagatacctctgccgtgctgttggtcttgaaaccactggccgtcatacttttcaccgtcgggaaaagtgtaaattccatacccttcacgctttcctttaacgtactcgccttcatagacatcaccgtttttaaataccgtctttccctttccgttgggtttgcgtcctttcatctcaccggtatatacggaaccatccttaaacgtatgcgtccctatttttatttccgacgagaaagttccctttattttatcgaagaagccgcctttttcctgggctgcgacactgccctgtgacaagtataacagaaaaattgcagtatatagatatttcatcttggattacaagttacttaattagggttttgacaaagatacgattaatctgccaaaaccacgaggcggttcccgctttttatgacatttttttgccggatatgacttcttttaatttctctttgcacaaatgctttccggcaagttcgcgtatatcttcaggagtaatatctctgactgcgttcagagcatcttcaaagtgtgtatcgccaaaacccgaaacctgaacgaacatccacgcatctgccagtgagaatgccgattcataactgcggcacatttcgcccagcatataattctttaccattgccaattcttcttccggcaccagatcattctgcaagcaatctatttcatggtaaacctcccggataagaggctccacaaactcgtttgccgtttccgtattgataaccagcatttccggtcccggacaagaaacgatacctgcagaaataccataggtatatcccttttcttcacggatattggacatcagacggcttccgaaatatccgccaaacagcgttaccatcactctggtcttcaaataatcgggatgatggcgttccaaagaaagcatccccatgcgaaccgcactctgcatggcatccgcatgttctacaaaaatccgtttatccatggaagaaaccggaataaactcccgcctttccggtttgcggaagtctttgccgaacacttccttaccaaacatatcttctatccgccgtacacaatcatcgcccacctttccggaaacgtaaatcgtacagttccgggaatgataatgccggtcgtaaaactctctgagtacagcaggatttatcctgccataatcctctttctgcaccagccgtccgcaaggatgcacctcaccatatacagctttcatcagcgcccgatgcgccagaaaatccactttggacgagttgaccatgaactgctggatattattttctattataacacccagctccttctccggaaacacaggctcttttacgatggattccagtatttccaatgtctgaggcaaatatttgttcagcgaataaagagtaacatacgcatattccgatgcgctggacaactccagccaggcaccgtaatagtccaacttctccgctatttcccccgcactgtaccgaagcgtcccttcgcgcagcatacggttcgtaaacaaagcctgtaacggttgcgactgttgccagcgcccgccttccatcagcaggtctatgcgcacgacttcattatcgccagagtcaagcacattcaaagacacaccattgggcatagtgcaccgttggggcatctgtacggccaagtgctcaatgtccctcaccttaggctgaatggtcctgtccaaaagcatccccgaaccgatattcattgagcgtttcgtgcttgcaggaaacgttccgcatgttccaaatcctgcggtgtatcaataccgattgtctccacttcggtaataccggctttaatggtataaccgttttccagccagcgcaactgttccagcgactccgccagttcaagagaagactgcggaagcgaggttatctctttcaacacttccacccgataggcatataatccgatatgcttgtaatatgtatggtttttcagccactcccgcttctccgcattacgttggtacggaatgatagaacggctgaaataaagagcattcatgttcttgttgagcactactttgggagagtttacgttctccaatgcctcaaaaccgttatctgcagtaaagggttttactaaagtggcaatctgtgtggacggatcgtcaaaacaggcctttacggtctccagttgagacggctgtataaaaggttcatcgccctgaatgtttaccaccacatcaaagccttcccctactttggtacaagcctcataacaacggtctgtaccgcttttatgatgcacggacgtcattacaacttttccgccgaatgcttttacggcagcttcaatgcgctcgtcgtcggtagctacataagcatcatccaaaacaccggccacttgttcatatacccgttgaataacggtctttccgcccaacaaagccaaaggtttggcagggaaacgcgtagatgcgtaacgggcaggaattattcccaggaatttcatatctttaaaacttaaattaccacattattataaagaaacgtttcaatggcatttgtcgcctcagactttccatcattcaattctttcagtccgcggatgatatagtcccgctttaaatcttcgggtttatacaccctgctgtcacaagacagcaagtctatatcaagacgtacaatctcctgtttcttttcttcgggagtccttccagcttcccgttctatatccttcaaatggagtatgatttcatccgcatcagaatcggacgtgaaacgcgccacctgattggtaaacaacgcctgccgccggaaaaacaacggctctgtgtccgcttctgcagaaaaacggatattcggaaaaagttcggacagcctcttgcgtgccaacgccaaattctctttcctgttcacgttactgccgatgcagattgtgtacaccatttcccaattcttaattaaacaaatcgtccagtcccatttccgatgccggttccgcatccgcatcctcatatccgctgtccttgcaggggtcaaaaccttcaggcagctggaacgtttcgttttcatcataccccaaagacttgtcgccaagcacttttatcatatacttagcccagataggcaatgccatggaagcgccttgtccgtgcaacatcgtatcgaagtgaatatcacggtcttcaccgcccacccagcagccggacaccagcgaaggcgtaaagcccatgaaccagccgtcggcattatagttggtcgtaccggtcttgccacccatatcggcttttacgcccagacggcggacacgtccgcccgtaccttcattgacaactgcacgcagcattaccagcatcttataggcactggatgcgctgattacttcctgcatttccggcgagaatgtagccagcacattaccgtcgttatcctcaatacgggttacaaacagcggcgcaacacgaatacccttgttcgggaatgcggtataggcgcttaccatctctcctacggagacttcgcaaggaccgagacagagagacaccgaaggcacaatctcacggttgcgcacaccgaagctgtgcaccaaccgcttcaactcatacgggttcagtttgctcatcaggtatgctgtgatccagttgtccgaattggccaatccccacttcaccgtcaccatgtcaccataacgttttttattggcattgcgcggtgtccagggttttccgttttcgtctatcaatgtatattccacatgacgagcctggtcgcaaggagaaaaaccgttctccatagccagcgaatacacatacggtttcatggtagaaccgatttggcgacgtcccaccattgccatgtcatatttaaagtagtgatggttcgggccgcctacatacgcttttacatgaccgttacgcggatccatcgacatgaagccggcacgcaggaagaacttataataacgtatggaatccatcggagtcattacagtatctttctcaccgctccaactgaatacagacatttgttcgggcgtatcgaacgctttcctgatttccgcttcggaagctccggctctcttcatgatgcgatagcggtcggacagtctcatggcacggtccagaatttcgtctacctgttcttgcgtcaaacggaaagtataaggcgctttcttcgcacctttcttctctttgaagaagtagccctgcaattctttcagatgctcggtcacggcatcctctgcatatttctgcatgcggga

SEQ ID NO: 4157 - DNA, 19620 bp, Unknown
  gut microbiota DNA sequence
ttccagttcctgtatgactgaaagcgtaaaggttgttaaatctttcataatctgttggctttataatatttacagtctttgcgtgcgccattgctgcacgcgatataatatattgcattttattggaatttgtttgcttgcggacaatgttccggcttcgcagaggctttacatcctctctttgcaggtacggacacaccaagcgtatcgctacattggttccttccttgaagaaccgtttttatgggtgcacgccgagacgtcaggagcgttgttcatgccaaaagtagtttaagatagtgtataggaagtaaacgcatggtctgtcggagtgaaacagatggtctgtacggtacaaacagatggtctgtttacaccatacagaccatctgttttaaaagaaagcatgcactcattcttccctttcccgtttggattgtgcttccgggcgggatttcttttgagggatactgtccggagcggacgtattcttctccgcttgttttcttttcagccttttcaacttccacttgttccaaaagagcagttcattccatttgttgaaatccttcttgaagatgatgcctataccctgagtggtgaggttggtcttggtgtaatagcggtcgttggtttcgttataagctttcagacggatatcgccggaacggtttacgagccattcggcttggaagtcacctacgaagttggtgttcgccatcggattctcgcgatagccgaagttaccgtttatgagcaggcggttattcagcagttgcccggaaagcattgtctcgaactccatgtccgtccagcctttttctccggtactgaagtttgtgccgaagttccagttattgctgtcgataatctgcgagagtgcattgttcagttgtccggaaagggtagaagagagcacgctcgacatcatgttggagttgccggtggcgtctacattctccggagtatagaacttgccgatacctaaaaggtagagtatctgcatgttcatctgctcgtccgtagggatataattccgtaccaacgcctgtacttcgtcgcgttcgttgggcagctccaggctcattttgatgtccggtgaggtgagctgtccggtcagcgccatgaggcagttaaccttgatgttggtctggttgacgtaattgccggcatcgggaacgaggtcgttcagcgaagcggagtttacaagatagcctgcctggatgtcgagggtggcattgagcggcgcgccgttaaaggtgatggtacttccgtctttgatgatgaagtccttgcggataacttcctgcaggctgaatttataaactccctggctgatgcggtaactaccgaacattttcacatctcctttattgtagaattcggtgcggatattccccgttcctttaccgctgatgtagtcacctgcaatggggtccatgatgattttcatggtggcgtccggagttgcgtctatcaggagattcagtcgtatgtcggtgtcactttccttttccatgacttctttctgcgcctgctcgtattcggacatcagcatgatggaatcctgaagtacgcggcgcggtgtcttgtctacgaagcgtatgaactggttgctcactgccgaggcgacaccttctttcatataagtgaagttggtgttgcggttggtggtcattgccacgtcgatattcaccccgtctgccgcattgccggcaatggtggcgttgcctgtgccatacaccgtgccgtagaaggggaagtcgggtgattctttggtgttcataaccagcatattgtccacatcgaaccggaagcggtattccaaatccttgaaatgccggtagtgcaggtaaccgttggctctgccctgatgcccttgcgtatcgaagatgcggttgttgcggaaagtaagtccgcccggttcgataagtatgctgtctttcagggagaaagtagtgttgagtacatctaccttgagggaggcgtcaccgaatacgcgaccttccattgtcagcgccttgaacttgccgtagaaatgtacgtggccgctggcacgcccgttgaattcgggggtgatgctctgcatgtagtggtggatgaacttcaggttggtgctgtcggcttcgatttgcaagtcgagcgcactggtgggttttatggggtagatgtatccgtatacatggcttttggcaatgtctttctcgcggatacgggcatccaggtagatgcctttcacgtcgtgatgccattcgccgtgtatgttggcatcgcctaaaagaccctcgttcaagccgaggttgcgtatgaagaggtcggtactcattaccggctttttaagtattccgctggcatatgccgggccagtggcctcacctttgaagttgacacccaggtcggctatatcgaatacgtatcctatgtttatctctttcaggttcaggcgtacggtgtcctgaggttgttcggatacggttccgttgatttgcaagtgacgctctttatggctgaagtagaaattgttgacgtgcactttgcccgagtcgaccacgatttgcgaagggtgtatcttccatacggtgtcgttgaggattacgttcgtttcctgtacgttgacaatcgttttcagggcgggtttctctttttgggcttggcgggaggattttgtgtgtattttgtcgttgccagcttcttgggaagagttgcggacgaattgagtgagagccgctatcttgccgctgtaagttacagcgctgctgtttccccagttgaatatggtttgtatccggtcgtcctttgccttggcttcgagggctacgtttaccgcaccggttgttttccggttggtgaagcggacttttgcctggaactgttcacccggattttcgcagagaaccacacccgactcaaagaactttccgccgtaactcagccgtggaaagtacccctctacgcgcaaccgttgcgctttgtcgttgaaatagcccttcagagtagagtgggtatatactttcagcggtatctggaatacggtggagagtatctctgtatcgtagatatggaggtcgaaatggaaattgttttctgttttctgcggttttctggcgggctgtatcagagccggaatgtaacgccgcatgatgttgagcacgctggcgggtaatgtctgataggaatagtcgccttcgatagtaccgcgcaggaagttggaactgatagtcagccgtttctggcgctcatcgctctgagtggcagaaatccgcaggttgtccatgaagaagttctgttccggagcgatgtattggagactgtcgacgttgatttcaccgttcatgtcgttgatggagctaccggtgaagtcggcttttatttttacggccaattccgtgtccttgtatttgggtgtgaggtgcagggtgttagggcggaaatggtcgatagcggcacggaagttgaaggtgggtgtcttgccggcagtattgatagagccgttcagttgtatggctccgttttcgtcgttgagcgatacgttaccgttgaagccgccttgcttatactctccgtccaaagtgatgttttcgtaagtatagtcactgtagtctatggatgccaccagccctttcatggtaatggcggggtatctttgggcataatgattgcctttgacgtccatgttgaaggtgacttttccaagcttgtcgttgttcagcatcctgcccagttcgaatccggttgtctttaccgcacccgaataagcgaaatagcctttgtctttgtcggaactgagtttgacatctgtcttgatggtgcctatatccgtgcggacttcgccataggtcaccaggtccgtgaagtatccggaaatctctccacggaaagataccgtgcccagattctgcaataccggaggaactcctttgtaatctttactcaggttgcgtacaaagaatgcaatgccgtccgggtcggcatataaattggacagattgccgaatatgtatgcatcttgcggatgagacagatcctgcagggatacattgcctttcagcaggaagtgatcgttggaagagataagcagtttcgggcagttgagccggttgaccgttccggcggcttccatttccaacttcaacttttccttgaagggcttgaaggcaggcacgaatgccgatatatcctgtaatgctacttccgaaggcagcatacggaacgagaaacggacatcatcggtgaaatggccgagtgattccaggctgtcgtattccatacggatggtatccattgccaaagaggtgttgggcaaatctatggcgaagttctctatccgcatcttccggtcgttggctattatcttcagacttagctttttcagttcgaagccggagtgctcctcttcaacgctcatccgcttgatggcagcgttgaccgagtcgttctggagcgctttcagcgagatgttggcaagaatgttggacaggcggatgtgttgcgggttgaacttgcccggagtgctttcggctgacaacacatcgtaagatacctttccgcgtcgtatcaggagtgagttgatgcgcaggtccagattgctcttcttcttgacggtgtctttggaagcgaaagcatcgagcacgaattggaagttggtgcttgcctggggagtaggtctttccagattggcattgaaactgaaaagctgtacgttaccgatggatatctttccgctgaacagcggcagtatctcgaacttagcggacagacggcctattttcagcaactcttttcccgattggtcgttcagcaccaggtcgtcgatgataatccggttcagcagtcctatgtttatccgccctactgtgagctcgctacctaatacggtgctcagccccttggcaacgagtacagacatgcggtgctggacataaggaatgttcagcagcaaaattattccgatatagagtcctaacactataccgattatccagcgtactgtcgttttcagcgttctgataggcggttatttttttaattcagccaacaaaaatatgaaataatacgttatggatactacttttatcactacttttgtagcgtttaaacgtaaataaacactatgagtacaataatcttaggaattgaatcttcatgtgatgacacttccgcagcggttatcaaggatggctacctgctgtcgaatgtcgttgccagtcaggctgttcacgaagcttatggtggggtagtgcccgaactggcttcgcgtgcgcatcaacagaatatagtgccggtggtgcacgaggctttgaaacgtgccggagttaccaaggaagaattaagtgccgtggcgtttacgcgcggtccggggctgatggggtctttgctggtgggtgtgtcctttgccaaagggttcgcccgtgcgttggggatacctatgatagatgtcaatcacttgaccggacatgtattagctcattttattaaagcggaaggtgaagaaaacgtgcagccggaatttcctttcctttgcctgctggtttccggtggtaactctcagattattttagtaaaggcctacaacgacatggaaatcctggggcagacaattgatgatgctgcaggtgaagccatcgacaaatgctccaaagttatggggctgggctatcccggcggaccgattatcgaccggcttgcccgccagggaaatcctaaagcctttactttcagcaaaccgcatattcccggactggattacagcttcagcggcttgaagacttcgtttctgtattccttgcgcgactggataaaggatgaccccgatttcatcgaacatcacaagacagacctggcagcgtcgctggaagctactgttgtcgatattctgatggataagttgcgtaaagcggcaaaacagtacaagataaaggatgtggccgttgcaggtggtgtatcggcaaacaatggtctgcgaaattcattccgcgaacatgctgagaagtatggatggaatattttcattcccaagttcagctatacaacggataatgctgcgatgattgccataaccggatacttcaagtatttggataaggatttctgtccgatggaagcgccggcttattcacgtgtcactttataaggaaaaagtatattgcatatatataataaggtatgaagacggaagagaaggtaggggaactgctgaaagcaaagaatttctccctttccaccgctgaaagttgtaccggtggtggaatagctgccttgataacttcggttccggggagctcggagtattttaaaggcggaattgtggcgtattccaacgaaataaaggcggatttgctccatgtttctgtcgagacgctggcgcagtacggtgcagtgagcagggagacggttgttgaaatggtgaaaggtgcgatgaaaacgttgaaaacggattgcgcggttgccacttcgggaattgccggtcccggtggcggtacaccggagaaaccggtaggtactgtgtggatagcggctgcctgcaaaaacgaaattgtaaccatgaagcaggaaggtgatcgcggaagagtgaaaaatgtacagtcggctattcaaaatgcgctgtttatgctctgtagtatgctgaaatgaggaaaaaatgttttcgtacaacgaattattttaggaaaaacttgtttcgtaacgataaaagtgcttactttgcgctctgtttgaaataagtatagataaaaactataaaataaagatagaaatgtcgaagatttgtcaaattaccggaaagaaagccatgattggcaacaatgtttcacactcaaagagaagaacaaaaagaacctttgatttgaacttgtttaacaagaaattctattatgtagaacaggactgctggatcagtctgagcatttgcgccaacggtctgcgcattattaacaaaaaaggtttggatgctgctttgaaggatgcagtagctaagggttattgtgattggaaaagcattaaagtaattggctaaaagtagaggagaataactgattatggcaaagaaagcaaaaggtaacagagtacaggtgattctggaatgcacagaacacaaggatagcggtatgccgggaacttctcgttatattacaacgaagaacagaaagaacactaccgagagattggagttgaagaaatacaacccgattctgaagagagtaacagtacacaaggaaattaaataataatagtataacccatggcaaagaaaacagtagcaagtttgcacgatggttctaaggaaggtcgtgcttatacgaaggttatcaagatggttaagtctccgaagaccggtgcttacatcttcgatgagcaaatggttcctaacgaaaaagtacaggactttttcaagaaataagataaatgcagttgctgcaaggcactgattacttataaagctcctctcgccgatatagcggcggggggattttttttgctattaaatcgtttcggcttttattatttgttaattttgttatatctttgtggcataatgtattgtacaaaaaagtagactatgggattttttagttttttctcaaaagaaaagaaggaaacattagataaaggattatctaaaacaaaagagagtgtgttcgggaagattgcccgtgctatagccggtaaatcgaaagtggatgatgaggtgctggataatctggaagaggtgttgattacttcggatgtgggcgtagaaactacgttgaagattatagaacgtatcgagaagcgtgccgcagacgagaaatatatgaatgcgaaggagctgaatgtgattctgcgcgatgaaatcgctgctttgctcacagagaacaactcggatgatgtggacgactttgaaactcctgttacgaagaagccatacgtgattatggtagtgggagtgaatggtgtaggaaaaaccacgactataggcaaactggcttatcagtttaagaaagccggcaaatccgtttatctgggtgctgccgatactttccgtgcagcggcggtggagcagctggttatctggggagaacgtgtgggggttcccgtcattaaacagaaaatgggtgctgaccctgcttctgtggcatttgatactttgagttcagcagtagccaataatgccgatgtggtgattatagataccgctggacgtctgcataataaagtgggtctgatgaacgagctgaccaaaattaagaatgtaatgaagaaggttgtgtcggatgctccgaatgaggtattgcttgttttggacggttccaccggacagaatgcatttgagcaggccaagcagtttactttggcaacggaggttacggcaatggctgtaaccaagctggacggaacggctaaaggcggcgttgtaatcggaatctccgaccagtttaagattccggtaaagtacatcggtctgggagaaggtatagaggacttgcaggtgttccgtaaaaaagagtttgtcgattcattgttcggagggaatgcatgaaacggaaaactattgatatcataacattaggctgctctaaaaatttagtggactcggagcatttgatgcgccagctggaggaagcgggctttcatgtgacgcatgataccgagcatccgaaaggagagattgccgtaattaatacctgtggtttcatcggcgatgcaaaagaggagtccatcaatatgattcttgaatttgcgcaggccaaggaagaaggcgagttggagaaactctatgttatgggttgcctttcggaacgttatctgaaggaactggcaattgaaattcctcaggtggataaattttatggtaagttcaattggaaagagttgctgcaggacttgggtaaggcataccatgatgaactgcacatagagcgtacactgaccactcctcagcattatgcctatctgaaaatatcggaaggatgcgaccgcaaatgttcttattgtgccatccctattattacgggccgacatgtgtcgcgtcctatggaagaaatcctggacgaggtgaagtatcttgtggcccgcggagtgaaagagtttcaggttattgcgcaggaattgacctattatggcgtagatttatataagaggcagatgttgccccaattaattgaaaaaatctcagaaattccaggtgtggaatggatacgtttgcattatgcttatccggctcatttcccgatggatttattccgcgtaatgcgcgagcgtcccaatgtatgtaaatatatggatattgccttgcagcatatcagtgataatatgttggagaaaatgcgccgtcatgttactaaagaggatacttatcggttgatagaaaagtttcgggaagaagtgccgggaattcatttgcgtactacgcttatggtggggcatccaggagaaacggaagctgactttgaagagttgaaggagtttgtccgcaaggtgcgcttcgatagaatgggggcatttgcatattccgaggaggaaggtacgtatgccgctgcccattacgaagacagcattcctcaagaagtaaagcaagcccggttggatgaattgatgtccatccagcaaggtatttctgccgaactgagcgcagcaaaggtaggcaggcagatgagagtaataatcgaccgtctggaaggtgattactatatcggacgtacggagttcgattctcccgaagtagacccggaagtgctgattgaatgtggtgatgaaccgttggagattggtggcttttatcaggtagagataataaattccgatgatttcgacctttttggacggattatttaaatatttcctttcgtacttcttgtgtatgtggggaagatttgctaatatagcacagtagttcacaattttaaagcttggattttgaataacaaagaatttacttcggaattgtcacgcaggttagggtatactttgaaggatacttcggagttggttacttctttactgtcggatatgacgcggcaactggaagaagggaatatgatttccatacaaggttttggaacattcgaagtgaaaaagaaagcggaacgtatatccgtaaatccaacaaccaaacagcgtatgctggttccgcctaaactggtgttaacttataaacccagtactttgctaaaggataagtttaagtgatctttcttttaaaatcttccatattatgaatgaaaaactaaacatacaggatctgattgacttgctggctgaaaagcatggcatgagcaagaagaatgccgatagttttgtgaaagagtttttccaactgattgaagaagcgttggaaaaagacaagtatgtgaagattaaaggcttgggcgcttttaaactgattgatgtggaaagccgggagagtgtaaatgtcaatactggggaacgctttgagatacagggccataccaaagtctcatttactccggagcctgctctgaaagatattatcaataagccgtttgcacattttgaaacagtagtgctcaatgaaggtactgttttagaagatacccctgtagatagtggcagtgaggaagatgaagatacggagcagaaagtggaagatgttgtgccggaagtggttgccggtagtgcggttgagacaccggagattgcggagaaaatcgatagtcctgtcgaaccggaacctgtagaagaagccgttgttcctgtggagactgtggcttcggaggaagttaatgaagagagggtggaggttatcaaaactgccggcccggctgaatcttccgcaatgaaatacttcattgccatcgtggctcttgtggtattgctatgtgcaggaaccgtcgcttatttgtattatcctgattggtttgacggattatcggctgaatcacctgtggaggaaaccgctgacaatgaagctggcaatgcggcaggtaatacggtcttgatggatagtgtcggtgttaaggacagtgtggtgattgccgtaaaagatactgtgtcgaagaagctgattgctgagcctgtaataaaacagcaggaagcaccggttgccgtcagacagcctgtggtggcagccgctacatctgcttcccagccgaaaaaagagaagaaagttgagtatgtacccgattctaccaattataccattgcaggaacgcaggcgacatacacgataaagccgggtgagacattgaccagagtggctcttcgtttttatggaactaaagcgttatatccatatatagtaaagcataatccggacgttatcaaaaaaccggataatgtacctgcgggcacaacaataaagatacctaaattagtgaagaagcagtaaaaagatactgcttcttttttgttaaatactcagagcttgtttaaatattcttgaagaagtattttcttcaagaatatttgagtttcttcctggtctgttttcctctttttatccgttacatagcctgctatgctcttagtaaaaacagaaaaatattttcaaagaagaactcttgaaaagaatgctgaacaaaattaaacaggctctaaactctatgaaagtagtttaatctaaaggtttcacattgttttttaataaaaattagttgctatggttaatttattcccgtacttttggaaacgaattataattaccggtgtatggccgggcgaaaacgaaaaattaaacattaaaatacattgatttatggctgaaacaattgatatccgcgaattgaacgagcggattgaaagacaaagtgctttcgttaccaatcttactacgggcatggaccaggttattgtaggacaaaagcacctggtagagtcgttgttaatcggtttgttgtctgacggacatgtgttgttggaaggtgtgcccggtttggcaaaaacattggctatcaaaacactggcttcattgattgatgcacaatatagccgtattcagtttacacctgacttgttgccggcggacgttatcggtacgatggtttacagccagaaagatgaagcttttcaggtaaagaaaggacctgtatttgccaattttgtattggccgatgaaattaaccgtgctccggccaaggtgcaaagtgctttattggaagctatgcaggaacgccaggttaccataggtaaggaaacattcagactgcctgaaccttttttggtgcttgcaactcagaatcctatcgaacaagagggtacgtatccgttacctgaagcgcaggtagaccgtttcatgctgaaggtagttatcgactatcctaaactggaagaagaaaaattaattatacgccagaatataaacggagaaagactgaatgtaaagcctattctgaaagcagacgagattatcgaagcgcgtaaggtcgtacgtcaggtatatttggatgaaaagattgaaaaatatattgtcgatattgtatttgcaacccgttatccggagaagtatgatttgaaagaactgaaagatatgatcggattcggcggttcccctcgtgcatctatcaatctggcattggcggcacgcagttatgctttcatcaaacgccgtggctatgttatcccggaagatgtgcgcgccgtggcacatgatgtattgcgccaccgcatcggtctgacttatgaagctgaagcaagtaatatgacttcggatgaaatcgtcagcaaaatattgaataaggttgaagtgccctaatgtaaacaatttgtttactatttatgtattactgaatggaaacaactgatttattaaaaaaagtccgtcagattgagataaagacgcgcggattgtccaataatatttttgcgggccagtatcattcggctttcaaaggtagaggtatggctttttccgaagtgcgtgaatatcagtttggtgacgatatacgcgacatagactggaatgtaacggctcgttttcataaaccctttgtgaaggtgtttgaagaagaacgtgaattgactgtaatgttgctggtagatgtttccggtagtctggagttcggtactgtgaagcagatgaagaaagatatggtgacggaaatagctgctacattggctttttccgccattcaaaataatgataaaatcggtgtcatcttcttttcagaccggatagaaaagtttattccacccaagaagggacgtaaacatatactatatatcattcgcgaattgcttgatttccgtccggaaagtcgccggaccaatatccgtctcggcttggagtatcttacgaatgttattaagcgtcgttgtacggcttttgtcttatcggacttcatcgaccaggagagttttaaaaatgccatgactattgccaatcggaagcatgatgttgtggctattcaggtatacgaccgccgtgtagaggagttacctgctgtggggctgatgaaaataaaagatgcggaaacgggtcacgaacaatggattgatacttcttcgcgtgccgtacggcgtgctcatcgtgattggtgggtgaataagcagacggaactgaatgatacatttactaagagcaatgtagataatgtgtcagtacgtacggaccaggattatgtgaaagcattgatgaatttatttgcgaaaagaaactaatcggagaatgaaaagatatttatttctgataacgctgttgacagcattgacgggtaggataatagcccagtcggtgacagtggatgctacaattgattccttgcaaatccttatcggggagcaggccaagattaagcttcaggtttcattggacactgataagcgcgctattcttcctgcctatactgatactttggtgcgtggagtggaaattgttgatatagccaagcccgatacacagatgctgaatgacggcaggcgctcgttgataactcaggagtacaccgtaacttcctttgactcggcattatattatttgcccccgatggaggtgcttgttgataataaggcatatcgctccaaagctttggcattgaaagtgtattccatgccggtagatacgttgcatcccgatcagttttttggtcctaaacccgtaatgaaagcaccttttgcatgggaagactggtatacgtctatcgcttgtgctgtattgtttgtgccgttcctgttgctgtttatctatcttgtgaaacgtattcgcgataacaaaccgataattcgtaaggtgaaggtagaaccgaaactgccgccgcatcagttggctatgcaggaaatagaacgcatcaaaggtgagaaagtatggcagaaaggacaatcgaaggagtattatacagaattaacagatgctattcgtacttatataaaagaccgtttcggtttcaatgcattggaaatgacttcctctgaaatcattgataaactattggaaatgaatgataaaaatgcaatatcggatttgcgtatcctgttccaaaccgcggatttagtgaagtttgccaaacataatccactgatgaatgagaatgatgcaaatttgattaatgcgattgactttatcaatgaaacaaaggaaaaagaagatgaaaatgccaagccgcagcctactgaaattactatcattgaaaaacgttccttgcgtaccaagatactgcttggtgcaggtatcgttgctttaacggcagcacttgccggttcactgatatatataggtttggagctgtataactattttgcctgaaagtaaaagcagggagatacgcttcaatcataaatcataatttgtaaaattgtaaatatcatggtttttgccaatattgaatatttatttttgctgctgttgcttataccttatatagtatggtatatcatgaggcggaagaatagtgaagccacgcttcaaatttcagacgctcgtgtatatgcgcatgctcctaagagctataagaattacttgctgcatgcaccatttgcattgaggataatagctttagctttgattattatcgttttagccaggccgcaaactactgatagctggcagaatagtgaaatagagggtattgatataatgcttgccatagacgtttccaccagtatgttggctgaagatttgaagccgaatcgcctggaagcggccaaggatgtggcggcagagtttatcaatggtcgtccgaatgacaatgtcggcatcacgctattcgccggagaaagttttacgcaatgtccgttgacggtagatcacgccgtgcttttgaatttgataaaggacgtaaaatgtggtcttattgaggatggcacggcagtgggtatgggtattgccaatgcggttacccggctgaaagacagcaaagccaaatcgaaagtgattattcttttaacagacggcacgaataatagaggagatatttctccgttgacggctgccgagatagctaaaagtttcggtatccgtgtttatactatcggtgtaggtactaacggtatggctccatatccttatccggtaggtggaactgtgcagtatgtcaatatgccggttgagattgacgaaaagaccctgacacaaattgccggaacaacggatggtaattattttcgcgctacgagcaattcgaagttgaaagaggtatacgaggaaatagataagctggagaaaacgaaactgaacgtaaaagaatacagcaagcgccaggaagagtatcgctggtttgcactggcagctttcttatgtgtgctgttggaagttctgttacgtaattcaatattgaagaagataccgtagtatacgcatcctttttctcaggatattgtattttgtacaagtttagtaaatagtaaatcgtaaaaataataaataaagaaatgtttcgatttgaagaacctgcatatttgtacttgttgctgttgttgcccttgttagcagccttctacttgtattccaattatcggcgacggaagaatatccgcaaattcggtgatccggaactgatggcacagttgatgccggatgtatccaagtatcgtccggatgtgaagttttggatggtatttgttgctatcggtctgttttctgtattgttggcgcgtccacagtttggttctaaactggaaacagtgaagcgtcagggagttgaagtgatgattgcattggatatttccaattcgatgctggcacaagacgtacagcccagtcgtttgcagaaggcaaagagacttgttgcgcagttggtggataaaatggagaatgataaagtaggtatgattgtttttgcgggtgatgcatttacacagcttcctattacaagcgattatatatcagccaagatgtttttggagtctatagatccttcattgatttccaaacaaggtacagcaattggggcagccattaatttggcctcccgtagttttactccgcaagagggggtagggcgtgcagtgattgtcattaccgatggtgaaaatcatgaaggtggtgcagtggaagctgctaaagatgccgcagaaaaaggtattcaagtgaatgttcttggtgtaggtatgcctgagggagctcccatcccggcagaagggacaaatgattatcgtcgcgaccgtgacgggaacgtgattgtaacccgtttgaacgaacagatgtgtcaggagatagctaaggcgggcaatggtatctatgtgcgtgtagataatacaaatggcgctcaaaaggcgattagccgggaaattaataaaatggcgaaagctgatgtggaaacacaggtatacacagagtttaatgagcagttccaggctgtggcatggattattctgttgcttttgttggcagaaatgctggtattggagcgcaagaaccctctgttccgtaatattcatttgttttccaataagaaatgatgcgtatgttacagaaaaaatatataagcttttttttattgctgctaatggcagctacagtttcggctcagaaagccgaacgtgattttatccgtaaagggaaccgtttttttaaagatagcgtgtatgtggatgcggaggtaaattatcgtaaagctttggagacgaatcctcagtctacagtctctatgtttaatttgggaaatacattggctcagcagaataaactgcaagaggctatggaacaatatgttgccgctaccaagatagaaaaggacaagaatgatttagcgcaaatctatcataatatgggggtgatttttcaatcacagaaagattatggcaaagcggtagaagcatataagcagtcattacgtaataacccgaaagatgatgaaacacgttataatttggccttggcgcaaaagatgctgaaagaccaacagcagaatcagcaaaaccaagaccagaataaacagcagcaacaggaccagcaggaggataaaaaggaccaaaataaagatcaacagcagaataaagaccaacaacaaccgccgcaaccacagaaaaaggacagtgagatgtctaaagagaatgccgaacagcttttaaattctgtgatgcaagatgaaaaagatgtgcaggataaagtaaagaaacagcaggttattcaaggtggtcgtttggaaaaagattggtaataaatataacaggaaataatatatgagaaaaataattgtcttatggatggtgctgataatagtcagtttgcgtgcttttgcagatagcaaggtttcgtttactgcatctgcacctgatgttgtggcagtaggtgatcaattcaggctgtcatatacagtgaccacacagaaagtgagagatttccgggctccttctataaaaggttttgatgtactgatgggtcccagtcgttcacaacagaagaatgtgcaagttatcaatgggcagacaacctctacaagtagcataacatttacttatatattgatggctacggctgaaggtagttttactatacccggggctactataacggcagagggcaatcagatggtttccaattctgtgtacgtaaaagtacttcctgctgatagaacaaatggaggggcttccggaaatagtggaagacaaagtggctctgcaagtcgtgcttcatcaggaacgtcagtatcgaataacgatttgtttattacagctactgccaataagacgaacctgtatgagcaagaggctctcttgttaacatataagatatatactttagtagacttgagaggttttgacaacgtgaaacttcccgattttaaagggtttcattctcaggaagtcgaattgcctaatgaccgtaaatggagtcttgaacactataaaggaagaaactatcagacgaccgtataccgtcaatttgtattatttccgcaacaaccgggaaaaataacgattgatgcggcacgttttgatgcatctatagccaaggttactcatgtggacgatcctttcgaagctttcttcaatggtggttctaattacgtagaagtgaagaagacattaatgacccctaaattggttgttgatgtaaaagctttaccggatggtaagccttcgggattttccggaggagtgggagaattcagtatttcttcttctataaatagtacgaatgttaagacaaacgatgctgttactgtgaggcttgttatttcgggtacgggtaatctgaaattaatctctactccggaagttaaattcccagaagactttgaagtctatgacccgaaggttgataataagttccgtttgacaaatgccggactctccggcagtcaggtgattgagtatcttgccattccccgtaatgcgggaacatataagattcctgctgtaaagttcagctatttcgatattaaatctcgtacatacaagactttaacgaccgaggaatacgaactccatgtagaaaagggaagtggtaatgcagctcagactattgccaattttactaataaagaagatttgaaagttttgaatgaggacatacgttatatcaagcagaataacgtaactctttcccaaaaaggagatttcttcttcggttctttggcttattggctgttttacatagtgcccggcattgcatttgtcctgttcttcattgtttatcgtaaacagattgcagccaatgccaatgttgctaaaatgcgtacgaagaaagcaaataaggttgctgtgaaacgtatgaagttagcggggaaattgttggcagataacaagaaagatgcattttatgatgaagtattgaaagcattgtggggatatattagcgataaattgagtattccggtttcacgtttatctaaagataatgtcgagggagagcttctcaattacggtgttgatgatgcactgataaaagatttccttgatgcattgaacaattgtgagtttgcccgttttgctcccggagatgataatcaggctatggataaagtttattcagattctttggaagttatcagtaaaatggaaaactctataaaacattaaattgggaggatgtataatgatgaagaaagtaatatccttagtatttggtctactgataggattagctgtttgggcgcaaggaacggcagatacttcggcttctgccaaagattctgtgtctataggttcgcatacggaattttctgcaactaaatcagctgacaatgttacgaaagcacaaggtgacagtgcatatatgcgtaatgattatgcttctgccattcaaatata

SEQ ID NO: 4158 - DNA, 9209 bp, Unknown
  gut microbiota DNA sequence
accgggtaatgcagatattcgcgctaatttggaaatagcacgttccaagacgatagataaggtagtttctgtacctgatatattttttgtagcttggattaagtcgttgacaaattgtttaagtgtagatgcttgggctaaattaggtattgtgttttttattcttttgcttatctcgttttccctattctttttttccaaacagattatctggaaaaaaagcgggtttatagcgggaattctatttttggtatttactgtactaagtaatatttttgcttcggagcagaaaagtgaattactggataggaatgatgcaatagtcttgtctcccagtgttacagtacggagtactcccagtgaaagtggtactggtttattcgttctgcatgaagggcataaaattgaaattaaagataattccatgcgcgaatggaaagagattcgcttggaagatggtaaggtagggtggattcctgcttctgcgatagaagtgatttaagagtatccattgctaaatatagaagcccgtatgaaataaaggaaactatttccttttacttcatacgggttctttttgtatttatgagaatgttaaacatataatggaaaaatacagataaatagtttgttttatctttttttttccttaagtttatagcgtgataaagaaataacaaagtattaaccattaaatttatgaatatgagaacgataacatttaatgaactccgtaagattaaagactcattacctagtggtagtatgcatagaatagccgatgaacttggacttaatgttgacactgtaagaaatttctttggcggtcataactttaaggagggtaaaagtgttggaattcacttagaacccggtccggatggcggtttagtaatgattgatgatactaccgttcttgatcgggctttaaaaattttagatgaaatggcaggtgaaactgctgaacctgttcaggcttaagaaaagaaagtaaagaaggatcccaattgctgagaaacaattgggatttcttgtttgttttgtaaataaatataatagacgacttatggaagataaattagtaacattagcgattcttacgtatgctaaagcacaaatactaaagaatgttctcgaaaatgaaggtattgagacttacattcataatgtaaatcaaatacagccggttgtatcttccggtgtgcgtgttcgtataaaagaaagcaacttaccgcatgctttgaaaattacggaaagctcggcatggttgtccgaagaagtagtgggagagaagatgccccaaatagagaaaggcagtaataaggtcttgattcctgtcgatttttcaagttattcattgaaagcatgtgagttcggttttaattttgcaaaaaacatagatgctgaagtagttttgcttcatgtatattttacacctatctatgcgacttcattgccatacggtgatgtttttaactatcagttgagtgatgaagagaatgtccggaatatattgcagaaagtacattcggatttgaatgctttgtccgataaagtaaaagctaaagttacatccggagagtttcctgatataaaatacacttgcgtattgagagaaggcattccagaagaagagatattacgctattctaaagaaaatcgtccgagaattatcatcatgggaacacgtggtaagaatcagaaagatattgatttgattggtagtgtaaccgctgaagttatcgagcgtagtcgcgtaccggttttagccattccggagaatacaccgttcaaagaatttaacgctgtgaaacgtattgcatttattacgaattttgaccagcgcgacttgatagcttttgattcattaattaatagtttaaagccattttgcttctctgtttctttaatacacttagctgatgtaaaagacacttggaatgagataaagttgggtggcattaaagagtatttccaaaaacagtatccgcaattggaaattcattatgatgtagtgaagaatgatgacttccttaatagcttggatgaatatattaaaactaatcacatagatattattacattgacatcatataagcgaaatatattttctcgtttgtttaatccaggaattgccagaaaaatgattttccattctgatacaccattgctggttatctatgggcggcctaattgaaatgataattttaatttgtctaggtaaggatgtgggctaccgctaaatgctgaattagttttagtggagtccacttattttttatcttttcatggttatactattacatgtcccatttcctatgtttgtgatgtaatatcaatattatgtttaatatataacactataaactaaaataaacctttatccttctctaatttggaagaaaattataccaaagatagcttacatattcaagctatctttggtatagtagcaattcaattattgcatcaatttttctatttcatcaaattcaggacccatttgtaagttataataaactctgtataatccatttagccacaaatctttctgttcaggtttcagttctcttgctttttcataattaggtcttgccttttcatagaaaactttcagtgtagcttggtcttctttgtattttggattattgacatcagtagtagctttttcagagaaatcctgagcttgcaggcaatagattaagcccaagttggaatatgcttctgcatagttaggatctacttcaatggttttgttgtagaattcaatggctttttcataatctttcatgttatgataaaggtatccttttacgtacaaatagaatgtgttattaggatctttagccaacatatcatctgcaaactgcattgcttcgtcaaacttattattattgctataataatcaatcagatgtccaaagaagaatgaatgttcaggatacttttgaataccatcttttaaggaagcgatccacttgacagtatcaccttgagctttcaatgctgtagaaataaattccatggcatatttacccacttctttgtcctcctttgcataaggtgcatatttcaacacgcttggataatcttccattttggctgcagctaagcttgcataataagcaatttggggcaatacagtatctgtttgaagcagattctccttttcaaacataggattgatggcaatgtctacataagttgcgaagaaatccaaagcctctttattcttatctaaattaaagaactggataccaccgttaatcaggttgggacgcgcagctaatatagcagcactgttcgatcttctgaacttatttttgattttacctttttcgttaggaatctgtgcaagttcatcgcatttaaagtagtatttgcacatattcagtgcgctgttatacactttaagagtatcataaggctttcttaaataagcattctccatttccttttcattgattctcttttgaataaagccggctacatcccatgtttcggcgttgtctttggtttcagcattgttcagagcttcattgatgagcttctctgcttgtgcaaaatccggttttacgtcgttagcgatgctttttgcctctttcacgctcttttcctgagcgaaggtaaagcctgccgcaagtagtaaaaccattgaaaataatactcttttcatgattgtagaaaattttaaattaatattgtgtctattcttcattttcattgtttactatatcgttctgagttttttctgatgcatcgctatcctcttctgcaatgatatcctcttcggtttccgaggtaactttacatacggagccaatttcatcattacgtttttcaagattaatcagtcgtactccctgcgtagcacgtcccattatacgaacatctgctactttcagacggatggtgatacccgatttattgataatcattaaatcgttctcatctgttacagacttgattgttaccagtttaccggttttatcggtgatattcatagtttttacacctttaccgccacggttcgtcttacgataatcctcaatatcggaacgcttaccgtatccttgttctgacacaaccatgattgtttcagtttcagggtctttgatacaaatcattccgacaacttcgtcttgtccgtcttcatcaagcgtcatgccgcgtacaccggtagctgtacgtcccattacgcgtacggcactttcgtggaaacggatggcacgtccgttacgattggcaatgataatctcattgtcaccgttagtcatgcgcacttcaattacgcggtcatcttcgcggattgtaatggcattgacaccattttggcgaggacgggaatattgttcgagcaatgttttcttaatgacgccattctttgtgcagaacagtacataatgactgttaatgaaatcctgatcgttcaggttcttcacgcgcaggtatgcatttacggcgtcatcagagtctatattcaacaggttctgaatggcgcgtcccttagaatttttggttccttcgggtatctcatatactttcagccaatagcacttacctttttgagtgaagaacatcatggtattgtgcattgttgcaggatatatatgttctacaaagtcctcatcgcgtgtctctgttcccttagaacctaccccaccgcggttttgggcacggaattcgcttaacggcgtacgcttgatatatcccatatgagaaatggtaataatcatttcatcgtctgcatagaaatcttccgggttgaattcttccgacgaataaactatttcagagcggcgttcatcaccgtatttggttttaatctcgattaattcatctttgataaccttgcggcagagttcatcgttaacaaggatttcttccagataagcaatctgcttttggatttcctcatactcggcatggagttggtcctgcatgagtccggttaactggcgcagacgcatttctacgatggcgcgcgattggatttcagtcaattcaaaacgctccatcaaaccgctgattgcgtcattcggagttttggcggcacggatgattttgattacctcgtcaatattgtccgatgcgataatcaaaccttctaagatatgggcacgttctttagctttacgcaaatcatattgtgtacggcggataactacgtcgtgacgatgctctacgaaatacttgatgaggtctttcaggttcagcaagcgaggacgtccgtgtaccaatgccacgttgtttacgccgaaggaagtctgcaacaatgtcatcttgtagagcttgttcagcactacactggcgttggcatcgcgttttacgtcgatgacgatgcgcataccttcgcggtcagactcgtcgttggcattggaaatgccctctatcttcttttcgttggtcaaatcggcgatggatttgattaattcggccttatttactccgtaagggatttcggttacaacgattttgtcatgcgtggaagatgtttcaatctcagccttggcgcgcattacaacacgtccgcgaccggtcatgtaggcttcgcgcacaccgctcataccatatatataaccgcctgtcgggaagtcgggagctttgacgtaagtcatcaaatcttcgatgtcgatatcattgttgtcgatatatgcgacgcaggcatctatcacttcggacagattatgggttggcatattcgtagccatacctacggcgataccggaagcaccgttgacaagaagattcggaatgcgggttggcattacggtgggttccagcaacgagtcgtcgaagttggtttgcatgtctacagtctctttatcaagatcctgcatcatttcttctccaatcttttgcaagcggcattccgtgtaacgcatggcggctgcgctgtcaccgtccacagaaccgtagttgccttgtccgtctacaagcatgtagcgcatagcccacggctgtgccatacggacgagagcgccatatacggatgagtcaccgtgcgggtgatatttacctaatacctcaccgacaactctcgcagatttcttatagggtttatccgacgtatttcccagtcccatcataccgaaaagaattcttcggtgaacaggtttaaaaccatctctaacatccggaagggcacgtgaaacaatgaccgacatggagtagtcaatgtacgaagacttcatttcctcctcgatgttaatctttataattctgtcttgttcaagcatttaaaaagattattaattatacatttgcgggtttgtgaaaaaccacgctaaagtactgcttttttacgatatacaaaagttttccctcataaactttgttgcagatttccatgcttgaaaccccgtttggatgtatggttttccgtttgatgtataatcggttaaaaataagacagatacaagtaccagaaagatacctccctttggtactcggtgtaccttactaaggtacgagccgtaccaagcttaggtatatgaagtttcttaggttggtacatcgaataccaaccgttggtacggatgaaattcccacgtattataatataatgtgtagggcgaatcggaaagatgtgatttatggcacgggatttgtatattattaatccagtttatggtatgcaatataaagaaatgcgtatctttgtcagtcaaaacctttaattaaggagataaaaattatatgaacaatcaattttcacaaagagtttctgatattataacttatagcaaggaggaagccaaccgactgagaaatagatatatcggcccggagcatcttctgctcggcatgctacgtgacggtggaggaaaagctatcgagatattgatgaaactcgatatagacttgaagcaagtaaaaaagcgcattgaaagcttcttgagagatgccgaagacgataccctattacccgatgcggatgtgccattgtcgccaatggccgctaagatattgaagatgtgcattctggaagcgcgcattttaaagagtgcaacagccgatgccgaacatgtgttgttggctatactgaaggatggcgacaacctggctgctaccgtcctggaagaaaaccgggtgaattatcaagctgtatttgaacagcttacaatgcaatctaccaacccgaatgctggtatgggatttccggaagaagaggaagaagacgatgaagacatgaatatgtcccatccctctcgcaatgcaggacagggcacggcttcttctgcacagactgcatcgaagaagtcttccaatgatactccggtcctggataacttcggtacggacatgacacgtgcggcagaagaaggcaagctcgatccggttgtagggcgtgagcgtgagatagaacgcttggcgcagatattgagtcgtcgtaagaaaaacaacccggtgctgattggtgagccgggtgtcggcaagtcggctattgtagagggattggcactgcgtatcgttcaaaagaaagtatcccgtatcttgtttgacaagcgggtggtaatgctcgatatggcctctgttgtagccggaaccaaataccgcggacagtttgaagagcgcattcgctccattatcaacgagttgcagaagaatccgaacgtaatcttgttcatagatgagattcatactattgtaggcgccggtgcagctgccggttctatggatgcagccaatatgttgaagccggctttggctcgcggcgaaatacaatgtatcggtgctaccacgcttgacgaatacagaaagaatattgagaaagacggtgctttggagcgtcgttttcagaaagttatagtagaacccactactccggaagaaacgctacagatactgagaaacataaaagagaagtacgaagaccaccataacgtgagctatacggacgaagcgttagaggcatgtgtcaagttggcagagcgttatataaccgaccgtaacttcccggataaagccattgatgctttggacgaagccggttcgcgtgtgcatctgacgaacattaatgttcccaaagagattgaagagcaggaaaagctgatagaagaggcacgtgttttgaaggctgaagccgtaaagtcgcagaactttgaactggctgccagttatcgggatagagagaaagaactttccgctcgcctggatgaaatgaaagaggaatgggaagcacgtctcaaagacgaccgtcagcttgttggagaggaagaaatagccaatgtcatatcgatgatgtccggtattccggtgcaacgtatggctcaggcggaaggtcttaagcttgcaggtatgaaagaagatttgcaggcaaaagttgtggctcaggatgctgcgatagagaaacttaccaaagccatcctgcgcagccgtgtaggcttgaaagaccctaaccgccctatcggaacgtttatgtttctcggtcctaccggcgtgggtaaaacgcatttggccaagcagttggctaaatatatgtttggttccagcgatgcgctgatacgcattgatatgagcgaatatatggagaaatatacggtgtcccgtatgattggagcggccccggggtatgtcggttatgaggaaggcgggcagttgacagagaaggtacgccggaaaccttattccatagtgctgttggacgaaattgaaaaagctcacccggatgtgttcaatatcttgttgcaggtgttggacgagggacgtcttactgacaattatggcagaacgattgactttaagaatacagtcatcatcatgacctccaatatcggtacccgccagttgaaagagttcggtcgtggtgtaggttttgcggcacaggcacgtacggatgataacgagtactcgcgcagtgtgattcagaaagcattgaacaagacctttgctcctgagttcctgaaccgtctggatgaaatcataacgtttgaccagctttcgttggatgccattacgaagattgtggacatagagctgaaaggtttgtatgaacggattgaagccattggctataagatggttgtagatgatgaagccaagagattccttgcagccaaaggctacgatgtgcaatttggcgcccgtccgttgaagcgtgccattcagaattatctggaagacggactttcggagctgattgtgtctgccggattacagcccggtgatacggttaatgtttctgtcgataaggaaaaagacgagtt

SEQ ID NO: 4159 - DNA, 11186 bp, Unknown
  gut microbiota DNA sequence
atcatttcattttatcgttgctatctctctcgattgcggttgcaaaggtaggtgttttttttgaatctgcaatagctgtgataaactttttttcaaggcttcttgtctgtgtttactttttgttctcatatttaggaagttgtaaaaaataagagatgtaatgtttaacaaatatttagaattactctttgcggcttgtttatgttctgtttatatgttatttagtatgcgattagacgtctatatatagagaaaacgaaacaattttcgctaacttttaaacttcttgtttgaaaagttcgttattttgcaataaatcgttatttttgcgaactcaagacaagaatattgcaattagagaacaataaaaatagagtttaggatgatgaaaactgcgaagctgttacttcactgtcccgatcagccgggaattttggcagaagtaacagattttataacggtaaacaaaggtaatattatctatttggatcaatatgtagaccatgtggagaatatttttttcatgcgtatcgagtgggaattggaaagctttctggttcctcaagagaagatagaggactattttgaaacattgtatgcgcagaagtacggaatgagttttcgcctttatttttcggatgtcaaaccgcgtatggctattttcgtgtcgaagatgtcgcactgcctgttcgatctgctggcgcgctatacggcaggtgaatggaatgtggagatacctcttataataagcaatcatccagatttgcagcatgtagcagaacgcttcggcataccttttcatctgtttcctattactaaggagacaaaagaagagcaggaaaagaaagaaatggaactgcttgccaagcacaaggtgaacttcatcgtactggcacgttatatgcaggtcatttccgggaagatgatagacgcttatcccaaccgcatcatcaatattcatcactctttccttccggcatttgtaggggcgaaaccctaccatgcagcatttgagcgtggtgtgaagattataggagctaccagccactacgttactacggaattggatgcagggcctatcatcgagcaggatgtggtgcgtatcactcataaagatactgtgcaggacctggtgaacaaaggcaaggatttggagaaaatcgtcctctctcgtgccgttcagaagcatatcgagcgtaaggtgttggcgtataagaataagacagtaatatttaattagtagttgatgaaggttgcagttgtcaaatataatgcaggtaacatccgttcggttgattatgccttgaggcgtttgggcgttgaggcggagattacggcagatgaaaaggttctacgtgctgcggataaagtcattttccccggagtgggtgaagcggaaacaaccatgaatttcctgaatgccggcggaatgggcagactgataaaagaactgcgtcagccggtgttgggtatctgtttgggaatgcagttgatgtgtcgccattcggaggaaggagatgtggattgccttggtatttttgatgttggcgtgaaacgttttgtttcgctaaagcatgaggataaagttccccatatgggatggaatacgatttcacagactgacagcaagctcttcaggggtttcacgaaagaggaatttgtctatttcgtacacagtttttatgtgccggtcaacgattgtacggctgccgtaacggattatatacttccgttcagtgctgctttgcataaggataattactatgccacccagtttcatcccgaaaaaagtggaagtgtgggcgaacgtatcttgcagaactttttggacttatagtgaaagaatccgatatttgataattcgtaataaattgaaatgatagagttaattcccgctattgacatcatcgacggaaagtgcgtacgcctctcccagggtgattatgacagcaagaaagtgtataatgagaaccccgtagaagtagctaaggaacttgaagcgcatggtatccgacgccttcatgtggtagacctcgacggagccgtttcccaccatgtggtaaattaccgcacgctggagcagatagcttcccgtacttctttggttatagatttcggtggcggggtgaagagcgatgaagatttggtcattgcatttgaaagcggtgcacagatgataacgggcggtagtattgccgtaaagaatcccgaacgtttctgtcactggttgcaaacatacggttcggagagaataattctcggagctgatgtgaaagatcataagattgccgtcaacggttggaaggatgagagtgcttgcgaattgttcccgtttttggaagattatgtcgggaaaggtgttcgtaaagtcatctgtaccgacatcaattgcgacggtatgctgcaaggtccttccatatctctgtataaagagatgttggaagcgcatcccgacctttaccttatagccagtggcggagtgagttgtgccgaggatattcgccaactggaagcaacgggtatacctgccgttattttcggtaaggcattgtatgaagggcgtataacttttaaagaactggaagcgtttatgatataaatttgcgtaacattgcattcattattgttgctcaacgtaaatcgagtcataaatccaaaatcataaataaaagaagagtgttagcaaagagaatcatcccctgtcttgacatcaaagacggacagaccgtaaaagggactaattttgtaaatctgcgtcatgcaggcgatccggttgaactggcgcgtgcttatagtgagcagggggccgatgagttggtctttctggatattaccgccagttttgagggacgcaagacatttgccgaactggtgaagcgtattgccgccaacatcagcatacctttcaccgtaggtggcggaatccatgaactgagtgatgtagaccggcttctgaatgccggcgcggacaagatatccgtcaattcctcggctattcgccgtcccggactgattgacgagatagccaagcatttcggctcgcaggtttgtgtattggctgttgatgccaagcagacgaaaaagggttggtggtgttatctcaatggtgggcgtgtggagaccgacaaagaactctttgcctggacaaaggaagcgcaggagcgcggtgcgggcgaggtgctttttaccagtatgaaccacgacggcgtaaagaccggatatgccaacggagcccttgccgctcttgccgacaggctttccatacccgttatcgcatcgggcggagcaggcgtgaaagagcacttccgtgatgtctttctggaagggaaagcagatgccgccttggccgccagcgtttttcatttcggagaaattaaaattcccgatttaaaatcgtatctttgcgcccaaggagtcgcaatgagaagatgataaggagttataagttatgggttataagttattcgctgctgcacgaagcacggatgaaaacgactcataacaataactcacaacaaaataactcataacttataacttaaaaagatgttggactttgacaaaatgaacggactcgttccggcaattatacaggatgctgacacggccaaggtgcttatgttaggttttatgaaccgggaagcatatgataagacggtagaaacaggtaaagtaacattctttagccgtaccaagaaccgtctttggacaaaaggcgaggagagcggcaatttcctgaacgtggtttccatgaaagaggattgcgacaaggatactttgctgattcaggtacatcctgtcggtccggtttgtcatacgggtacggacacttgctggggagagaagaacgaacagcccgttatgttcctgaaacttcttcaggacttcatcgacaagcgtcatgctgaaatgccggaaggctcttacacaaccagcctgttccggtcgggtgtcaataaaatggcgcagaaggtaggtgaagaagcggttgaaactgttattgaagcatgcaacggtactgacgaacgtctgatatacgagggagccgatttactgtatcatcttatcgtattgctgacctctaaaggttatcgcatagaagatttggcacgtgagttggaagaacgtcacagtgcggattggaagaaacactaagttgttatggatgaagtgctgatacgatataaagatgtggagatacaccagcaggagctgtgtgtgttgaacgatgtaaacttggagttacataagggagagtttgtctacctcatcggtaaagtcggttcgggtaagacgagtttgctcaaaaccttttacggtgaactggatgtggcggcgggcgatgccgaggtgttgggatatgatatgttgcatatcaagcgcaagcatattccgcagttgcgtcgtaagttgggtatcgtatttcaggatttccagttgctcaccgaccgtacggtgtatgacaatcttgagttcgtgctccgtgccaccgggtggaagaataagggagagataaaagatcgtatcaacgaagtattgcaattggtgggtatgagcaataaaggttataaataccccaatgaattgtcgggaggcgaacaacagcgtatcgtgatagcccgtgccgtactaaactctccggaagtaattcttgccgatgagccaaccggaaatctggatgtggagacgggatttgccataacccggcttttacatagtatcagtgaggcgggttcgctggttattatgactacgcacaatatgcagttgctttgggaatatccggggcgcgtataccgttgtgccgatcatttgataacggacgtaacggagcagtattccgttgcgtcgtcaatagaagagaaataaacaagattatataacattttaatacagaaacgaaaatgaaagttttaaagtttggaggtacttcagtaggttcggctcagcgaattaaggaagtggccaaattgattaccgatggtgaacgtaagattgtggttctctctgccatgtcgggtaccacaaacacattggttgagatttcggactatctgtacaagaagaatccggaaggtgctaacgagattatcaacagactggaaacgaaatatcgccagcacattgatgaactttatgccactcccgaatataagcagaaaggtctggaacttatcaaatctcatttcgactatatccgttcttacaccaaagacctttttacgctgttcgaggagaaggtagtgctggcgcagggtgagttgatttctaccgccatgatgaattactatctgcaggaatgtggtgtgaagtcggttttgcttccggctttagaatatatgcgtacggacaaaaatgctgaacctgatcctgtttacatcaaagaaaaacttcaggttcagcttgagttgcatcccaatgccgacatttatattacacaaggttttatctgccgcaacgcctatggcgaggtagacaatctgcagcgtggcggcagcgattataccgcttctctgataggtgcggctgtcaatgcttccgaaatccagatttggacggacatcgacggtatgcacaacaacgacccgcgtattgtggacaagacctctcccgtgcgccatcttcattttgaagaggcagccgagctggcatatttcggtgcaaaaatcctgcaccctacctgtatccagcccgccaagtatgctaacatccccgtgcgcctgctcaatacaatggattccacggctccgggtacactcatctccaacgatacggagaaaggcaaaatcaaggctgtagctgcaaaggataatatcacagctatcaaaatcaagtccagccgtatgttgcttgctcatggtttcttgcgcaaagtgtttgaaatctttgaaagctaccagacttctatcgacatgatttgtacgtccgaagtaggcgtatccgtttctatcgacaataccaagcatctcaacgagattctggacgatttgaagaaatacggtacggtgacggtggacaaggacatgtgtatcatctgcgtggtaggcgacctcgaatgggagaacgtcggctttgaagccaaagcgctcgatgccatgcgcgacataccggtacgtatgatttcttttggcggcagtaactataacatttctttccttatccgtgaatgtgataagaaacaggctttgcagtcgctcagcgatgcgctgttcaacgagtaataaaagaaaacagtagatatgagcgcttttaccttcttgataaaagcgctctttttaactaaacgaagatataacccataataattatatgaaaggaacatttcctattgacaaattccgcgaattgcgtaccccgttttattattacgacacgaaggtgctgcgcgataccctttcctgcatccgtaccgaagcgtcacgatacgataactattcggtgcattatgcggtgaaggccaatgccaatcctaaggttctgactattatccgtgagagcgggttgggagcggactgtgtgagtggcggtgaaatccgtgcggcaatcaaggctggtttcccagccgacaagattgtgtttgccggagtgggtaaggcagactgggagataaatcttggattggattataatatcttctgctttaatgtagagtccatacccgaactggaaattatcaacgaattggccgcagccaaaggcaaggtagccaatgttgctttccgtatcaaccccaatgtaggcgcgcatacgcatgccaacatcactaccggattggcggaaaataagttcggtatcagtatggaagatatggaccatgtgatagacgtggcgcaggagatgaaaaatgtcaagttcatcgggttgcatttccatatcggttcgcagatattggatatgggcgattttgtggctttgtgtaatcgtgtcaacgaattgttggacaaacttgaagcccgtcagatacgtatcgaacacgttaatgtgggcggtggactcggcattgattacggacatcccaaccgtcagcccgtacccgatttcaaaagctatttcgaaacctacgataactgcttgaaactccgttcttatcagacacttcattttgaattggggcgttcggtagtggggcagtgcggttcgcttattgcaaaggttttgtatgtaaagcaaggtactaataagcagtttgccattctcgatgcaggtatgacggatttgattcgtcccgcactctatcaggcattccataagatagagaacatcacttccgatgctccacagcaaacctatgatgtagtggggcctatctgcgagtcctccgatgtctttggcaaggctgtcgatttgaacggtgtgaagcgtggcgaccttatagcccttcgctctgccggagcttatggtgaaatcatggcttcaggttataactgccgcgagttgccgcaaggttatacatcggacgaactggtataagtgcagtacaagatttgaatgatttatcaagcacgggaacatcctttttgtttctgtgcttgttttttatagctacctgatttttttgttgtatttttacagcattaatatctgatataaatccattatgaaacacaagtcgattttctttttacttagcctgatatttagttcgttttgtctttcagcgcaggaattgccgaaagaagtggtctggcaagagatagagggagttaatgtaccgattccgcctcagacgcatccccgtttgtatgttcgctcatccgatttacccgcgttgaaggaacgtctgaaaactcctcaggcacagcagacactctctcttatgaaagagctgagcaaagaccgtactccagcggaagaagctgccgttacaaaccgcggtttccgctattattacgagatgcgcggcgttacatcgcgggtgcagttgcaagcccttgactatctgttggaaggtgacaaacgtttggcacgcaaggccattacagccatgctcgatacgttgcagcgtgcctctttcggcactcgttccgacttgtcgcgggccagcggagccatgctgataacgggggctatggtatatgactggtgctacgaccagatgaagagttccgagaagcaggcttatatcaaagaatttatccgtctggcaaagagtatggaatgcggttatccgccacgcaataaccaacccatagcggggcatccgtcggagtggatgattatgcgcgatatgctgtcggcaggcattgccatttatgatgaatatcccgatatgtacaatcatgtcattaccatgctctatcgtgattatatcccggcacgcaactatttttacgaagggcagaactatcaccagggcacgaattatgtacatgtccgctttgcctgtgacctctttcctttatggattctggataagatgggagccggtagcatttacagctcttcggcgaggttcgtactctacgacattatctaccgccggcgtcccgacggagtgttgatgcctgcaggtgatgattatccgcaaaatcgtcctgcattgcttactatgccgacgcctatgtttttggcttccagttattataaagatgaatatctggcttatgagttcgagcgtaatccccggttggacaagtcgggcaacgagtccatgaaccattgtttgatatacgaactgttgtggcgtgactacaccctgaaaggcaaggcccccgacgaccttcctttgacacgttattccggtactccctatggctggatgattgcccgtaccggttgggatgccaactgcgtgattgccgagatgaaaattaatgagcaatttgtgggtaaccaccagcacatggacggcggcagtttccagatttaccacaaagggcctttggctatcgatgccggtgcttatagcggtagttcgggcggttataacagtcccaacaacaaaaattacttcaaacgcaccattgcccataattcattgctggtgtacgatcctgacgaaaagttcggctgttggaactatggcgggggtggaaagacacggtttgcaaccaatgacggcgggcagcgtatgtgcggcgaaggttggaaaacctgcaattcgctcgacagccttttgtccgaggaatatacggtaggtaaagtgttggctcatggatttggtcctgacgcgcaggctcccgattattcttatttgaagggggatataacacaagcctatacccggaaagtgaaagaggcgaaacgttcttttgtattccttaacctgaagtccgaaacagtgcctgccgcacttattgtatatgataaagtatcggcttccagtcccgatttccgcaaatactggttgctgcatagcattgaagaacccacgcttgaaggtaatactttcaccgtgcggcgcaccaaagacggtgatagcggtatgctgcacaacaccgtccttttacctcaggcagataatcttcgtatcgataaggttggcggtcccggcaaagaaaactgggtgttcggcactaactatcccaacgatgccgtagccccttatcttgacaatgccaacgagcgcggagcctggcgggtagaagtttcacccgttgcccctgccgttaccgataacttcctgaatgtgatacaggttgccgataaccgatgcaatcggttgaacgcagtgcagcgtattgaggatgaccggatagtaggtgttcagttagccgatcgtgtcgttacttttgccaggagcagcgaaccgctgcagaaagattttacccttacagttaacggtacgggtacatataaatttgtcattaccgaccttaaagcaggaaactggcaagtaaagaaggacggttgcatctttattccgttgaccgaggtgcaggcttccgatggagtgcttacttttgaggggagtgccggtagttatgaattttgtaggtaataattttaaataaacaatagaacaggtatttaacttgttctattgtttctgttatttgcactgttgataaaataatgtagttatgaaacaatacgaagctgtcatagaaaccttagataagttgggtggagtcgcaactttaggagagctgaacagagaagtttttaaaataagcgactgtgaatggaaaacaaaaactccatttgccagtatccgccgcattgtgcaacagactaaggggatctataagataaagcccggattatatggacttgagaagtatagaaaacaaatagaagatagggggattattgtagaaaccgagaagaacaaagattcaaatgatgttataatgttcaaccatacttactatcaaggtattctattaataatagggaagtaccgtaacatgcagactttcgtacccaaacaagataaaaacaagaaattctacgatgggcacaagttacacgaactttctactcttgcagaacagccgccttattcctatcctcaactgataaagcgcagtgctactattgatacgatatggtttaacggacgcaatatgcctcattcattttttgagatagagcattctacggacatccagaactctttgctgaaattcaacgacctgcaagatttctatgtaagaatggctattgttgccgatataaaacgcaaaccggaatttgaagctaagatgcgttttcatgctttcgatgatttacgattgaacaaacgtgtgtcatttttaagttatgatgcctttgttaagcaatacgaaatggaacaggaaaaacaatcatttgaatttatcctttagatttgcaaatacttgcttttctttatttcgtaataaaattaaagatattgctcttttggatagtatggggaagttgtctgtacaagaggactttgcttgcggttatgatttacccttttaatgaacatccaagagttctttgttacggttgttttgggttttaaaatataggtctgtataaaatagtgctccccgcacttcacagtgcagggaaggcacagcaaacaaacaaaacatttctgatttgaataaagagatattcttatcagacgtttttgttttaggtatttagagcgttttaatgctttggaagtggaagttgaatataagttatgtatgtaaattctatattctcatttgtacaaagcaatgatttcttattattttaagctatttatttcgtacacaccggataac

SEQ ID NO: 4160 - DNA, 3491 bp, Unknown
  gut microbiota DNA sequence
ctgccctgccttaaattagtttggcaattagttaaggtactgatatacatatctacactggaaaatcatagaaaaggctggagtcgggaaatccccgaaccagtcttttctatttatttaactattctctttcctttattgtcaaaacaaaagccgaaaacatacttgtatcggcttttgttattgccatgttgttgaaatattgtgcagaaagatttcgattatattagcatgacaactatataacgtatctttccataccatcttcacatcatttaactcaaatccgacttactccgccttctactttttcgttatacgcacaggagattatcagatttttatcaagattttctccgtgaactcattgttgaacaaatcaatctttgtaaattgtaacatcattaaaagtttggaggacagccttatgaaagacccgtttgaacttaatgctaaatcaatcatggctctttatgaactctttcctacggaagaagcctgtattaaacatcttgaagccattaattggcatggaaaacctgtttcaccatttgacaagacctctaaagtttataaattgaaaagtggcaaatatcgctgtaagaatacaggtaagaactttaccgttcgtacaggtacgatgtttgaaaagacaaagataagtttgcgtaaatggtttatcgccatttggcttgtcaccaatcacaaaacaggtctttcttcctatcaactcgcaaatgatatagaagtaacgcaaaagacagcatggtatatgttgcataaaatacgtcatgcaatgcgcctcgccaatgagaacttcttagaagaaactgttgaaatagacgaaactcttgttggcggaagaaacggaaatcgtcattgggataagaaagtacctcattcacaaggacgctcccacaaggacaaagcacctgtcgttggaatgatacaacgggaaaatctgatgaatgcacgggtaacacctgatacaaaatccgataccctgtctgcattcattaaagaatacatacaccccgatgcaatcatatatacagatgagaatgatgcctacaatcaaataggctttacttatacccgtttctacgttgaccacagtaagaaactatacagctatgaacatataacaaccaacagaatagagggagcttggacgcatttcaagcgtatggtcaaaggtacatacagaactctgctcaaaaagtatttgcagaaatacgttgatgagtttgtgtatagatacaatttgagagacgtcagcaattcagaccgatttaactgcttcctctgctgcgctgacacacgttatacatacaagcaaatcagaaaatcagtggcttaatatgaaaaggagaaaagaaccaacagaatttaaacttggaacaatcgttgttccctatattgaaatgttcgatgaagcggtagccataaggacagagggtgtacaacttatcattgatacctattttaacgacctgtctattgatgacattccccagcaatatgtgttcacttgggactggcttggaaaaggttacaagtttaccgtaataaatcacctctataaatcgtctaaagcgaaaactaaacaagtctttaagaagttactagcagaggcattgccattgcttatagaccctaaaaacggactaataaaaaagccggaacttagtccggctgatttagggggatttaattcaattttaaaacaactttagttcttgataggaacgacagaagatattatatatgttttagggaaaataaggttgataccctctttttcatagtccttaataatacttttagaagccaccccatgattttgagtataaaggcttaatttgtttttacaaaatacagtaactttttcttggtctctactgtttttgacaacaccgtcatatagatacccctctgaaacggagccacgcacgtattttacttctgcatttactatacttgaatcaaatctgacatatacggtatatgctttccctaatttgtcataactgacttcaaattcatcaagtctaacgacacctgccatatcatttttaagataggcttccttataggaacaaaacttgacactggaactttcataacaacctaaagaatcggttattgattcttgtgcatttgacaccactgcaatcagcagtaacgtgaacagaatgaaatactttttcataatggcgaaattttcgagtttttctcagacagccagtgagaaattacgttatatataaagaaagtgggactgccacctgtgcatactcgaaagcatcgccaaacgcttgtacaaacacacagatgagcagcccacttgatataggttgccctctgtgccttgtttgtacttttgttgaattggcgattcttcgagtatcaaggcactttccttgtaatttaccaacaatgtcattgcctcgaaaggcttgtgcaaatatagtaaataattcgtttccgtacgctttcaataggaataaatctgcgtggacgactttgctggagatactcctgtaacggttacaactgtattaggaagtgggttggcggatatttgcgcaatatttgacatattttcaccactactaatcgttacaaccacatcaccagattgactgctgggactataaacccaatgaagagaaacgtttacatccgtatttacgttatcgcttgcattcgctctaacaagtgttggtcttccttgaattgcggaagccccctttatagagataaccgtccctcccgattcttggttgacacttatgcgccttgtaattcctccacccgacacttcaataaaagaacttctttgtgatgttgtagggttctgagaagctgcaactgttacagttccatttccattgccactatcgggagttactgtaataaaatccttttgcataatattcagttttaaatggttatctattcaaatctactttggtaatcaacaagtaattgtcagtgccaaacttgaaatcctccttgtggatagattgtgtacgctcaagcaaggcttgttctgtcatgccgtttacaaaattatgtccgatgttcagtacaagagtagtgatgtcttgtgcatcacgaacttcattgtatcggcactcacgtgtctttaggtgtacatcattcacaaggaatacacgatgttcacccaatacatcaaggataagaaccttacaattacagttcataacaagtccttgacaggttttcaaaatgttttcgtctaatttcatattcagtatttttaatgattgatactgaacttaaaacgtaaaaatcggatagtccgtttatgtcttgggagtggattgtgattgagtgggatgcagggaagaaacgttaaataaatagaaaagactggttcggggatttcccgactccagccttttctatgattttccagtgtagatatgtatatcagtaccttagttaatcttcttgtaggtggt

SEQ ID NO: 4161 - DNA, 19007 bp, Unknown
  gut microbiota DNA sequence
cacaacttcatttacgctttccttcacatcaacaagatcaaagtagtctaaagtgccttcaggaagaagaaggcgataaccgtttaactccataagctatgaatttggagacaaagataacaatttataaatttacccctcaggtttttacattgacccaaaaacccggcaacaaaagtggaaagcaaaggatttttgcactatggcaagcaagttatctttccagacagatattaacagcattcatcccctttgctcctcgttcgaggtcgaatgtaacgatattaccctccctgacatccgtaacaacattgttcacgtgaaagaaatatttttcaattcctgcaaggtctttgataaatccaaatcctctggcttcattaaagaactctattcttcctctcaaaattaccggttcttcatcttctttcctgggagtggaaatcattatctcctctacattaatctcttgctttttgatattctcttcgggtggagttgaagtaatcataccatattcgtccacataagcaatcatatcatcaaaactgctttttgtagattttctaccttcttttctttttaattttgcttcccgcttagcaagtcttttcttttcattctcacgttttcctactgtcatggattttgccatagattttatagtttaatggatgtatactcgtcggataaataaaataacaaacttagaaacgacctcagatagcaaactcaaccttactgagtttcttacctgtcagcttctgaatatcgttaaccaacttacgctcttcctgcgagcaaaaagtcaatgctgttcctaaattaccagctctaccggtacgtccgatacgatgcacatacgtctcgggcacatcgggaaggtcatagtttataaccaacggcaactcattgatatcaatgcctctggctgcaatatcggtagctatcattacgcgtatcttacccgttttgaagttttccaatgcagattgccttgcattctgacttttatttccatgaatagcctgactaccgatacctgctttgcttaatacgcggacaattctgtccgcattatgcttggtacgtgagaaaacaagcaccgactgtccctccgttttatgcaaaatagaaatcaacaatttacttttctctttcttctccacaaaataaatagtctgttcgatagtatctaccgtagatgattttggggttatagtaatcttcaccggttgtttcagcagtgagttcgtcaaagcgattatcgtatcgggcatggtagccgagaagaacaaggtctgcttttctttaggaagtttcggcaacaaacgtttgatgtcatggataaatcccatatcaagcatacggtcggcctcatccagtacgaagtgtcgcacattatccaaatggatatatccctgattcatcaaatccaacagacgtcctggagtggcgaccaatatgtcgactcctttatggagcatatttacctgcgcacgctggtttactcctccgaagataaccccatgacggacttgcgtatatttggcatagtcgtctatgcattcgctaatctgcaatgccaattcacgggtaggtgtcagtatcaaggctttgatactcttatcccggtttttaagggcttgcaaatgctgaataatgggaatggcaaatgcagcggtctttccagttccggtctgcgcacagcctaatatgtcttttcctgttaaggcggcagggattgcttttacttgtataggggtaggattggcataccctttttcttcaattgcttttaaaataggttcggttatatttaaatctttaaatgtcatatatattgtttttgaatgtgctaaaacactaacacaagtataatgagagcacgcttcactcaagtggcccatacaaaaagtctgataagtctttgcagaatgaaaagtgcaggtaatgaagcggaacgcttccgctaaataaaaaagacggagttatttatgaaaggcaggaaagcaagtttcccgcctttagtctgatattaatatcttctggagttattataaccaccacgagagctaccattcgagggtctttcctcgcgaggacgcgcaacgcttacagaaataaccttgctgtcatattctacgccgttcaattcgtcaatagctttctgtccttctgtatcattgttcatctctacaaaagcgaatcctctggatctaccggtttctctatcgagaattactttagctgaagaaacttctccaaactctgcaaataaatttgtcaagtcagcattattaatgccataacttaaacctgaaatgtaaatgttcattctaaaaatgttataaaataaataataaatggagtgaggaggataattaaagaagaggactgcttactaataatatattaaaaagaagaactatacgataatgattcgtaactcaaactctgggacaaaggtagtataataaatttgataaatacatttcttcctgttttttttcacaagaaagacgattattatcatttattaagcaggtacggaaattcaaaacagttgttttttacctatttatatccataacaaaaaggataaaaaggaaaatatgaacacaagcagtctatatatggataacattttcccaaaattagcaactaactttgcacaaattattggtgattattatgaaaaaactactattcattttttcctttctctgtttgtcggctgtcgaaggatacgcccaaaagactttgacgctgaaagattgccttgaaataggtatcgaaaacaacctgtccttggaaagcaaacgcaaggagatgcagaaaagcaaatatggagtttccgaaaaccgggcaagactattgccccaaatcaacgggtttgccaattacaatgacaacatagacccgcctgtatccgttaccgacggttcggcctacggaaatccgtataacattacctataccctgcggaacagtgccaatgccggcctgcagttacaaatgccactttacaaccaaaccctgtacaccactgtttccatagccaaaactatggacgagataagccgtctttcttatgagaaagtaagagaagaccttatcctggaaatatgcaagatgtattatctagggcaaaccacagccgagcaagtcacactgataaaggccaatatcacccggttggaagaattaaaaaacatcacagtagctttccatgacaatggtatggccatggaagtggatgtaaaacgggtcaatatcaatctggaaaatctgaaagtacaatacgacaatgtactggccatgcaggaacaacaactgaacctgctgaaatatatcatggattatcctgccgaagaacagatagccttagttccggtaaactccgagaacattactcctgttgagttgaccggactatccgaaaatctgtacgaactccaactgctgcaatcgcaaagggtcatggctgaaaagcagaaaaagatgattggtcacggttatattccttcattaaacctgaccgccaactggatgttctccgcctatacggacaaggcctaccgctggttccattccggaccgtccaaccattggttccgttcctacggactgggcgtatccttacgtgttcctatattcgacggactggataagcgctacaaaaaccgaaaagctgcaatagacatcgaaaatataaagctggcacaggaaaatacccgcaaaaatctgcagacccaatatctgaacgcaaccaacgacctgatgaacaatcaacgtaacttcaaaaagcagaaagataactacctgcttgccgaagatgtatatacggtcacaatggatcggtacagagagggtatcgcttccatgaccgaagtcctgcaagacgaaatgcagatgagcgaagcgcaaaacaactatatcagtgcacattacaactatcgggtaacaaccctgctgctgttgaagctgacaggacaaatagatacattaattaaataacaagttaatcaaatcatcataatatggaagcaatagaaaaaaataacgcatcgaacacacatcaggagaaagctaaaaaacttcgtaagctacgtcgctggcaaatcgcagtcagcttgttgggagcagcaatcgttgtttggggaatagtggaagttgcctgtctcttcctcggctacaatcgcacagaaaccagtaatgacgcacagatagagcagtacatatcccctatcaacctacgcgcatcaggctatatcaagaagatttattttaccgaacatcaagaggtacataaaggcgatacgctccttgtattggacgaccgcgaatataagatacgcgtaatggaagccgaagccgcactgaaagacgcactggccggcgctaccgtaatcggggccacactgcaaaccacacagaccaccgcttccgtgtacgacgcttccatctctgaaattgaaatccgtcttgccaaactggagaaagaccgccaacgctaccagaacctggtgcgaagaaatgcagccactcccatacagttggaacagatagaaacggaatacgaagccacccgcaagaagctggaagcaacaaaacgccagcaaaaagccgctttgtcgggagtcaatgaagtatcacaccgccgtgaaagtacagaagccgccatccaacgggcaaccgctgctttggaaatggcacgtctgaatctttcctacaccgtagtagtagctccctgcgatggcaaattgggacgccgggcactggaagaaggccagttcatcacagccggacaaaccattacttatatcctgcccgatactcaaaaatggattgtcgccaactataaggaaactcaagtggaaaacctacatataggacaagaggttaccatcaccgtagatgctatcagcgacaaagagttcacgggaacaatcacagccatatccggcgctacgggttccaagtactcattggttcctactgacaattcagccggaaacttcgtcaaaatacaacaacgcatacccgtacgcatcgacttcaccaatctttccaaagaagataacgaaaaacttgctgccggtatgatggtaatagtgaaagccgaactctgattttcaatcattaattgttaaggaaatgcccgcatatcccaaaaactatcctttctataactgggtgcctaaaccgataggcattatcatcctgttcatgttcttcctgcccattcttacagtaggcggaacttactctgccagcggcacggagatgatgagcggtctgggcatcatatccgaacatatccagtttgccaacttcgccacatccataggcatggcggcattctgccctttcctgtaccggctggtatgtatccgcagggagaaaatgatgtgtatcgtcggattttcgctgatgtatatcttcagctacatctgcgccaagacagacagcatattcctgttggcgctatgcagtctgtttatgggattcctgcgtatggtgctgatgatggtcaatctgtttactctcatcaagtatgccggtaacgtagaagcaaccgaaaagatcacccccggcaatgaacccaccaccggtgaaggctggaacaaactggatattgaacgaagcgctgcacaacccgccatttacctgttttttatggtattgggacagttgggcacatcgcttacagcatggcttacttacgaatacgagtggcaatatgtttattacttcatgatggggttgctgttgctctgtatcctcattaccttcgtcacgatgccttatcataagtatgccacccgccgttttcctatcaacctcaaacaatttggcaacgcttccatcttctgtatcacactgacgtgcatcacttatgtgctgacttacggcaaggtgctcgactggtatgacgaccctacaatccaatgggcaacggtcggtgctgtggttgcaggtattctgtttgtctacatagaagtaacccagcgcaatccctactatcagttcgacgtactcaagttgcgaactatccgcttcggattcctgttctactttctgttaatggtactgaactccagttcaatgttcgtcaatgtatttacgggaataggtatgaagctggacaactatcaaaacgcgacattgggcaactggtctatgttgggctattttatcggtggcattgcaacgatctggctcagcgtgaaaggagtgcactttaaatatctttttgccgcaggtttcctgtttttgggattatccgccatgttcatgtactttgaggtacagggcgcaggcttgtacgaacgaatgaaatatccagttattatccgttctacaggcatgatgttcctatactcgctgataccgacttttgcaacccagcgtatgccctataaatacctctcatcgtggatttgcacaatgcttactgtacgtatggtacttgctcccagcataggaactgcattatacagcaatgtattgcaggaacggcagcaacactacattacccgttatgcacagaatgtggatatgatgcaccccgaggcatccgcctcatttatgcaaaccgtacaaggaatgcaatatcaggggaaaagcaagcaggaagccgttaacatggcagccacatccaccaaagggcgcattcaggtgcaggccaccttatcggcagtcaaggagatggcgggttggacattgtatgcttgccttttttgcatgatatttgttgtggtactgccctatcctaaacggaaattattaacttagcactgttttcaaacaagaaccgtaaaccctactctcatggatacccgacaagaacgtttatcgcgccttgacagtgcgttattggacaaacggcaaatttgcagttcggaaggcgtgctttgcgccttcccgtctgccttgaaaagtccgtttatgatagacggagtgggacttataatttgccgtcaaggaagtttcaccttcatccttaaccagaaaacattttccgccaaagccggtgatacgctctttctgccgaaggattccttgtttcaggtactacaggcatccgacaacgtagaggtatatatcttcatctatcagaccgaccccatacgggactttatgggaaactcggtagtatccatgcacctatactcgcatctggccaccgaaccgtgctacgtatggaataccggagaagaagaagaggttttaaaatacctgtcactattggacagtacgctgaaaatagaagagaatccttttaaccggtatgaacagaagttgcttctgttggcactgacccacaggctttgctcggtttatacacgcaaactcattgccgaaaagacttccgtaagccacaagcacgatatatttatccgcctggtgcaattaatagaacaatattatacgaaagaacggggggtggacttctacgcggacaagctatgcctgtcgcccaaatacctctccgccctctccaaatccatttgcggatacacggtacaggagctggtattcaagtccattatccgcaaaagcatttcactactcaagaatacacaaaagaacgtacaggaaatctccgatttcttcaacttcccgaacgcatcctatttcggcactttcttcaagaaacagattggaatgtcgccacagcaataccgcagaatgtagggaaacatcatatcgctattacgctttcagtcgaataacgaaacggctgccttttcccaattcactctgaacggtcagcgtgccgccatgagcttctacaaaatctttggatatggatagtcccaatccgcttccctgcactttcgtaccgggtacacggaagtaacggtcgaagatgctctggtgatagcgcggatcaatacctttaccaaaatcctgtacataaagttccacactattatcttcctgccttgcgccgataatgacatgcccgttttccttggaataacgaatggcgttactcaacagattagtgagcacccatgctatcttctcgctatccacaaacagtttcggcatcttctcttccggatattccacctcaatctggatattgaacttatcggcctgcacctgatttgccttgatggcatattctatcagttcgataggtttcgttatcttcggtatcatctgcaacttgccggcttccacctgcgtcatattaagaagctcgcctgtaatccccagcaagcggtcggcattttccctgatacttttcgaaagttgttcctgttcctcgttcaaagcgcccacacgattatcctctaaaagctgcagactcataagaatggcggagataggggttttcaattcatgcgaaatcgtagaaataaaagttgtttttgccgtatccagttctttaaattcggtgatattcttcaacaggataacatcgcccagattatgagactcgtccgtatcggcatccgtattcataatagtaatataagatgcctgaaaatagctttccttattatccgcgtaaattttcaaaggctctttcttctcgcccggattaaccaactcccttatcagcctccggagcagatcgtttttcagcgacagttcctctgccgaacggcgtatgacatcctcacgcttcagattcagtaccgtcagcgcttctttattgacgaaaagaatttcgtgttcgcggtttaagccgataataggttcatgaatactgtttacgatggcttccagaaactttttggcggataaaatatcattcaacgtactggtacgatattccgtaaggcgttccgccatgctgttaaaactatcggccacctcgcggaactcttcgtgttcgctcatgtcaaggcgcttttcataattatggttggctatttcgaggatgccctgcgtcagttccctgataggtttattaatggagcggggcaaccataccaacaacacgatactggcaagaatgcaaataccgcccgtaatggaaatccaaagcaaggcccgttgcaagccgggcatggcggcagggctatccggctccgtagccgtcagtatctggagatttacaacagaaagggctaccagcaggattatcatacctgccagaacacctacgctgagtatcagttttgtacgaatattcataacggtcaagatattaaattttatgcaagtataatcaaatctatgtttgcttgcgccagttcgttcacaaattttctatatttcagaaccataaacaaggattgcggcaaagcgaacgaaggactgcccatacaaacggtcgttatctgcttctctttacaagccgtaacgatgctgtccaacacgtctttggattgcacctgcatgacctctccacccaattcggtcaccagcttgaaatgattcagcagatgccgctggttcgcaagggcaatgcggtcggcactctcccggggagtctgtacataaagggcaacgaacgacgtattataacgggttgccaatcgtgccgccttgcggataatgcggcgtggcgttttctcatgactgctgatacacgccatgaacttctcatgccgcacgcccacacaggaaaccaccacttcattctccactttcttctccactcttaatgccacctccttcagagccagttcgcgcagttgcagaatattttccgtcttgaagaaattattcaaagcaagggccactttatccggcttgtatattttaccggctttcaggcgggttatcagctcttccgccgtcaggtcgatattcaccacttcatccgcttcttccagcacactgtcgggaatgcgttcctttacctcgataccggaaatgccttgcacttcttcattaatgctctcgatatgctgtatgttgacagcggatatgacattgataccctcatccagcaagtccattacatcctgccaacgcttctcattcctactgccttctacattggtatgcgccagctcgtccacaataacgatttccggatggatacggatgatagcgtcaaggtccatttcctcgagttccttacccttatagaatatcttacgccggggaattacgggcagtcccgccaacaccgcctccgtaccggcacgtccatgcgtttccacatagcctatattcacgtctaccccattgtccagcaagtcatgggcttcctgaagcatacgataagttttgcctacaccggcaatcatgccgatgtagaccttaaacttaccacgacgtgatttcttaatcaagtcgaggaaatgttgtacactctcctccctgctcatggcttcagagttataccaaacaccagatgcgcatcttccatacggggattccaaatagcctgcgcaaatatcggtatcgcgaatttgtccgtcacctttatatccttcgtggctttcagtgccagattggttacagcgaatccgctgttcggtactccgtaaacacctacgccggcttcgtaaggcagaaaaccgcaagtggcattcaaatcgacggatttaatgctgaacggatagttcaattctacataagaagaataattctgctctcccttctcattcttatccgcgccggcaaacatcgtgtaccaggctattgacagcggaaacttctccaacggaagtgtataggcaagccccgcttcaaaatggtgggccgtttcatggcttttgaagttaaaatacttattgcttccctgacctgcccaccaaagactggcaacggacaaggtcaaaccggaatcaccgaacgtataagctgccgtcaaatctatttctttggcagcctcaccgtccgaagaacttgttccgtcgaaatcggtagagccccatgccgtcaatgaaaagccgcctatcccaaagcctaaagtcggctggaaactaactccggtttgataaaagccgcgccatacataagaactgaccaaatcaccctgtatcttaaattcctgcgcctgcaccttatccactcccataaaatttactgccaaagcggcaataacgcctattaccgttacttttacccgattcatatctttcattattttcttattttccatttgctttttccaatgcaatattcagtttcagcacattcactttcgccgtaccgaacaatcccagcaacggtttttcaacagccttgtcaacgatgccccggacagtagcctcagccattccccttgcctcagccacacgctttacctgtacataagcactgacaggcgtaatatcggggtcaagtcccgaagcgctggccgttaccatttcggcaggaacttctttacgctgcaaataaggatgatgcagcaagaatgtatctatacgcgcttccacttccgcaaggtattcttcgtttgcagggcctttattgctacctgccgagctgcttgcatcataaccgtcgccggcacaggaaggccgtccccaaaaataaatgtcttccgtaaacatctgccccacgttggcagcgcccactgccttgccgttcagggtcaatacctcggcatttcctttattcggccctgcaaattgtgcgaatatccacaatacaaggatatagaacacggaaaagaatatgcagaaagcaacggttattctaactgatttccaaagagttttcattttctttttattttaaattaaaaaaacaaactgacaaacatatctattaacttaatacctatgaacggcgctatgacaccacccaaaccataaatcagcaagttgcggcgcagtaacgcgcttgcgccgatcggtttgtaccggacgcctctcaatgccaacggtatcagtatgggaatgatgacagcattaaagatgatagccgaaagaatggccgtttcaggtctatgcaaccccatgatattcaatggggccaattgagggatagcgaccataaacagtgcgggaataatagcaaagtatttggccacatcattcgcaatggagaaagtcgtaagcgtgccgcgcgtcatcagcagctgcttgcctatctctacaatttcaatcagcttggtcgggtcattgtcaaggtctaccatattgccggcttcctttgcagcctgcgtaccgctattcatggcaacccccacatttgcctgcgccagtgcgggggcatcattggttccgtctcccatcatggcaaccagtttgccggcctgctgctctttcttgatatactccattttatcctccggctttgcttcggcaatgaaatcatccacaccggctttttcggcaatatatttggcggtcaacgggttgtcaccggtcaccatgaccgtcttcacccccattttacgaagacgttcaaagcgttcctggatgcccggcttgataatgtcctgcaattctatgactcccaataccgccttattgacacacactaccagcggggtaccgccattgcccgaaatgacggcaatcgcttcttccacttctttcgggaatttattccccgcactttccacaatccgacgaatcgcatcgaacgcacctttgcggatttgagtaccgtcttgcaggtcgacaccggaacatttggtttcggccgtaaacttaatcatgtgggctcccgcagtattgaggtcgcgcatacgatgtccgttctcacgccccaactcgatgacggactttccttccggggtttcatcggaaagcgaggacaataggcaagcctctacaaacaccttttcatcaatgcccggagccggatgaaacttggtagccttacgattaccgatagtaattgtaccggtcttgtccaacagcaacgtatcaatgtcaccggcagtttcaacggctttgcccgattttgtgattacattggcacgcagggcgcgatccataccggcaataccgattgccgaaagcaagccgccgatagttgtcggtatcaggcagacaaacaatgagagaatagccgcaatagagatatacgtacccggatggtcgatattggtatagtccgccatcggaatcaacgtaatacatacgattacgaacactaacgtaaaaccggccaataagatagtcagcgctatttcgttcggtgttttcttccgggtggcaccctctaccagcgcaatcatcttgtcgaggaaactctcgcccggttgctgcgtaaccaacacctttatcttatctgacagcactttcgtaccgccggtaacggagcttttatcaccgcccgcctcacggattaccggagcggattcaccggtaatggcactctcgtcaatagaagccaacccttccacaatctcgccatcggcaggaatcgtatcgccggcttcgcaaacaaagaagtctcccttcttgaggcgtgcgctgcttacagtgcgtaacttgccttccaccaaaacctttgcgggcgtttcttcacgcgttttacgcaggctgtccgcctgtgccttgccacgggcttcggcaatggcctcggcaaagttggcaaacaacaaagtgacaaacaatatcacaaacaccaggaagttataaccgaacgtcccgtattccgatgttcccaaagagaggatgcagactaccagcatcaccaatgtcaccagttccacagtgaacatgatcggattctttatcatcacccgcggattcaacttcacgaatgactgtttcaaactttccattacttgctccttttgaaacaaagaagctgattttttatccttcataaacatatctgattattcttatctcgttacaaactgaagtgttcggcaatagtactcaatgcatgcgccgggaagaaagacaaagctgccacgataaagattacggcaaaagtcattacggcaaaggtgaacgtatcggttttcagcgtaccggcactttcgggaataaatctcttctgcgccaacagacctgcaatggcaacctgccctacaataggaagaaaacggctcagaataagtacccaactgcaggcatagttccagaaataagtattgtcgcccaagccttcgaaaccggagccgttgttggcagcgcacgaagtaaattcatagaattgctcgctcagcccgtgaaaaccgggattgttcagccagccgccctcactctctacaaactccggatggtgcgcaaggagataacaagacagagccgtgcctaccaatatcacaaacggatgaagcagcgcaacgattgtcgctattttcatctcccgggcttccactttctttccgagaaactccggtgtacgtcccaccatcagtccgctgataaagactgcgataatgataaatgtataatagttcatccaccctacaccgacaccgccgaaccaagtgtttatctgcatgttcagcatctccatcataccggacaggggcatcgtagaatcgtgcatgccattgacggaaccgttggaagtaaccgtagtcgtaatgctccataatgcggtggcgcctgctcccagacggacttccttgccttccatagacccattgtcctgtgcaatgcccatatcgtcaatgcgaggattaccgttcatctcctgataaacattgatgccgacacccgccaaataggcacagagcattacgccgtaaatactataagccagtttcatccgttttgtataaaaacccaacgcaaaaaccatagccataggtataatcaggatagaccagcattctacgatattggacaggtaagtaggattttccaacggatgagacgaatttacgccgaagtaaccaccgccattcgtacccaactgcttgataggaacgatggcagccaccggcccttgtgaaaccgtttgttcctgtccttcaagcgtagtcacctccatcttaccgtcaaaacccatcggagtaccttgtgtaataaggataaagccgacaatcagggaaagcggcaaaagaatacgcgtgcaactcaatacaagaaagttccagaagttaccgattgtattcgttgttttacggctgatggacttcataatgcccgccatagccgccatacctgtcgctgcggtaataaactggaagagcatgatgacgaacaactgggtgaaatacgtcagtccgctctcaccggaataatgctgcaagttacagtttaccataaaactgatgcaggtattgaatgcctggtcgggagtttgcggaccattaccatcaggattcagcggcagccatccttgactgaccaacagcaccattccccagacaaaccagaaagcattcaatatcagcaacgcctttaggaactgcttccaattcatttcttcattgggattaatgcccgctaccttaaatatcagtctctctaccggtttcataaagtccgaccatgtcttctctcctttataaaccttcgcaatatattttcccagcggataagaaatcgccaccaacaggaaaatctgtaaaactacacctaaaatttccgtattcatttctttaatcttttagaacctttcgggtttcaccagaacatacattaagtacccgaacactgcaacacctaatacaaataatactgtgtacataatcttttctctcctctttaaatcttctcaaaccaatccacacatttccagaatagccagaaagcgagaaatccgctcaacaggcagaaaataaatgaaatcgttattcccatgtttttacgttgttaaattaatattcatgttttaccgtcctcataattgccaaatgcgtgccaaaataggagtctgaaatataaaacactgatttataaacaaataaaacaaaaagaggagttacagaaaaagaaaacaccctttcaaaatgaaagggtgtctatcaaaatagaaaaggtacattgcatgattcgaggttcatctggcgaaaccatttatttccttaggagaaaccggaagttccacggggtgaaacaaagagtaccccggcatggtacactttgtttcccgacatggaacacttcgttccacgccgggaaactttcggcaagttacggaaaagaacagattatactccgtattcttcaattttgcggtagagtgtggtcaatccgattttgagcaggcgggctgcttcggtcttattaccttttgtatattccagcacacgggcgatgtggcgacgctccatagcagaaagttcaaaactgccgggagtggtttcatcggattgttcgtaatgtgtgttctgtatatcgagcggcaagtcggcaacatccagccgttcactctcgcaaacaatcagactgcgctctatcacattacgcaattcccggatattacctttccagggttgttgttcgagggcttcgagaaaagcgggtgttatttccgtaacgggacgtgccaaccgaacggagaagtcctttacaaaggcttttgccagaatacgtacatcgcccgcccgttcacgcaagggcggcagatgaatttggaatacggagagtctgtagaataaatcttcgcgaaaacgtcctgcggtaatctcttccggcagattgcggttggttgcggcaacaacacgcacattcacacgggtgggtttggtatcgccaatctttatatattcgcctgtttcgagaatgcgcagcagtttggcttgcagttcaaatgccatttcaccgatttcatccaagaagatagtgccattgtcggcctcctcaaacaatcctttcttatctttcaatgctcctgtaaacgaaccggctttatgaccgaacatctcgctttccaacaattccttactgaaagaggagcagtttaccgctacgaaattctgcttggcacgcttactattataatgtatggcttgcgcaaagacctcctttcccgtacccgtttcacccgtcagtaatacgggcacatccgttcccgatactttccgtgccagtgaaacggcatctttcaatgctttcgaatcacccaaaacagaatcgaaagaatacgtatgccctactttcttttccagtttctccaagcggacgttcatgcgcgccttctccacggcacggctgacaagcggtataatcttattgttatcatcacctttggtgatataatcgaaagcgccgttcttaatggcctgcaccccgtccgggatattaccgtgcgccgtcaacaggattatctctacgttaggggttgttttcttgacagacgacacaaggtctaccccgttaccgtcaggaagaaacacatcgcacaagactacatccgggctctgaaattccaactgcttcaaagcagtcctgcaatcaccggcctggcatacttcatatccttccaactccaacatacgcgacaaaagggtacggatctgtacttcatcgtcaacgactaaaatcttgctcatatttttcggataagtttaaagtaataaatggtaaaaacaggggatgtgcaaatataaacgttttccgggaaacaaacggcatgtcttttgaacttttataagtgaagggagcgcacataagactacggaaaagtaaaaaaacaccttacaatgtatcctcagaggcattgtaagagaactgaaaaagaaactcgcccttccatttcggaaatgagccttctaaaacgaaaaggaatacagaggcttcatccgacagtaaaaaaagaataactaaaaaagatttaaaaatgaaagtttgcaaattcggcggtacttccgtcggcacagtagagagaatgaaacacgtagcggagctcatttcagagtccacaccgaagattgtagtcctgtccgcaacggcaggcactaccaatcatctagaagagattgcagccagcctgttcaaccgcgacatagagcaggcacacgagaaaatcacccggctggaattccagttcatagactttgccaacgaactgttgacagacgaatccacaaagcgggaagcgatagattatattctcgaccgcttccagcgactctggcaatttatcaatgatgaattcacctcggttgaagaaaaagaggttttggcacaaggggaacttatcagtacagccctgctgcacttctacctgcgggaacggaagattgccaatatcctgctctccgccttcgactttatgcgtaccgggccggaaggagaaccggacttgaaatatatagaggaaaaactgcaggcgcaattggcacaatatcccggcatcaacctttttattactcaagggtacatctgcaaaaatgcttataatgaaacggataacctgaaacggggcggcagcgactatacggcatcgctcatcggcgctgccatccgcgcagaggaaatacagatatggacggacattgacgggatgcacaataatgacccgcgtgaagtaacgggaacccgctccgtaaagcatctcagtttcaacgaagccgagcaactggccttttacggagcaaaaatattacacccgttctgcatcgccccggcacgcaagcgcaatatcccggtacgattgctcagctcaatgaatcctcaggcagaggggacattgatttcggatttgcaggacgacaatatcattaaagccatagccgccaaagacaacatcttctacgtgaagttcgagtcgaaacataacttatgtccttatcagtttatcagtaagatttttgatacatttgccaaatacagaacgccgctttgtctgttggtttcatccaatcaggatgtatccgtcgccatagacaacagcgaacatctatgcaaaatccttgcggagctggaacaatatgcaaaaattctgatggaagaccgcatgtccattgtatccgtggtgggaaacatgcgttggcagtatgccggtgtcgaagcacagattatagaagctctggcagatatcccgctgcgtatgatttcgtatggcagcaatgacagtgacgtggcattcgtcattaagacggaagacaagaaaagggctttgcaggcactcagcaatagacttttcgagccggagacggataaaattgtaaagtaaataaaagttcaatctatggagccaataaacag

SEQ ID NO: 4162 - DNA, 335 bp, Unknown
  gut microbiota DNA sequence
gggtcaatgtaaaaacctgaggggtaatatttgtaaaaatcctatctttgcataaaactaactcagaaatcttatggacaacaacggctaccgtctccttcttcctgaagggacattggattatttcatcatctcggacgtaaaggaaagcgcatcggaaatagtgatttatttagaagaaaagaatgaagttcctaaagaatacgcaggaatgaaagttgagagcaagggtttttacgaacctgttgtggttcaggatttccccatacgcggcaagaagctttttctgaacgtgcgccggcgcaggtgggttgtcaaggatgagaaccgttacg

SEQ ID NO: 4163 - DNA, 563 bp, Unknown
  gut microbiota DNA sequence
atattgcagaaaacgatccggtgcgcatggttgacgccctggttgagggcttgaatcttgaaagtttcagaaagctgtataaggaatgcggtcgcagcccttaccaccccaagatgatgctcaaggtcattctgtatgcctatatgaacaacatctactcctgccggaaaattgaaaagctccttcaccgtgacatccattatatctggctggccggatatgagaaaccggatttcattaccatcaaccgtttccgcaaccgggtgaagaaggaaatcaacgaggtgtttacgcaaaccgtacttcttctctcttccaaaggcttcatcagcctgaatgtggaatacattgacgggacaaagatcgaatccaaagccaacaagtacactttcgtctggcgaaaaacggttgagcggaaccgtgaacgcctgatgaagaagatacatgtcctgttagggcagatagacgatgtcattgcccgggagaagtcatcagagaacaatgaggaggttgagttcactccggccatgctgactgaaatggcaggagaattgcgtcatgca

SEQ ID NO: 4164 - DNA, 218 bp, Unknown
  gut microbiota DNA sequence
gtaccgtgcattttcgctgacatatccggatgcggttttcacattcctggtgcctatcctccgcatcctttgccccatagggcagatgcagatgtcatgttcttcattgtagtagaagttttcggtcttgaacgggtccggtttgaatctcggccgctgctccatgtggaaatagttgtactttacgtaggcttccatgccgttttcggacatgaagc

SEQ ID NO: 4165 - DNA, 544 bp, Unknown
  gut microbiota DNA sequence
ccctcgacttgcatgtgttaagcctgtagctagcgttcatcctgagccaggatcaaactcttcattgtaaaagtattgttaatcattccatataggaatggttgttgctctgttcaggacgctcgaatttaaaaagcatctattacctatctactaagtaatgacggttctttttattttacccaagaccgtttctttttaagaaacaagtcttgctcttgtactacttgtattgtttatgtaaatctcttcaaagatcgcttcttttatgtcggctttcttttcaggaaagcggatgcaaaggtaaaaacttttaagtatatcttccaaatattttcggaagttttttttcatcttccctttttcccgtcatctctcttgcgaaagggagaacaaaagaaagattgttttaccgacccggattcaagaaaaagtgtgtcaaccaacgctgcttactttttgaaagcgggtgcaaaggtaagaactttatttcatatcttccaaatgttttcggaagttttttttcattctgctttttcaaagg

SEQ ID NO: 4166 - DNA, 766 bp, Unknown
  gut microbiota DNA sequence
aatggcgcacgcaaagactgtaaatattataaagccaacagattatgaaagatttaacaacctttacgctttcagtcatacaggaactggaagacgaggggcggttcggaaccgcccatgtataccgcagcatgctacgggctttccaacggtactgggaaagcgaacatccaaaaaacgaaatacgcatgcggaaagcgtttgatatcgccacgatacacaaattcgaaaggcacctgctggagaggatgctcaagctgaacaccatgtccacctacctgcgcatgttgcgggcagtatacaaccgcgcgctgctggcaggcctcaccgactatgtgcccggactgttcaaacatgtatataccggaacccgtgccgacgtgaaacgcgcactcccacctgccgaaatgggacaagcactcgacatctccgcttccttgcaccgggaactcaaagaagcgcagatatggttcgcactgctcttcctcttgcggggaatgccgtttgcagacctcgcaaggctgcgtaaatgcgatttcaaggacggggtaattacctaccgaagacagaaaacgggaaggcagatacgtgtacacgtaaccgaagaagccgctgagcttatccgccgatgcgccgaccgccgcacggactcgccctacctgctcaacatactgggggacgaaaactgccgtttccccctgggaaggcgtgaagaataccgacattaccaacaggtcctgcggagattcaaccggaaactcaaact

SEQ ID NO: 4167 - DNA, 204 bp, Unknown
  gut microbiota DNA sequence
gaaggtgtgtcaaaatgcacaccttcattattttacgtacaaagccccgactttcacaagctggggctttgttattacctaaagattctgtatctttaggcataagaatttcactatgacaaagatacattttcgtccttacattcccaaccaaaccgttctttttcctcaaagaattgatgaggatattgcagaaaacgatcc

SEQ ID NO: 4168 - DNA, 5029 bp, Unknown
  gut microbiota DNA sequence
ggttgcaaaagtaactgctattttcaggtaataaatttatttttctgattaatttgctcaaatcgtaaataagtcgttactttgcagaaattttagagataactatgcaatcgcaagaaaagagaagtacatataacctacgctcgaatgaatttcattcgctggctgtcggtttctctttttccgaaaacgatatttttagttctttggtaatgcgttaatccttattcggggtaacgcattttttttgtgccggaatgtgaagaatgaacttaaatagacaataagagaatatggaaaagaatttgaagaaagtgcttgtcttgggctcgggtgcgctcaagatcggtcaggccggagagtttgattattccggttcgcaggctttgaaggctttgcgcgaagaaggtgtgggttcggtattggtaaacccgaatattgctacaattcagacatcagaaggtattgccgataaagtttatttcttgccggtaactccttatttcgtagaagaaatcatcaaaaaagaacagccggacggcattctgctggctttcggcggacagactgcgctgaactgcggtacggaactttacctgaacggtactttgcagaaatacggcgtgcgtgtgttgggtacttcggtagaggctatcatgtacacggaagaccgcgacctctttgtgaagaagttggatgaaattcctatgaaaactccgaagagccacgctgtggaaagcatggaagatgccttgaaagctgcccgcgaaatcggatatccggtaatggtacgctcggcttatgctttgggtggtttgggcagcggtatctgtccggacgaggaagcgtttgtcaaactggctgaaagttctttcacgttctccaagcaaatcctggtggaagaatccctgaaaggttggaaagaaatcgaattcgaggtaatccgcgacgccaacgaccactgcttcaccgtagcaagtatggaaaacttcgaccctctgggcatccataccggtgagtctatcgtggttgctcctacctgctcgcttaccgacgaccaagtgaagatgttgcaggaactttctaccaagtgtatccgtcacctcggcattgtgggtgaatgtaacattcagtatgcgttcaacgccgaaaccaacgactatcgcgtaatcgaggtgaacgcccgcttgtcccgttcttctgcattggcatccaaagctaccggttatccgctcgcttttgttgccgccaagattgcattgggttatacgctcgaccaaatcggtgaaatgggaactcctaattctgcttacgaagctccgcaattggactacctgatttgtaagattccccgttgggatttgacgaagtttgcaggtgtgtctcgcgaaatcggttcaagcatgaagtctgtaggtgaaatcatgtctatcggccgttctttcgaggaaattattcagaaaggtttgcgtatgataggtcagggcatgcacggctttgtgggtaatgatagtgtggaattcgaagatttggatcacgaattggctcaccccaccgatctgcgtgtgtttgctatcgcccaggctctggaaaaaggctatacaatcgaccgtatctttgagctgacgaagattgacccttggttcctcggcaaactgaagaacattgtagactataagaataaactctcacaatataataaggtggaggatattcctgccgatgtgctgcgtgaagcgaaagtgctcggtttctccgacttccagattgcacgtttcgtactgaatccggaaggtaatatggaaaaggaaaaccttatggtacgcgcccgtcgtaaggaactgggtattcttccggctgtgaaacgtatcaataccgtcgcttccgagcatccggaactgacgaactacctttatatgacgtatgccgtacaagggtatgatgtgaactattataagaatgaaaaatcggtagttgtattgggttcgggagcttaccgtatcgggtcttccgttgagttcgactggtgttcggtgaacgctatccagactgcacgcaagttggggtacaaatccatcatgattaactataaccccgaaactgtatctaccgactacgatatgtgcgaccgtctgtacttcgacgaactttcttttgaacgtgtgctcgatgttatagacctcgaacagccgcgcggcgtaatcgtatccgtaggcggtcagattcctaataatctggcaatgaaactctatcgtcagtctgttcctgtattgggcacttcgcctgtttctatcgaccgtgcagagaaccgtaacaaattctctgccatgctcgaccagctcggcatcgaccagccggcttggcaggaacttaccagtctggaagatgtgaagggcttcgttgagaaagtaggctatccggtattggtgcgtccgtcgtatgtgctttccggtgctgcaatgaatgtatgctacgatgaagaagaattggagaacttcctgaaaatggctgccgaggtttccaaggaatatccggtagtggtttcccagttcctgcagaatacgaaagagattgagttcgatgccgtggcacagaacggcgaggtggtggaatatgccatttccgagcatgttgagtttgccggtgtgcactccggtgacgctacgctggtattcccggcacagaaaatttacttcgctacggcacgacgtatcaagaaaatcagtcgtcagattgcaaaggaactcaatatctccggtcccttcaacatccagttcctggcacgtaacaatgaggtgaaagttatcgaatgtaacctgcgtgcttcacgtagtttcccgtttgtatccaaagtgctgaaacgtaactttatcgagacggccacgaagattatgctggatgctccttactctcgtccggacaagtcggcgtttgacatcgactggattggcgtgaaggcttcccagttctcattctcccgcctgcataacgcagacccggtattgggcgtggatatgtcttctacgggggaggtaggctgtatcggcgacgacttctccgaagcattgctgaattccatgattgctaccggtttcaagattccgcgtccagaaaaaggtgtgatgttctcttccggtgcaatgaaatcgaaagtggacttgctggatgccagccgcatgctttttgcgaagggatataagatttacgctacggcaggtaccgctgcattcctcaatgcgcatggtgtaagcaccgaagctgtgttctggccggatgaacgtgccgatgcggagaataatgtaatgacaatgattgccgaacataagttcgacttgattgtaaatattccgaagaaccactctaaacgcgagctgaccaacggttacaagattcgccgcggtgctatcgaccataatattccgttgattacgaatgcccgtctggcaggtgctttcattgaagctttctgtgagatgaagatggaagatatccaaatcaagagctggcaggaatataaataagccggttgatatattattgtaataaagcggacatccggcaacgggtgtccgttttccttaaataagcattggtatatgataaagaatatattatttgatatgggcggtgtgatattccgccagaattcggaagaggctttccgccgttttcgtgaagcaggagtgaatacggatgagtatatgggagaatacggccaaaagggatttttcctggatgtagagacgggaaagattgatgccggtgagttttgccggagaatggctgaggctgccgggcgcgaatctgtcggttgggatgaggcgcaatattgctggctgggctttatacgtgatgtgcctctgaaccggcttcacaatttattgaagttaaaagaggaatatcacatttgcctgcttagcaatactaatccgtttattatggcttttacccgcagtgataagttcagtgacgaacataaaccgataagcgattattttgatacgctgttttgcagctatgaaatgcaggcttacaagcctgaaccggatattttcctgaaagcattggctgctgacggtatgaaagctgaagaaacgatatttgtagatgacagtttaaagaatatcaaggcggcggaagcatttggcatacgcggattgcatgtggctcccgatgaagactggatggagaaactgacggcattgctgcatatatgtaatggcttgtagtatattgtacaataaaaatggataagaatatggatgaggtagataaaatgcggagttcacaattggcgaatacggcttccccggaaattcaagagcgttttaaacgtgcgaaaaaactgttgctgaagctgaacgctatgagcggttatgaggaagaatgccggagcgtattggaagaattgatacccggtattccagcttctgccactatttgcccgcctttttgttgcgatcatggtgatggtatccgccttggggaacatgtctttatcaactccaattgtacttttctggacggtggctatatcactgttggggcatatacgttgatagggccttgtgtgcagatttatacccctcaacacccgtttgattatctggagaggcgtgtagagcaggagtatgcctatccggtgacgataggtgaagattgctggattggcggtggcgctgttatttgtcccggggtaactattggcgaccgttgcattataggtgcgggaagtgtagtgaccaaagatattccgtccgattgtgtggctgttgggaatccggcaaaggtaatccgcaaaaatgatataaaaaagtgatgaggctaattggttgaaattcaatagtagttaatgttgtatgaaaaaaaacttgaaaaataaatggcgaaagttttggtaatttcaaaataagctgtacctttgcatcgcttttgaaacggaagtgtacgggcgtttagctcagctggttcagagcatctgccttacaagcagagggtcggcggttcgaatccgtcaacgcccacacaa

SEQ ID NO: 4169 - DNA, 43614 bp, Unknown
  gut microbiota DNA sequence
ttagctttgtatatagtatgcaaagctatttttttattctgaaacttcatttttttaatttatttccccattatacctgattactcggaaaaaagccgtaattttgcaatccgataattatcataaatacgacgtatggaacttgatttacttaccgcaatctccccgattgacggtcgctacaggggcaagacagatgctttggctgcctatttctcagaattcgcactgataaaataccgtgtacaggttgaagtggaatattttataaccttatgtgaactgcctttgcctcagttgaaaggggtgaataaggatgtattcgaaactttgagaaatatttaccgtaatttttcagaagccgatgccggacgtatcaaggatattgaaagcgtgactaaccatgatgtgaaggctgttgaatattttttgaaagaagaatttgataagttaggcggaatggacgactataaagagtttatccacttcgggctgacttcacaagatattaacaatacttctattcctttgtctgtaaaagaagcattggaacaggtgtattatccgcagatagaggaattgatagcgcaactccgtgcttatgctgaagagtgggcgaatattccgatgctcgccaaaacgcacggacagccggcttctcctactcgtctaggaaaagagataatggtgtttgtatatcgtttggaacgccaactggttgcattgaaggcttgtccggttactgctaagtttggcggtgctacgggaaattacaatgcacatcatgtggcttatccggaatatgactggaaagctttcggcactaagttcgttgcagagaaactggggttggagcgcgaagaatatacgactcagatttccaattatgataatctgtctgctatcttcgatgcgatgaagcgaattaatacggtgatgattgatatgaaccgtgacttctggcagtatatctccatggaatatttcaagcagaagatcaaggctggtgaggttggttcgagtgcaatgccgcataaggtgaatccgattgattttgaaaatgccgaaggtaatctgggtatagcaaacgctatccttgaacatctggctgtgaagttgccggtgtcacgtttgcagcgcgacctgacggattctaccgtattgcgtaatgtgggcgttccgttcggacatatcataatagccattcagagttcattgaaaggattgcgtaagctgctgttgaacgaaacggctatctatcgcgatttggataactgctggagtgttgtggccgaggccattcaaacaatcctgcgccgtgaggcatatccgcatccttacgaagcgctgaaagcattgacacgtaccaatcaggctatcacagagaattctatcaaggaattcatagaagaattgaatgtaagcgaagatataaaaaaagaattatgtgcaattactccccatacatatacggggctttaagaagcgacaagggaaaccggagatttcaacttttttaatccggaatttgttataagctaaaataaaggtaattagagataaagaaagaatggccgtgaggccagtaggtttaattttattcgaataaaacaatgagtacagaaaatgaaacttggcgtgatgcttcttcttcagaggagaattcaggcgccggccgtgatggtaaccaatttaacagagagggaagctatagtcgcccgtcttataaccgtgaaaatggcgaccgcccttatcgtccgagatttaatagtgaaaatggcgaccgtccgcaacgttcgtacagcagtgaccgtccttaccgtcagcgctttaatccgaatgcggaaaatggcgaccgtcctcagcgttcctataacaacgaccgttcttaccgtcctcgctataatagtgaaggtggcgaccgtcctcaacgctcttacggtaacaatgccggcggtgaccgtccttaccgtccccgttataacagtgaaggtggcgaccgtcctcagcgttcttacggtaacaatgccggcggtgaccgtccttatcgtccccgttataacagtgaaggtggcgaccgtcctcagcgtccttacggtaacaatgccggcggtgatcgtccttatcgtccccgttataacagtgaaggtggcgaccgttctcagcgtccttatggtaacaatgccggtggtgaccgccctttccgtccgcgctataactcgaacggtgaccgtcctcaacgcccttatggcaacagagacagctacagtcgcccgattcgccgtacgggagattacgatcccaatgccaagtacagtaagaagaaacagatagagtataaagaacaatttgtcgatccgaacgaaccgattcgtttgaataagtttctggctaatgccggtgtatgctcgcgtcgtgaagcggatgagtttattacggcaggcgtagtgtctgtaaacggagaagtggttacggaattgggtactaagattaagcgtggcgatgaagtgaagtttcacgaccagacggtcagcatcgaacgtaagatatatgtcctgttgaacaagccgaaagatacggtgacaacttccgatgacccgcaggcgcgtcgtactgtaatggacttggtgaaaggtgcttgtgacgaacgtatctatccggtaggtcgtctggaccgtaatactacgggggtattattgctgacgaacgatggcgacctggcttccaagctgacccatcccaagtatctgaaaaagaaaatatatcatgtgcatttggataagaatctgactaaagccgatatggagcagattgcagccggtattcagttggacgatggtgaaatccaggcagatgctatcagctatacggatgatttcaaaaaagatgaagtgggcatagaaatccactccggcaagaaccgtatcgtgcgtcgtattttcgaatcgctgggatacaaggttgtgaaactggatcgtgtattctttgccggcttaaccaagaaaggcttgcgtcgcggcgagtggcgttacctcacggaacaagaggtgaacttcctgcgcatgggctctttcgaataatatatataatcaagttataataactgttttatggaaaagattagtagaacaaagattgttgacctgctgaagcgcgaggattttggcgctatggtcaacgtgaaaggttgggttcgtacccgcagaggtagtaagcaagttaattttatcgcgctgaacgacggttctacaataaataatgtgcagattgtggtggatttggcaaacttcgatgagcagatgctgaaagaaattaccacaggagcttgtttgagcgtgaacggtgtgctgacggaatcggtaggctccggtcagaaagctgaaatccaggcacgtgaaattgaagtgttgggtacttgcgacaatacgtatcctttgcagaaaaaagggcactctatggagttccttcgcgagatagcccatctgcgtcctcgtacgaatacattcggtgctgtgttccgtatccgtcacaatatggctattgccattcatgaattcttccataagaaagggttcttctattttcatacgcctatcattacggcttccgactgcgaaggagccggacagatgtttcaggttactacgatgaacctttatgatttgaagaaagacgaaaacggttctattatctacgatgacgattttttcggaaagcaggcgagtctgacggtttccggtcagttggaaggtgaacttgccgctacggcgttgggcgctatctatacgttcgggcctacgttccgtgcggaaaactccaataccccccgtcacttggctgagttctggatggtggagccggaagttgcgttcaatgacattaccgataacatggacttggcggaagaattcatcaagttctgcgtacagtgggctttggataactgcgccgatgatgtgaagttcttgaatgatatgtttgacaagggtttgatagagcgcttgcaaggtgtactgaaagaaaacttcgttcgtctgccttatacggaaggtatcaagattctggaagaagccgtagcacaggggcataagtttgaattccccgtatactggggggtcgacctggcttccgagcacgaacgctatttggtagaagaccacttcaagcgtccggttatcctaacggattatccgaaagaaatcaaggcgttctatatgaagcagaacgacgatggtaaaacggtacgtgctatggatgtgctcttcccgaagattggcgagataatcggcggctccgagcgtgagtccgattatgctaaactgatgaaccgcatcgaagaacttcatattccgatgaaagatatgtggtggtatcttgatacccgcaagttcggtacgtgcccgcactcaggcttcggattgggctttgaacgtctgttgctgtttgtaaccggtatgactaatattcgtgacgtgataccgttcccgcgtactccgcgcaatgccgagttctaaccgccggagaacgaaataaaatatccttgacggataagcccgcataaactttggtttatgcgggctttttttatcggataaactgttattttctcgaaataaatctttatatttgtgtcaataggaatggcatagcgttaaccaatatcatacgaatatgaaaaagaattatttctttaccatgctggcagtggtgctgcttgcggtaacaggagtccgggcgcaggataaggctgcttttgagccgacgcatctggaaggtatttggcagttgtgtcattatgtgtctgaaaatccggaaattcccggaacattgaagccgagtaatacatttaaggtactgagcgatgacggtcgcattgttaacttcacgatacggcccggtgcagatgccattattacggggtatggtacctatcggcaaatatcgggtacagcctataaggaaagtattgagaggaacatccatctgcctatgttggataataaggacaatatccttgaatttgaaatgggtgagggaggtgtgatgtacctgaaatactttatcgcaaaagatttaaacggaaatgaactggatacatggttccatgaaacatggaaacgggtaaatatgccatccgcgtttccggtagacattgttcggtagtataaaacgaatgttgttttatgtcccttgcgcaaatccggaaaattttctgtttataagtgtttgcgtgtgcgggtgggaacttttgaaattctcttccgaggaaatctgtatttcctcggaagagaatttctttttgttgtatatcagccaagtgcaaatcaaaaaaaagaagaaaacgtttgccagttataagaaaatccgtacctttgcaagccgattattatctcataaggataagcatttaattcatagcggattaatctccctttgtccgaggtggttgattcgtggtgaagcaaaaatttagtagtaacatttaaaaaaacaattaagagtggatactttaagttacaagaccatttctgcaaacaaagctacagtgactaaagaatgggtcattgttgacgctacagaccaggtattgggtcgtctgggcgcaaaagttgcgaaactgttgagaggaaagtataaacctaactttactcctcacgtagattgcggcgataatgtaatcattatcaatgccgacaaagtaaaattaaccggtaacaagtggaatgacaaggtatatctgtcatacacaggctatcccggcggtcagagagaaatcactcctgctcgtttgcaggcaaaaccgaacggtgatgacaagttgctgagaaaagtagtaaagggtatgctgcctaaaaataagttgggcgccaaattgctgggcaatatgtatgtatatgccggcagcgagcacaaacatgatgctcagaacccgaaaatgattgatattaacgcacttaaataagagataatggaagtagtaaatgcattaggcagacgtaaaagtgcaattgcacgtattttcgtaagcgaaggtactggaaagattactattaacaagagagacctcgcagagtactttccatcaagcattcttcagtatgtagttaaacaaccgttgaacaagctgggtgttgctgaaaagtacgacatcaaagtaaacctctgcggtggcggtttcaccggacagtctcaggcattgcgtcttgcaattgctcgcgctttggtgaaaatcaatgctgaagataaagctgctctccgtgctgaaggcttcatgactcgcgatccccgttctgttgaacgtaagaaaccgggacagccgaaagctcgtcgtagattccagttcagtaaacgttaagagttggagaacggttggggcggacaagttgcttaattctcgactttcacctctcaactctcaactgaaaaagcgtttagtatctaaactaccgggactcttcattcggataggctacccggcggttggtttagaaaaaacaaaaaagaaagtaaacgatttaaagattaaaacaaaatgtcaagaactaattttgatacattattggaagccggttgtcacttcggtcacttgaaaagaaagtggaaccctgcaatggctccttatatcttcatggagcgcaatggtattcatatcattgacctcaacaagacggttgctaaaattgacgaagctgctgaagctttgaagcaaatcgctaaatcaggaaagaaagtcctgtttgttgctactaaaaaacaagctaagcaggtggttgccgacaaggctgcctctgtaaatatgccttatgtaatcgagcgctggccgggtggtatgttgaccaacttcccgacaatccgtaaggctgtgaagaagatggctactatcgataagctgactaacgatggtacttattctaatctctctaagagagaaatcctgcaaatctcccgtcaacgtgccaagttggacaagacgttgggttctatcgctgacctgactcgtctgccgtctgctttgtttgttatcgacgtaatgaaggagaatattgcagttcgcgaagccaaccgtttgggtattcccgtattcggtatcgttgataccaactccgatcctacgaacatcgacttcgttattccggcaaacgatgacgctaccaagtcggtagaagttatcttggatgcttgctgcgctgctatgcaggaaggtctggaagaacgtaaggctgagaaggtagacatggaagctgccggtgaggctcctgccaacaaaggcaagaagaaagctacaaaagcaagactcgacaagtctgacgaggaagcaatcaacgcagctaaagctgccgctttcattaaggaagacgaagaggcttaattcatagtggagagttgagaattgaaagttgagagttactttacagcaattctcaattctctattctcagctctttttcgctttttagaacgatatttattaactaaaatataaaggaaagatagtatggctgtaagtatggctgatataaccaagctccgtaaaatgaccggtgctggtatgatggattgcaagaatgcattgaacgatgcagaaggcgatttcgataaggcaatggaaattatccgtaaaaaaggacaggctgttgctgctaagcgttcagaccgtgaagcttctgaaggctgcgttttggctaagactaccggtgactttgccgttatcatcgctttgaagtgcgaaaccgacttcgtagctcagaatgccgacttcgtgaaactgactcaggatatccttgaccttgccgttgccaataagtgcaagacgttggatgaagtaaaagccctaccgatgggtaacggtactgtacaggatgcagtaaccgaccgtagcggtatcacaggcgaaaagatggaactcgacggttatctgactgtagagggtgcaactacggttgtgtacaaccacatgaacagaaacggtctttgcacgattgttgctttcaacaagaatgttgacgaacagttggctaagcaagtggccatgcagattgctgccatgaatccgctggctatcgacgaagatggtgtttctgaagaagttaagcagaaagaaatcgaagttgctatcgagaagacaaaagctgaacaagtacagaaggctgttgaggctgctttgaagaaagccggcatcaaccctgctcacgttgacagcgaagaccacatggaaagcaacatggctaagggatggattacagctgaagacgtagcaaaggcaaaagaaatcattgctacagtttctgctgaaaaagctgcacacctgccggaacagatgattcagaatattgctaaaggtcgtctgggtaaattcctgaaagaagtttgcctgctgaaccaggaagatatcatggatggcaagaagactgtaagagaagtgctgaaagaagctgaccctgaattgaaaatcgttgatttcaagcgtttcactttgcgtgctgaataattcctacggatgtaaatatatggaaacggtcgcatggaaatatccatagcgaccgtttttctttattatgtttttaaagcagcagtgagttatcccaccgttttggtctgtgtatacccctctttctttagtaattccagtactttttgcttaaagtctccttgtacaatgatttctccgtctttggcgcttcctcccacaccgcatttacttttaaggaatttgcccagttctttcaaatcgtcttccgtaccgataaatccggtaacgagagttacaactttaccgccccggttcttgcggtccaattgtacgcgcagacgttgttgggacggttggagagtggtttgctcttcttcatcgtccaattcgtatttgaagtcggggttggttgaatacactacattcagtctgtctttccaatcgttctcttttggtttcttagccatatatacttgttttaattttctcacaaaaggagtccaaaaatacggttttacaaggaactttgcaatcacaggtagaaataatgttaaccttttgtcatagatatattatagattggaaaaaaagcactacttttgtcagtcataatattgagaacttaaaggaaaagctatgaacagtcagttacaaaagaaagactctacaaaggtgccggaacctaccttgcgccggcttccgtggtatctttccaatgtaaaattgcttagaaaaagaggggagcgtttcgtttcttctactcaaatttccaaagaaatcaatattgatgcctctcagatagcgaaagacttgtcatatgtcaatatttccggccgtacccgtgtggggtatgagatagatacgctgattgccgtgctggaagattttttgggatttaccaatatacataaagcatttcttttcggtgtgggaagtttgggtggtgcattgctgcgagattccggtttgaaccatttcggtctggagattgtggcagcatttgatgtaaatcccgatttggtagggacagcattgaatggcattccaatctatcattccgatgattttgaagagaaaatgcaggcatatgacgtcaatatcggtgtgctgacagtacctattgagattgcgcagaaaattacggatacgatggtggcaggcggcattaaagccgtatggaattttactccgttccgtatccgtgtgccggaagatatagtggttcagaacacttcgttgtatgcacatctggcagtaatgtttaaccgtttgaattttaatgagataaggtaatgaagatcatagcagtagggatgaattatgcacagcacaataaggagcttgggcatactcaggagaatagggaacctgttatcttcatgaaacccgactcggctattttgaaagacggcaagccgttttttgttcccgacttctcccatgaagtccattacgaaacggaagttgtggtacgtatttgccggttaggtaagaatatagctccccgttttgcgcatcgttattatgatgcggtgacggtaggcattgattttacagcccgtgacttgcagcggaaattccgtgaagccggtaacccgtgggagctgtgcaaagggtttgacaactctgcagctatcggtacgttcatttctttggaacaagccggtggagacttgcagaatttagatttccatctcgatatagacggttgtgaagtacaacgtggcaatacggcagacatgcttttcaagatagatgatataatagcctatgtcagtcgttttatgactttgaagattggtgatttgctgtttacaggtacccctgccggagtagggcccgtcagcgtcggtcagcatttacaaggttatttaggcggggaaaagctgcttgatttccatatccgctgatttcgtcagctctttcatgctcctttgtattaggctgtaagacttgctgtttgttttttaggtacgtaatccctctcattaaggaaaaatagcagaatatctttgagccgatagtgaataatgcctactttagcacgtttattatataattgaaaagatatgaagatacgtgttggttttggctttgatgttcaccggctggtgacagatagagaactttggttgggtggtgtacgtctggagcatgagaaaggtctcttgggacattcggatgcagacgtgctgatacatgctatttgcgatgcattgctgggtgcggcgaatatgcgcgacataggctatcactttcccgatacggcaggcgaatttaaaaatatagatagtaagatattgttgaagaaaacggtggacctgataggcagtaaagggtattccatcggtaatattgatgcgacaatctgtgcggaacgacccaagttgaaaactcatatacccgccatgcagcagactctttctgctgtgttggggattgatgaagacgatgtatccgtgaaggctaccactacggagaagttgggctttacaggacgggaagagggaatatcggcttatgcaactgtcttgatagtcaaagaataaacgaactccgaatcaaaatcagaaaatactatgaaacaatttgctttgaccctttgtatggtactgctgtccgtaatgttctgccgggcgcagataaagcccttgaaattcgataaaaacggagaattcaaaatagtgcagtttaccgatgtgcatttcaaatatggtaatcctgcctcggatattgccttgaagcgtatcaatgaagtgcttgatgcagaacgtcccgacctggttgtatttaccggtgacgtggtgtatgcgaagccggcagaaacagccatgcgtacggtacttgcttgtgcttcttcccgcaaaattccttttgttgtgacttttggcaaccatgacaatgaacaggataagacgcgtgccgaattatatgatgtcgttcgctctgttccttataatattcagccggacagaggtgaggccgattcacccgactacgtgcttgcattgcaggcttccgacagtaatcgtgatgcagctttgttgtattgtatggattcgcactcctactcccggctgccagatgtgaaaggatatgcctggtttacctttgaccaggtaaactggtatcgtagccagagcgctgcttatacggaaagaaatggcggaaagcctttgcctgctctggcttttttccatattcccctacccgaatataatcaggctgcggctgatgagagtgccatattgataggcacgcgtatggaaaaggcttgtgctccgctcctgaataccggcatgtttgccgccatgaaagaagccggtgatgtaatgggtacttttgtggggcacgaccatgataatgattattccgttatgtggcacggcatcctgttggcttacgggcgttttacaggtggaaatacggagtataaccacctgccgaatggtgcccgtgttattctgatgaaagaaaacgcccgcacattcactacctggattcgtatcaaaggcggggagattgtggacaaaacggtttatccggacagctaccggaaagacgattggcgtaagcgtccgccggttggagagaagtaatcagggggcagttactttttctccgtttactactacattgtccagcgtcaggttcaccacattctccatttgtatcgctttgggagctttcttcacgttgatgttccgcagggtgatgttgtgcagtttggcttcaggcagtccgttagccatgagcgctacgctgtctacgcggttacaggttacatcttcaatgcagatgttgcggaatagtgtaggatgattgccgccccgatacccgtggtagttcgtgcggaaattgataacaccccacaggcagacatcggcttcgatgcgccgcatattcaggttttcgaaatagccgcctctgtccgggttggacttgaaatatataccgttacggcaactgtctatcttgcagtcctcaatatagatattccgcactccgcccgacatttcgcttccgacagtgatggcccaacgtgcgaaatgacagttgcggatgataacgttttccgtagcctgaccgatgcgccagccgtcttggtcgcgccctgatttgatagcgatgccgtcgtcaccaacgttgaaatccatatcttctatcagtacattggtgcaggattccgggtcgcagccgtcattattgtaattgttgctgtcgatatatacattccgtacggttacgttgtcgcaaaatacgggatgaatgatccagaagggagaatcgtaaatttttaaatcttctaccaatacgttcttgcaaccgtaaaattgtatcatacagggacgcagatagtgtccttctccgaatacgcgttggtatacaggaacggaatcaatacccatctggcgcagacggtctacggcaggaccttgtatggcatgccagccgttgaaagtcaccgaaccgtttccgtcgatagttcctttgccggttaccgcgacattcgtacattggtatgcgtagataaagggggagtagttgaaacattctgttccttcccattttgtcagtaccataggcaggtagtcagcggctttggtagagaattccagacgtgctccttcggcgatgtgcaggtttatgttacttttcagtgtaatggctcctttgatgaaataatttcctgcgggaatgagtacggtaccgccaccgttcgtgttacaatgactgatggcttggaggatggcgggacggctgtcgaaagttgtatcgctctttgctccgtagtcggttacatcataaacagtatcggcgaatgcgggcggtacgatattttttagtattccgggtacttttgcccattctccggccgttttccgggaggaggatgtggtgcaggctcccatcaccaataggagggataagcaccagagtgcagtttgttttttcatggcattacgtatttaaatatgtatagagcaaaaatacgggtttcttttcggtaaggggtggatgaattgatgtttgaaatggaatttttgaccggattcggtcttatggatgaaattttacataattaagtcgcgtccatttgttttttccgatggtgtacgtaccggcaatgcgtgccgaggctatatggacggtttcgtctgttcggtaagcatgttccacggcgggtagttggcacgaatgcctgcttgccgtgcgggagttgacgcggaaagtcacaagatttccggaggtgtctttcagccttagtatttgccggacatagaagtaaggggtcgtacccctgacttgtgtcttgtaggggtcgtcctccagccggacactgagaacggtcagggtcagatctgtcactttttccccttctttcccaagaaagcgtccggcaggcggttgcttggctttccgttgcaggatgtcaatgtatacggaatggtatatccgggcgatttgtgcgaagcgttcctgtttaggaattcggggagtgaacttgaaagctatccaggtgagatagccggggtctatccgcaggatttcgtgcagataatgtccgtgatatttgccgaacgagataatatcgtcgcccttattctgcattcgtttggcattatactccactaacgacagagggcggggagagtagtaacataaggtgcttgccattcgtaaggcttcgtgtatatcctcgctcaggtcgaatatgtaaaatatggattgcctttcgggcagaggggagtaaatccaaagtgaatatcggggacaatctgctcttggcaataccacaagataggcgcctacctctttgaaagaagcttttttcaggttgtatgcatttagcttttgatacaacacgtcttgttctgcggcagtgatgcccggaataagcggatttgtcatacatcaatttgcttattccaaagatatgtaatttttttagaatcgtaccattaattccaatactattttgtcttgttcagattcttttgcaatactgctgttggcatagaaatatttttcataattcaggcgcaggtctgtgcggaatgctttactgaggctgaaggtgataccgcctgtcagccgctggcgtttgtagtcggtggtgaccaatgcgccggtttcttcatcggtggtcttggcgtcgctttggtctgtcatcatgtcgtagcgtagcaggaaagacattttattgaatattttacgcagcggaaggtcgtaattgatgaatgtgtttacggcttgcacatctttgaaagcattgtcggaatattgcttgtacagatattccgcttcgatatggaagcggtcggactcatagtaagcgccgatgtcgtacgattgcacccgtatttcttccggttggatgctctgtatgctcagtgtcaggttcagccctttggtgaaaagaaattgggctttggcagaataattcacttctttatgccattctttttgattggtcaggcccgaaccgttgtacagtccgccttctatcgtaataggcaggtcggtaggcagggtatatcccagtgtgatacctacatcgcgtacgttgcccacctgcttggctatgaacgagcggttggcaaaatattgctggtggggtgatcggtgtgcgtcgatggtaaaaggcacgcgcatctgcccggcggtcactgtcaacccttttgctggaaacaggcgtgcgtaggcatcgagcattttgatgcttccttcgtccgacaggtctatttcggctttgtaggcaacaatcggcaagacattgccggtaacgctgacacgtgcgtttctcacttcgaaacgtccggcgcccattgtggtctggtattcgtatttgccccggattgttccgtgtatttcgggcagataatccttgctttccagtttttccttgtctatcttctttccgtcttcgctgttttgggtgttttgggcttttgccataaagggcaacagggtgaggaacagcatcaatgcgctttttttcataatttgttgtcggtttgtttatgttggcaaagatacggtcgtatgtgttgtgattttatgtcatatgtgtttcgtttctgttacaaagtcacgggcaaaacgatatgcagctatgtgaactcttgcaaaaaaggcatgccttttctctttcttctgtttgaaaacctgtatttttgcatcttaaacgatgtatatccgagaaatgaacaaggcagaaaaacgagtgttggttggaatgagcggtggcattgacagtaccgctacatgtctgatgttgaaagagcagggttacgaggtaatcggtcttacgatgtgggtgtggggagaagagccgttggaagcccgccagcttgctcagaatatgggcattgaacattatgtggcagatgagcgtgaggctttccggcagattatcgttcagaactttatcgatgaataccggcaggggcgtacccccaatccttgtgtgatgtgcaatcctctgttcaagttccgtattctaacggagtgggcggataaattgaattgccggtatattgctaccgggcactatacccgtctggaagagcagaataggaaaatatatatagttgccggggatgacgataagaaagaccagtcttatttcctttggcgcttggggcaggatgtcttgcgacgttgtctgttcccgttgggaacctataccaagatgcaagtgcgcgattatctgagggataaaggctatgcaccgaaagccgaggaaggagagagcatggaagtatgcttcataaaaggagattatcgggacttcctgcgtgagcattcgccagagatagacaatgaagtaggcccgggatggtttgtcaattcggaaggagtgaagctgggagagcataagggctttccttactataccatcgggcaacggaaaggacttgaaatcgcattgggaaaaccggcttatgtgctgaaaatcaatccgcagaagaatactgtaatgttgggagatgccgagcagctcaaagcggaatatatgcttgcggaacaggataatctgattgatgagggggaagttttcggaagcggggaactgacggttcgcatccgctatcggagcaaaccgataccttgttcggtaaagcgtctggaagacgggcgattgctggtgcattttgagacggaagcatctgccattgcgcccggacaatcagctgtattctatatcggaaaaagggtggtaggcggttcgttcattgcttcacaacgtggtatcggcatgtatatttgaaaattaaaaactgaaatttgaaaataaaaagagattaatggggaagagattgattattctttcagctttagtgttgtttctggcaagtgcgtcggcacagcaagatacgttgaaataccgtattagtttaagagacaaggcagctaccgtttattcattggagcatcctgaacagttcctttcggagaaagccattgcaagacgtcaaaaacagaacctgtcggttgattccaccgacctgccggtttgccgtcagtatattgatgaaatacgcagacaaggagtgaatattgtagttgtagggaaatgggaaaattttgttacggtttcctgcaatgattccgctttgatagaacatattgccgcattgccgtttgtacgcactacggagaaagtatggactgctccgaaaatgaatgaaggagtgggggatgcaatgcgtgattctgtaatcaatgagccgaagatatatacagacagtatttacggtcctgctctcactcaaattcagttgagcaatggagataagttgcatgatgccggattcagggggcagggaatgacgattgccgtgattgatgccggatttcataatctggataagataacggctatgcggaatatccgtgtcttgggcatgaaagattttgtcaatcctcaggcggatttatttgcggcaagcagtcatggactgagtgtgctttcctgcattggaatgaatcagccgggaattatgacaggtactgcaccggaagcttccttttggctcttccgtagtgaagatgaggcttccgaacacttggtggaacaggattattgggctgctgccgtagagtttgccgacagtgtgggagttgatgtgcttaatacttctttggggtattatgcgttcgatgacaaatcgaaaaattacaaatatcgtgatttggacggacatcatgccttgatgtcgcgtcaagcctcgcatatagccgataaaggtatggtactggtgtgcagtgccggtaattcgggaatggggtcttggaaaaaaataaccccgccgggagatgctgataatgtgttgacagtaggcgctatcaacaaacaggcggtgttggcgccattttcctctatcggcaacacggctgataaccggattaaaccggatgttgtagctgtgggcgaaggagcggatgtgattcgcacggacggaaatcagggtaaggcaaacgggacttctttctcttcgcccgtcatgtgtggaatggtggcttgtttatggcaggcatgcccccggctgacagcgaaagagttgcttgaattagtccgtgcttccagtgaccgtgccgactatccggataatatctacggttatggcgtgccggatatgtggaaagcatataatagttataaattaaaaatgaagtaaggacaggaactttgcatatttatacttaaagaatggatgccttatcactatacgaattaaatgcgctggtgcgtcgcagcttggagcaatgtctgcctgatgcctattggatacaggctgaattgagtgatgtacgtaccaacagcaccggacattgctatctggagttcgtacagaaagatgcccgtagtaatagtctgatagctaaggcgagaggaacgatatggtcgaacgtctttcgtttgttgaaaccttattttgaggaagctacgggacaggcttttgtttcgggcatcaaagtgctggtgcaagtgaccgtcagtttccatgaactgtatggatatagccttacagtacaggatatagatcccacctatactttgggtgatatggcccgtcgccgtaaagagattttgaaacaattggaagaagaaggggtacttactttaaataaagaattgagaatgcctcgtttgccgcagcgtattgcggttgtttcttccccaaccgctgccggatacggtgacttttgccaccagttgcagaataatccgggaggtttttacttctatacggaactttttccggcattgatgcagggtgatcgtgttgaagaatccgttttgtctgctttggataagataaattcccgttcggacagttttgatgtagtagttattatccggggcggtggggcaacttccgacctttccggatttgatacttatctgctcgcggctgcctgtgcgcagtttcctttgcctgttatcacgggtatcggacacgaacgcgatgatacggttctcgattccgtggcccatacccgtgtcaagactcccacagctgctgccgaatttctgatagactgcatgaatgaggctgccgatgaattggaatcgctggctgcccgcctatgcgatggtgtccggaatttgctggtacaagagcaacagaagttagtatcatacaggaatcgtattccctctgctgcttatggttgcatttcggatgcaaaattaactttgcttaccgtccgaaaagacattgtacaagctgtaacagcctctttgtttcgtcagcatcatcggctggagttactgcaacaacggctggcggatgcttctccggaaaagcaattagcccgtggctacagcattacattgaaaaacggaaaagcaataaagaatgcttctctcttaaatgagggtgatgaaattatcactcgcctgtataaaggagaagtggtttcagtagtaacaaataaactgtcaaaaaaataaataatcctatgcctgcacccaagaaaaaagagacttattcccaagcgatggaacggttggagaaaattgtcagtcagatagacaacaatgaactggaaatagatgaacttgccgtaaagataaaggaggcaaatgaaatcattgctttttgcagtgataagttgactaaggcagaccgtgaggtccagaaacttctatcggacaagcaggaaagctaaataaccttgagtggctttttgttagcttgatttttgatgtattaatattatataacttttttggacgctaaaagagttaattctgctttttttgtattatgataataattaatttcgctggtaaaattgtttaagatgaataataaattgtaaaagggtggaggactttgccgactttgatttcttttttaaagagtattatgtctctctttattcctatgcacattctctcattaataattgggaagtaagccgtgacatagcgagcgatgcttttgaatatatatggaagaattttgataggatagagaaggccacagctaagtcgtatctctttatatatgtacgcaatcgtgctatcgactatctgagacatcaggatatacattatgcttatgctgaattctctcagaaattgtatgaaaattatacagaagtggagttcaaggagcaagacgagcgtatgatgaagattcagaaagtgttggatggaatgaccccgcatacgaggcatatcctggaagagtgctatctacatgagaagaagtataaagaagtagccgcagaattgaatataagcataagtgcggttagaaaacatattgttaaagccttgaaggctattcgtgaggaatttgctaaataaatataaaaaataggctaaacggttcaaaataagttttataaacgcatttataataaggtattaactaaactagcggatttatgagtaatcaagatagtacatctgaatttggtaaagcactggatttaatggagagttcatccgatagctctgacaagaaatgggaggatttgaaagatgtggagacattagatgcctgtaaggatttgatggatgtcagatatcttttgcataagtgccaggcttccggtatggttgatgtggaggctgaattagctcgtttgaaaggtagacagaataagaaaaaatatcttaagatgttttggatatggagcagttcggtagcagctatcctggtaggagcttttgtttcatttaattatttatttaatataccggttgccccgcctaaatctgtcacggtatttgctgcggatccgaatgaacagcgtattgttttggaattaaatgacggcaagcaattctttttggatgatgagcctaaaaaagaaaacaaacaagtagaaaaacggcggactcttgattatactaatctagcgaggaattccgttccggtagtgaaaaagatgttacagactcattctattgtaatccccagaggcgagacattcaaattgattctttgtgatggtacggaggtgtggctgaatgccaatagtaaattggtttatcctacagcttttatagaaagggagcgtacggtttttcttgaaggagaagcgtattttaaagttacaaaagatacaaaaccttttattgtaaagacggattatttgcaaactaaggttctcggaacggagtttaatgtgaaaagttatacagccgaagacagccatgtaacgctgattagcggtaaggtacaggttcgcagccatgaaaatgcacgttttgtggatttggaaccgggtaaagatgccatactcctttccaatgggcagtttgaggtgaaggaagtaaacagtgaggcctatacttattggaaagatggatatttttattttgatgagttgactttggcggatattatgaagtctattggacgttggtataatgtgaacgttatatttagaaataaagaagccatggcatatcgcatacattttatgtccaatcgtcagggtggtattgaagaaacaattcgtttgatgaaccgtttaaaaaaagtaacgttaacactttgtgagaatacggtctatgttgactagatggaggcatgttttgtgtaatttcttccatattgtagatgctttttagagaaaaagtttcatgaattgaaaaaaataaggtaaaaaggtatcttgttattcaagtcatacgtattattaataaatgaagcttcgctaatattattaaaaataaacgtatgagaagaaagaggtacttattatttccgcttttcttttttctattttgtcttccgttctgtgcggaagctcaggtaggtgagaagaaacttacagtagagtttaagaatgaagagttgtcttctgtatttaaacagttgagcaaaatttcaggttataaaatcctttttacgtatgatgatgtgaagtcatatacgtatagcggtgccatcaaggataagaatatccgggaaattttggatattgtgctttctggtaagaaacttgagtatactatcgataaggagtttattaccattacaacaaaaggtccttccaaacaggctaaagtgtatacggtaaacggcgttgtgctgtctgccgatgacggtgagccgcttattggagctaccgttatggtgaaaggtacttctacgggtgtgctgacagacatagacggtaagtttacattgcctaatgtttccagtcgttccaagttggagttttcttatgtcggtatgcttcctcagtcactttctccttcgccgactatgaaagtgactctccaatcggatgtacagacgctgtccgaagttgttgtgacgggtatgcagcgtatggataaacgtatgtttaccggtgctaccgaccagttgaaagcagaaaacatcaaaatggatggtatggcagatatcagtcgcggtctggaaggacgttcggcaggtgtatctgtgcaaaatgtatctggtactttcggtacggcgcctaagattcgtgtgcgtggtgcaacttccatttacggaagttccaagccgctgtgggtggtagatggtgttatcatggaagatgtagctgagataggtgctgacgatctgtcctcaggtgatgctgagactctgatcagttcagctattgccggtttgaatgccgatgatattgagagttttcaaattctaaaagatggttcggctacctccatttatggtgcacgtgctatggcaggggtgattgtggtaactaccaaaaaaggtaaatcaggtacgaacaaaatcagttatacaggtgagtttaccatgcgcatgaaacccagttatagcaatttcaacatcatgaactctcaagagcaaatggatgtatacaagaatatggagcaaaacggttccctgagttttgttgattcttatcgtgcttcgcagagtggtgtctatggtaaaatgtatcatctcattaatcaatattcggcaacaggcggtgtatttggtttagccaatacgcctgaagcacggggggcttatctgaagcaggccgagttccgtaataccgactggttcgacctgttgttcagcaatagtatctcacaaaatcatgctgtgagtatggctaccggtacagacaaggcttcttattatacttccatcagtgtgatgaacgacccgggatggactaagaggagcaaagtgcaacgttatacggctaacattaattctacgtataatatcttcaaaaaccttacacttaaccttatcgggaatgcatcttttcgcaagcagcaggctcccggtactcttggttcgcaagctgatcccgtaagtggtgaggtgaaacgtgacttcgacatcaatccttactcatttgcgctgaatacttcgcgcacattggatcccaatgaatactacgtacgtaactatgcaccgtttaatattttccacgagttggataacaactacatggatttaaaagttactgatatgcgattccagggtgaaatgaaatggaagcctattcaaaaggtagaattgagcatattgggggcttacaagtactcatctactacccaaaaccattatgtgaaagattattctaatcaggcatgggcttatagggctatggatgacgctaccatgcagcaagccaatccgtggctctataccgatcctgacaaaatcaatactctaccggaatcggtactgcccgtaggcggtttctatcgcgatacgaaatatactatgtcgagctatgacttgcgtagtaccgtcagttacaatgatgtattcaacgaaaatcatatcgtaaactttttcggtggtatggaactaaatgccacagaccgcagcaaagtgtggtttaacggtgcaggtatgcagtatggcatgggtatgctttccagttacgactatttgttcttcaagcaaggcaacgaggaaaatacaccttataatactgttgacgaaaccaaagcacgccaagtggcttttttcgctaccggcacttattcatggaagggacgctataccgtgaacggtacagtgcgttacgaaggttccaacaaactaggtaaaagccgttcggctcgctggttgcctacatggaatatttccggtgcttggaatgcgcacgaagaaacttggttcagcaaactgaattccatattatctaacttgacgctgaaagcaagttactcgctgactgccgaccgtggtcctgcctttgtgagtaactcgctggcaatggtgagcagttataatccttggcgtcccaatgccgatgtcatggagtcgggactgggcatcctacaaggcaaaaattctgaactgacttacgaaaagaaacatgaactgaatctgggtatcgatttaggttttctggataaccgtatcaacttcagcatggattggtacaaacgcaagaactatgacctgataggatggttgagtactaccggtctggatggagaaattggcaagtatgccaatgtggcaagcatgcgttcgcacggtatagagctgactctttctacccgtaacattgccaagaaggacttcaagtggaacactgacttcattttctctaaaaccaagaacaaggtaaccgatttggaggcattctcatcggtaatggacatggtgagcggatatggatttgccatgcaaggctatccggtaagaagtttgttttcgctcgacttccgtggactgaatgaagaaggtctgcctactttcattaatgaaaatggcgaattgaccacaagcaacatcaacttccaggagcgcaacaacaaatcacacctgatttatgaaggtactacagatcctaccattacaggtagtttgggaaatgtattcagctacaaaggtctgaaactgaatgtgtttatcacttattcttttggcaatgtcatccgtttggatccggtatttagcaaccaatataccgaccttgatgctatgccgaaagaattcaagaaccgttggatgaggccgggcgacgagcatcgtaccaatattccggtgatagcagataagtatatgaatgtgaacgatagttatctgagccgtgcctacaatgcttataattactccagtgaccgcatcgcaaagggtgactttatccgtttgaaagagatttcgctttcatacgacctgcccaagaagtggattgaaccgttaaaaatttccaatttaggattgaaactgcaggcaactaatttgttcttgctttatgcagacgacaaattaaacgggcaggatcccgaattctttaacacaggtggtgtggccgttcccatggctaaacagttcacttttagcattcgcttaggcatttaatttttttaaataatgaatcacatgaaaaataaatcattcataaccttgctatccgtttcattgctggcattctcttcttgcagtgattttttggatacactgcccgatagccgcacggaaatcaacagtaccgacaaaatatctccactgttggtttcggcatacccaactactcttccgctgttgattggcgagttgtcatcggataacgtgatggataacggtggacaatttgatacggacgaactcatcgaaaaactttatttgtgggattctcccagcattagtagttacgatagtccctatgccctttgggaaggatgttatgctgctattgcttcggctaatatggcattggaaggtatcgaaaacttaggttcgcctgccagcctcaatccgcaacggggcgaagctttggtgtgccgcgcctattcccattttctattagctaatgtattctgtatgccttataatccgaatacggcagaaagtcatttgggaataccctaccgtactcggaccggtgacagcgtctatccggaaaatactgaacgaggcagcttgaagaatacgtatgaacagattgctgctgacttggaagctggacttccgctcattaaagatgctgcttatgaggttcccaagtatcacttcaaccgtaaagcagccaacgcttttgctgcacggttttatctctattaccaaaaatgggataaggtgatagaatgtgccaacattgccatcggcagcaatccggtcacagcactgcgtaattgggaggctgatttcggcggagtaagtttggtggacgacatcagcaaccaatacgtgtctgaaaagaaaccggccaatctgcttttagctgctttagggtcgcaagtacctatcattacaggtccttataatactttgaaacgctacggacacggaaccccaatctatactaacgagactattgacgcagacggtccctggcattggaggggtggactggttatgagtactttcatcctcagtgtagtacagaaaaatcctttcccgaaactgaaattgtactttgaatacgtagacaaggccaatggcctgtactacccgcacacggtagcagtaccgttttcggtagatgaaaccctactatgccgtgcagaggcttatgtgttgagtgataaccctgactatagtaaggctttggaagacataaacttttggatagaaagccatagtgcgctgagtaaggacgaaggacacgatctgacagagcaagaggttaataatttctacaatagcctgccttatcagcccaccattgttaccaaagacaaggaacgcagtgtgaaaaagcgtcttaaccctgaaggatttaccgtagagcccggtacggaagagaatcttatccaactcatcttgcaactgcgccgtttggaaaccatgcaggaaggacttcgctggtttgacctgaaacgctatggcatagagttttcgcacaaccgtgccggcaacagtccgattgtgttgggaaaagaagacccgcgacgcgccatccaacttccacaagatgtcatcactgccggcatggaaccaaatcctagatactaagtatataatctactgaatacgataacatatgaaaaaatatataacctattttctgatggcggcagcccttatcggcggtgccactgcttgcaacgaagatgacctgacaaaggagagcagcttcgacaacatgactccataccgtacggcattcgatgaatggttgctcgataactatgtcaccccttataatatcgattttaaatataaattcgaatacaaggaatcggataccgactataacttggcaccggccgaattgtccaaatcagtagccatggccaaattggtaaaatacttgtggattgatgcctatgtagaagttcagggaaacaaccgcgattttatatgtacatatggtcctaagatgattcatttgataggttctccggcttatgataacggaaagattaccttgggtacggcagaaggcggtttgaaagtaactctgtataatatcaacgctctgaacccgaacagcgtggatgtagagatgatgaaccgctggtatttcagtaccatgcaccatgaattttcacacatcttgcatcagaccatcgaatttccgcaagacttctatgctgtgtccagtggaaaatatattggtaacggatgggtgaatgtcagtgatgaagcggctttgggcatgggattcattacggcctacggtggttcggaagtacatgaggactttgccgagctggtagcgaactatgtgacccatgatgctgcctggtggcaacaacagttgaaaatagccgatgagggagccacattcattaaccaaaagatggaaattgtgagaaactacatgaatgaagtctggaatattgacttggacaaattgcgcgatattgtacagcgccgttccgaacaagtgaaatatattgatttgacagaattaaactaaaagaacatatatatgaaaaagatatataatctatggatattggctttaatattgattggagcaggagcatgtacctctgaagtggacgatgttttcgaccaatcggccgccaaccgcatcaaccagtccatcgccgagtatcaggaagtactgcgttctgccggtaacggatgggtgctgaattactatcctgccgctactaaggcttatgggggatacactatgctgatacgctttcataaagagggcactgccgatgtgtcatgcgatctcttccagcccgataaggtgagtacaggtgcttatgatatggtgaatagtgccggacccatgctgacgtttagtacgtacaatgaaatattccattttttctcagagccttccaatgcattgggtataggcgaagatggtatgggtatggagggagacagtgactttcttatcttgtcctgtacctctgacgaagtggtgttgaagggtaagaagaccggtaacaaaatgataatgcatccgctgccggagaatgtagcttgggaagattacttgcaaagcgttaaacagattaccaatgaggcttatccagccgcttatgaggtggtgatagacggagtgatacaatacacagtgacacagcgttatcgcaaatttatcttggaaaatgccgatggcagccaggtaaatctgccttttcactatacaccggaaggtatcagtttcgatgaaccgttgtcgctagctaccttggatgtgaaagagttgcgctgggaacagggtagcatgagcttcacagacgataaagtaactatacgtgccagagaattgcccaaaacttactcccgctatgagaaatacatcggtgaatacttttttgtgtattaccaaggaaataccatgctacctgtaacactggaagaagaattgttcaatgaaagttatcttatgaaaggattgccgtttgatatgcgcatacgctacaatgcagtggccggtagtatcagtctggaataccaaatgttgcctgatggcattgtcttagtaccatggactttgcagggaggaggatatttgagccagacacagggtgttggtatggaaggttacatggaggaaaaagcagcgcccaaccctggagacagccatttggaagatgtaacccaaaccgtcatcttgcaggataacggtatgtggggcaagtttttgtgcgactcttttgtggcaatagacaataacacaggtaaggatgtcctgcaattggcttatgtgacaggattctttcgtacatttacacagcaagcggcttccaaataacaaacattaaaaaaagaagtgaatatgaaaaagaatatcatctatctactcatcgcaggatgctctttgttcttaggtgcctgcaacgatgacgatacccaatatctgccaccggtagaactgcaaataacgtcttctacggttgatttcaaatctgttggtggtgatggaaccattgaggtgggcaacgctgatcctactctgacggctacttccaatgaagaatggtgtaccatcaaggcgtgcagtaatggagtggtaagcttctacatagctcccaacgacgaaatggaaacccgtacagccaccatctcactggtcatgggcgaatcgtctgccaagataggcatcacacagatgggtatcattacaaactataagactgacgattttttctcttttgccgaaaacaaggctttcaaacagtttatccgttttgaaagtgaaatgccgataacggtgagcatcagtgaagaagcccaaacctggttgagttacgaagaagcagagaatgggtattacatcttggctgatgagaacacagaaagtctggaaagattgggtaaagtgacgctggaatccggtagtttggctaaagagtatagctttatgcagtattccaggaattcttacaaccgttcttggatagctgattttaagaatagggacggatttgccacacaggatgaagtaagtgttatagccgagagtaatgaggtaactgtttcattcaagaatgcagaacttactttcaaaggagtccttaaagacggtgtgctcaacgtgccttgcggacaatttctgaagacagctaatggctttaaactctacttgggcgtaatctttgaaaacgatcaatggggattgaatccggatataagctttacgttagcccccagcgcactggaaaacggggattgggtcttgactccgcaaatggaccagaaaatcggactaaaaatcaagagtatagccatagctgctatggatgagaatgacgaattggcgggagccatggatctgctgcaagaattgatgctgaaacccaacggggaagcgcaagagatagtcaagacgtataacgttgcatttacctcggccgagggttccgattatgggcgtaatgataatatcacgttcagtgacgggaactacacacttgcacttgacatttatggtgaagattataaatataccaaaagcggtacttatgtggtaggggcggaagatggatactacattgatacgaatatcaattacacatactttatgaaaggagaagaaaagataggtatccaatctggtgcaatgaaattgaatgctaatacggaaacccaaaagtatgaaatcagtatggaatttatactggaggatggcagcaaagtaaatgctacgtatgagggggaaatatcaggaaaaggatttgccattttcgatgagttgcaaattcaggttaatagtatagaagagctgatacgcacacttcctactaacggcgcagtagatggacaatgctatctcaaggttgcattcaataattgggatatagaaatgcgccttgatttgcgtgcagctgcgggggagaaggttcttcccgccggaacttataacgtcggtaacgatggtgctgtcggaacgttggacagcaaattcagtaatatctcagtctattcgtatggtttcacttcccgtaaatttaaatcaggtaaggtggaagtcaccaaatccggtgaagtatatacctttaagatagaccttactgatacggaaggacagcgttatgtatgtactttcacttctaaggttaccgatatggataatccccaataaatcacattaaaaagacgtttgttatgaataaactaacatattatattttatcagccattctatcggtattgtttttctcatcatgttccgatgatgaaaaggcagttccggcggctgctaccctgaacgccatcaaagttaccagtcattcattggagttttcactcaccccccaacatgcagaccaatgtgcttggatgtgctataaaaaaggcgagacggctcctacagcggaggatattcttaacgaaggcataccggctgataactccgcgacaagtatccaacgggctattgccttagaggcggaaacttgttacatcattcaggcagctgttgtgagtcaaggacgctatttactttccgaggctcttgaaatgaagacacaaccggtttatgaaaatgatgtacctgtagtaaaactgaaattattggaaaaggcaagttaccgtaccgacaatgagcctggaaacggtaactatgttattcgcctggcctctggggaaataggaaaagatgacttaccgaccaatattggagactatctggttcgcctggatctttataatgtagccgacagcgacccgtggaacgctactctgccggcgggagaatatcatgccggagaagagacggcacaaataggttgttgggatgtggaaacaaccaatgtatttacccgcatttcatccgaccctgccaatggagtggtttacagctatgtcacaggaggaaccgtacttgttcagcgtaaaggcgacacctataccattgatatggatatcgtcatggaagacggagagcctttccgaggacacttcaaaggtgatattatctttgaaaaatatgagccggaaacaccacagggcacttaccagccttttacggaagatcaagaggtgtctttcactttagcccaaggaagatattacggcaactggttctgtccgcatgccgatgatatgctgttgcaattctatcatggaaacttcaatgaaaacgaggtactgaccaatggctattatttgcaattgtcaagctgttatatgcataaattgttagattacaatatggaaaatcctccactggaagaaggtacttaccaagtgtctatctttggaggaagtacacagggatatatgcaaatccccatgactatcaacaaaggccaaatttccgacataaacgggcaatattatcctacgggctcttatttggagaaagtcgattccagaacaggcaagagatatattgccttcctgaacagtggaaccatgaccgtgacacgaagcggtgaaaattatgatattgcattcaatttccaaagtgcagacggtctgaacataacatgcaatttcagcggggcattgcctatgggtaattttaacgacaatgacaatacgaagcctgccagcccgatgagcaccttgaaggacaatgtcacattggctctgcccgaagaactgacagagatagaagcttattatttgggggaatacctctatcccggattgagctcttggcaaataaatttctataaagataaagacgaagaagggaaagagataaagtcagagatgattaccatcgaattttttactgatgcgaataaaggagccacactgcaggaaggggtctacaccatagaacataagtttgaacctatgtatgcgcttcccggatacatgatgttcaacaaagcagatatcttgtatacctggtatggagataagcgcagtgatgatgagacaggggctacagatatattggctcctatcaagagtggtaccatgactgtaagtaaagaaaacgacggttataaattcgtattcgacttccgggatgatgcgggatacgaaataacaggagaatggaaaggtacggtgaatgtggtggattattctaatccttaaacttcccgcaacagacaatttaacgataatttattaaaatataaagattatgaacatgaaacgaaccttataccaatggggcgcaggtattttcttctgcttgtctgctctcactgcctgttcggatgatgacactccgatggaagaaaccatattgcctccaacacctaccgtgacactcacggccggcgagaccggttacaccactgtaaacattacgttggaatcgaccaatgccttgcgctgtgcttatttagtaatggaagaaaacgaaatcatgcccgatgcacaggaagtgctggacaaaggtattgtgaccactgccaacaagccgatggatatcttgatagaagaactggatgccaacacgcaatatgtggtattggctgctgccaaaggagaggaagaaaacgtgcttgctagtgtaaagatagcgacaaaggctttctctgtgcccgataagaagcatacgctcattttctattacatgggtgacaataccggattggaaacggaaatggaggccaacctgcgcattattcagggagctgcagggcacttgatacgtctgtccgacaaaaatcaggtagccgtattctacgataatggcaaacggtctacattgaccaaactggtcatcaatgaggagaataaccggacatcgcatcagattatcgaagaatatactcagtctgatctttctacagaccccgtattcatgaagaatgttttgcaaaaggtgatggaggaaatgcctgctgacagctatggattagtactctccagccatggtagcggatgggtacccaattctattttcgacaagcatgtcatggcacccagcacccggtttatcggacaggacggtactcaatacatggaaattcctgctttggcacaggcgcttgaaggactgaaattcgagtacttgttattcgatgcctgcttcatgtcgtctatagaagcgctttatgatctgcgaaatgtaaccgattatttaatagcttcaccgacagaggtgctggccgatggattcccatataaggaaatcgtatcgcagctcttccaaaaagatttgaaaggcgcttgcgaatcatttatgaataaatacagacaaacgtcgggtactgtcgcactggtacaaagcaataaattggaagctttggccgctgctgtgaaaaacgtggtaactgcagtaggaaacaagcaagtggatttgactgccattcaaggttatgaagggcttaatccacacctgttttatgacttggagcagtatattgaagcactgaccaatgacactgatgcctttaaagcggcattgaaagaagctgtgatttttacagaccacactccacaattctacagtgcttatagtcagcaacccatcgggctgcctcgcagttgcggactcagttgctttattgacagcaacttgtttcctgatactcaaaaagcttggctggacactgaatgggcgaaagcgataggtgcacgataatcttgctgtcaaggaattatccgaataaatgaaagtgtgaataaactcttttttaggaatattttttatatcatctgtaaatttgtgaaaacaagcatttgataatttaattctctctaacaagtataaaggccgctaccgacagctattgggtagcggtcttttttatgtcgttttccacaccgtttaattcttgttgctgcttcctgcacaaagtttgaaaaacgaaaaatatctgtcacactgttatgctccacaaggaaagagtgacccgatagcttttcctattgtgtaaaatggaggctatgaattgattctcagtgtatttgggcgctttccggtaaatagagaaagtttcatgcggataaactattagtttatcctaagtaaactgttggtttcaccgcattaaactatcagtttacttagggtaaacttagggtattcttaagggaaacagaaagttccaaccaatgaaaatctggctgcttatctttttatcatagttggcatgtaatggaaaaaacatatcgtcgctcttatgtcgtaaaaaacaccgcttctttaggaaatatgaagaataaccattacttttgttgcaaatagttagtcttgaaattaataaaagcgaataattaatacgagcgagatatgaaagaactagattgggctaatctgccgttcggctatatgaagacagattacaatgtgagaatttactatcgtaacgaacagtggggcgcattggaagtatgcagcgaggaaaccattcctatgcacatggcagccacttgtctgcactatggtcaggaagcgttcgaaggtttgaaggctttccgtggcaaagacggcaaggtacgtattttccgtttggaagagaatgcggcgcgtttacagtctacctgccgtggcatcctgatgcctgagttgccgacggaacgctttaaagaggctattcttaaggttgtgaagctgaatgagcgtttcattccgccttacgaatcgggagcttccctgtatatccgtccgttgctggtgggtacgggagcacaggtaggcgtacatccggcaaaggaatacctgtttgtcgtgtttgtaacgccggtaggtccttacttcaagggagggttctccaccaatccgtacgttattatccgcgaatatgaccgtgccgcacctttgggcacaggtgtctacaaggtgggcggcaattatgcggccagcttgcgcgccaataagaaagcgcacgatttgggctatgcctgcgagttctatctggatgccaaggaaaagaaatacatcgacgagtgcggtgctgccaacttcttcggtatcaaggacaatacgtatatcactccgaaatccacttctattcttccgtccatcaccaacaagagcctgatgcaactggccgaggatatgggcatgaaagtagaacgccgtccggttccggaagaagagctgcttactttcgaggaagcgggcgcttgtggcacggctgccgttatcagtccgatagagcgcatcgacgatgtggagaacggtaagtcgtacgtgattgccaaagacggaaaaccgggaccggtctgcacgaagctgtacaacaaattgcgtgctatccaatacggtgacgaacctgatacgcacggttgggtaactgtcgtggaataacgtatgagcataaagattacaacccttgtggaaaattcggtttacggcaagggactacagggagagcacgggctttccctgcttgttgatacgggtgagcatcgcctgctgttcgataccggagcttccgaccttttcatacgcaatgcccggatacttgggattgacttgaaggaggtggatttcctggtactgtcgcacggacatcgcgaccacactggcggactgcatcactttcttgccgtgaacgacaaggcacaggttgtctgcaagagagaactcttccggccgaagttcaaggatgaacgggaaaacggagtgatgcagcccgatgctttggacagcacccgtttccgttttgtggatgaggttactgaattgtgccgcggcgtgtttgtctttccgcagttgcctgttacggatgaagaagatacgcattttgaacacttcttcacgtggacggaagggcggaaacaggccgatacctttacggacgaactggcgttggcattgaaacagggcgctgaagtgtccgtgctgagtgcctgctcgcatcggggcattacgaatatcatccgtgcggtgcaggagtattttccgcagacctcgctgaaactggtattgggcggtttccatatccgtaataccgagaaagagaaatttgatgtgatagcccgtttccttgaaagccatttgccgcaacggctgggcgtttgtcattgtacgggcattgataaatacgcattgtttcaccaatgctttgccgaccgtactttttataattataccggtcgggtagaaacactttaatacatacgaatgggaaagaataagttagagaagtttgccgatatggcaagttatccgcacgtgtttgaatatccgtactcggcggtagacaacgtgccgtttgagatgaagggtaactggcatcaacagtttttcaagaacgataatccgattgtgctggagctgggctgcggccgtggagagtacacggtgggactgggacgcatgtttcccgacaagaatttcattggcgtagatatcaaaggggcgcgcatgtggacgggagctaccgagtccttgcagtcgggcatgaagaatgttgccttcctgcgtaccaacatcgaaatcatagaccgcttcttcgctccgggcgaagtgagcgagatatggctcacgttctccgacccgcagatgaagaaagccaccaaacgccttacgtccacctacttcatggaacgctaccgcaagttcctgaaagacggcggcactatccatgtaaagaccgacagcaacttcatgttcacctacaccaaatacatgatagagaagaacgggcttcccgtagagttcatcaccgacgacctctaccactccggactggtggatgatattctcggcatccgtacctattacgaacagcagtggctggaccgcggcctgaccataaaatacgtcaagttccggcttcctcagtgcggagagttgcaagaacccgatgtagagatagaattggacgagtaccgcagctacaaccgcagtaagcgcagtagtctccagaccggcaaataaacaatggttgtcaaacagtgaatagtaaatcgtaaaatagtaaataacatgactctttatcctaaattaatcctcgatgcactggcaacggtgcgttatcccggcaacaagaagaacctcgttgaggccgaaatggttgccgacaatctgcgtatcgacgggatgaaggtcagtttctcgcttatcttcgagaagccgaccgacccctttatgaagtccatggtgaaagctgccgagacagcgatacatacttacgtttcaccggaagtggaagtgacgattgccacggaaagccgtcaggcggcacgcccggaagtgggcaaactgttgccgcaggtgaagaacatcatcggcgtgtcttccggtaaaggcggtgtaggcaagtccaccgtatcggcaaatctggctgtgtcccttgccaaactggggtataaggtaggtttgctggatgccgacatcttcggtccgtccatgcccaagatgttccaggtggaagatgcacgtccgtatgcagagaacatcggcggccgtgatttgattatccctatcgaaaagtatggtatcaagctgctgtctatcggtttcttcgtagaccccgaccaggctaccctgtggcgcggcggtatggcaagcaatgccctgaaacagttgattgccgatgccgactggggcgaactggattatttcctgatagaccttccgcccggaaccagcgacattcacctcaccgtagtgcagacgcttgccatgaccggagctattgttgtcagcacgccgcaggcggtggctctggccgatgcccgcaaaggtatcaacatgtttacgaatgataaggtgaacgtgcctatccttggcctggtagagaacatggcgtggtttacgcctgccgaactgccggagaacaagtattacatcttcggtaaggaaggcgccaagcagcttgcggagcagatgaatgttcctctgctggggcagattcccattgtgcaaagcatctgtgagagcggtgacaagggtacccccgtcgctttggacgagaataccgtgaccggacgcgctttcctgcaactggctgctgccgtagtccgccaggttgaccgccggaatatggaaatggcgcctaccaagattgtagagacacataaataaaccggaacagcgaaaagatgtatccgtatcgattaactttaaatttgagaagcatgaagagcttgaaagtattattattgggcgcatgtgtcgcattatgcgcctgttcttcaccgacatccactgtgcagacaaacgacaaaggaactcagtggcagtgggagaatggaacgattgtcgttgaaactccccaacgtccggcagaccggaaaagcgtgataggtctggcactgcctaaaatggaggtggtgcgcgtgggtttcgtaggtttggggatgcgtggccccggagctgtggagcggtttacccatatccccggtacgcagatcgtggcgctttgcgattacgaacaaggacgtgccgaggcatgccagaaatatctgaagcaggcatccttgcccaaagcagccgtatattccggcgaaaaggggtatgaggaactctgcaagcgcgatgatatagatttggtgtatatcgccaccgactggctgcatcacttccccgtggcgatgtgcgctatggagaacggcaagaatgtagctatcgaagtgccctccgccatgaatctgaaagagtgctgggccttggtcgacatgagtgaaaagacccgcaagcactgtatgattctggagaactgctgctacgactggttcgagatgaatacgctgaatatggcgcagcagggcgtattcggtgaggtaatccgtgcgcagggtgcgtacatccataacctgagcccgttctggaaccattattggaagaacggcgagggcgacaagctgggctggcgcctggattacaacatgaagcatcgcggcgatgtgtatgccactcacggtctcggccctgtggcacaggcgctcgacattcaccgcggcgaccgtatgcagacactggttgccatggataccaaatcggttgtgggaaaggctctggtcgaggcaaggacggactctgcctgcaatggtttccgcaatggcgaccataccaccacgctgattcgtaccgccaacggtaaggtgattgagatacagcataacgtgatgactccccagccctataaccgtctgtatcagttgaccggttcgaaaggatttgccaataagtatcctgtagaggggtatgcgctcgatgccgaccaactgactgcttcgggtgtgcagcctaaggtagatgatttgaactcgcacggtttcttgccggaagcggaaatggaagcgcttgtagccaaataccagcatcctattttgaagaaatacggtgagatggcaaaagaagtgggcggtcacggcggtatggactttatcatggatagccgtctggtttattgcctgcagaacggtttgcctttggatatggatgtatacgatttggcagagtggtgctgcctggcagagttaggagaactttccatggataataattgcgctccggtggcattccccgactttacccgtggcgagtggaacgtggtgaaagggtataagcatgcttatgccgctcccgaagaagaagccgccgttatggaaaaggcaaaggcgtttactgccaagctgaaagagcaaggggctaaagaatgggcgcaggctgaaaagaaatgatacttttcactttcggaaaatactttttgaacaaagttcaaacggattcttaacatcatctataataaagtttatatggaataagggacagaagacttgagtttcagtctccgaaatccttattccatatattatttaactgctatgaaaacaaatttttttcttctgtgcctgctgttggctatctccgccaatgcacaaatcgtctatcacgacgcttccgcttttcctcttttaggaaaagctaccgagacaacccttacacgctacgaacgtttgccggactctttacggaatatctcccgtaagcctctatgggagttgggacgtaacagtgccgggcttgccgtacgtttccgttccaattccacccggattgccgccaaatgggaggtactgctcaacaggaatatgaaccacatgacccctacgggcattaaagggcttgatttgtattgcctgcaagacgggaagtggctgtttgccggaagcgggcgtccgcaaggaaaggtgaatgaggcgaccatcgtgaaggatatgctgcccgaagagcgtgaatatcttttattcctttctttatacgacggggtgacttctctttccatcggcatcgattcgctgtctcaaatcagcgggccggcaacggaactgccggtacgtaagaagccggttgtcttttacggaacaagcattctgcagggaggctgcgcttcccgtccgggtatggcgcataccaatatcctggagcgttggctcaatcgggaatgtatcaatctgggatttagcggcaatgctttattggatttggagattgcccatgtgatggcgggtgtggatgcttccgtatttgtacttgattttgttccgaatgccggtgtggagcagataaaggaacgtgccggtgcgttctattccattatccgtagcaagcatcctgatacgcctgtactttttgtggaagatcctatatttacccattcccgttttaacaggaccgtagccagagaagtgaagaataagaacgagactttgcaggctgtgttccggtctctgaagaagcggggagagaagaacatctacctgctctcttccgaagatattatcggacatgatggagaggctaccgtagacggtgttcattttacggatttaggttttatgcgttatgcggaagtgttgtatccggttttgaagaagcatatgaaggattagtgcaaacgcacttgtggggaatcctcacagactccccacaaataattgttagagtaaaaatttatgaaaaaaaagctgaaattctgctttactcgcccttgtccacttttgcttccgcaattatgttttccggtactttctcgcaacgtatgtatttgtttacatcgttctcgttgtcttttgccgtccatatcatcgagccgctttccagcaagtcggtcacgatgtatttgttgttccattcaccgttgccgaaatcatactctccgctgatgacggcgcccagataagggtcgtttttgatactgaaacttccggtgatgtagcgggcatacatgctgtcgaacttctggtacatttcaaaagtctgttccttgcggttgaaaaccacgtagcagtatgtaccttccgccagcggagttccgttccattcggaaagttcccacgtgccgttcaggttggcgggagtcacttccagggtcggtattatcggctcatcgtcatcgcaggacacaaggcagcacagaaagactgccaaagccgttagtttgaaaatattcttcatttcgggtttcttgtttttttatcgttacttggtatagtttactttaatattcagggtccggtccgaaggccgggcatccactccttcgatgataatcgggaatgtgaatgtcttttcctttccggcgggaatcagtgaagcgtctatcgttaccacgatgtcggcttcactgcccggttgtatcacttccggttccgtccggaaagttgcgaacttcggaatgatgagtgccgacaggcgcagcggcttgtctccgctgtttccgcatagaatccgttcggaaggtcgctttccgggcatcacttcctgaaattccatccggttctgtttcagtctcagtcggcccattgcatacgggtagcgtgcccattcatccgctccgggaagaacattcccggtcagggtcagacgtgctacggggtgcttttccgagcaggacagatagacgaacgcgtccgtatctatcgttccgggatgattcttcggatgataagtcagtacaatcgtagcggtttctcccggcagtatctttccggcaggcagttctgctgccgtacatccgcaggtggtccgtacctttgtgacggtaacggcttccttgctgatgttcctgcccgtgaaacggcaggcctgcggagcatcatcctcggtcagcgttccgatgtccagcgtgcttttgtcgaagcgcagtatggattccgcctgctgcatcagtggcggatttatcagcgagtcggctttttgctgccaaggggaacgggcaaataccaatagcactatccaggtaattagtttcattaatcaattacattaaattacatccagccgttgtcgttggcattcttgcgcacggtaacggtgattgtctgttcgcttccgttgctcactttcactgtgatgtgtgtggcgccggtttttacgccggttacttccatcaggttgttgccgacggttaccgttgccacggcggcatcgtccgatgtacaggtataggtcagcgtttcaccgtttacaaagtagtaggcaaggttcacggtcgatgtgcctccttcggcaacgtacacattcggcactttcatatccgaaccgcttccttcgatgttgttcagcaactttcctgcgtccaccacgcccgtgcccattttgccgatgtatttggacagctccatgacggagggagcggcagccggtgagttatggttgcggtagtatgttttcttctttccgccgctgtaccagttatcaaccggttttacggactctttcaatagtgccacaaattcgcttgccttgaaatggcggcgctgttgcacggcatacgacagacctaatgcagccacacccgatacatgagggcatgccattgaagtgccgtccatataaccataggcagggcttccgttccgaatcatggtagaaaggatggagccggaaacctcattgttttcccaaaactcattgtcctcttcccctatggtgtagatactaattgaaaagtgcgccgtattcta

SEQ ID NO: 4170 - DNA, 2962 bp, Unknown
  gut microbiota DNA sequence
aatgaaatcttgttcgtagtggattccatgaccggacaggatgccgtaaacacagccaaagaattcaacgaacgtctggacttcaatggtgtggtattgaccaagttggacggtgacactcgcggtggtgccgccctttctatccgtactgtagtaaacaagcctatcaagtttgtaggaaccggcgaaaaactggacgctatcgaccaattccaccctgcccgtatggcagaccgtattctgggtatgggcgacatcgtgtcattggtagagcgtgcacaagaacaatatgatgaagaagaagccaaacgtctgcaaaagaaaattgcgaagaaccagtttgacttcaacgacttcctgagccagattgcacaaatcaaaaaaatgggtaacttgaaagaactcgcttccatgataccgggggtaggcaaagctatcaaggatatcgatattgacgacaatgctttcaaaagcatcgaagcgattatctactccatgactccggaagaacgcagcaacccggccatcctaaacggctcgcgccgccagcgtatcgccaaaggcagcggcacgaacattcaggaagtaaaccgtttactgaaacagttcgaccagacccgtaaaatgatgaaaatggtgaccggcagcaaaatgggcaagatgatgccgaaactgaaacgataagaaagaaaaatatcctgcatataaatcccgctaatttcatagttcgaatgaagtcagcgggatttttgctttattcggttatttgacctatttttgcgaataatgccatgtaaataataaccaatacaataatattgaatatgacactaattgacggaaaagcaatttccgaacaggtaaaacaggaaattgcaacagaagtagctgagatagtggcgcgcggcggaaaacgcccgcatttggcagctatccttgtaggacacgacggtggcagcgaaacctatgtagcagccaaagtaaaagcttgtgaagtatgcggattcaagtcctcgctcattcgttatgagacagatgtaacggaagaagagctgctggcgaaagtacgcgaactgaatgaggatgcagatgtagacggttttatcgtccagctgcctttgccaaaacatatatcggaacaaaaagtgattgaaacaatcgactaccgcaaagatgtggatggcttccatcctatcaatgtaggacgtatgtccataggattaccttgttacgtttccgcaactcctaacggaattctcgaattgctgaaaagatacaaaatagaaacttccggaaagaaatgcgttgtactggggcgcagcaatatcgtaggcaaacccatggctgccctaatgatgcaaaaggcttatcctggtgacgccacagtaaccgtttgccacagccgcagtaaagacctggtaaaagagtgccaagaagccgatattatcatcgcagctatgggacaacctaactttgtaaaagcggaaatggtgaaagaaggcgcagttgtcattgacgtaggtactacccgtgtaccagacgcaaccagaaaatccggtttcaagctgaccggtgatgtcaagttcgatgaagtagctcccaaatgttcattcatcactcccgtacctggtggtgtaggtcccatgaccattgtctctttaatgaagaacacattgttggcaggcaagaaagctatttatcaataataaggatgatgaaagcgctcatctcctttatctttctactatatagcgtaaccctttcctcacaggaaaggattacgctattatttgtaggagacttaatgcaacaccgggcgcaaatagatgccgcccgcacttccgacgggaaatatgattattctccttgtttctcccttgtaaaggaagaaatctcccgtgccgatattgcaataggtaatcttgaagtgactctcggtggaaaaccttatcaaggctatcctactttcagtgcacccgacgaatatctgcaagctatcaaagatgccggattcgacgttcttctcacagcaaacaatcattgcctggatcgcggcaagaccggattggaacgaaccatcacacaaatcgaatcattttccataccctatgcaggtacttaccggaacgctatagaacgtaaacaactctatcctctcttcatccggaaaaaaggtttctgcatagccatactcaactacacttacggcactaatggaatcaaggtatctgcacccaacatagtcaattacattgacaaaaaaacaattctaaaagacatacatagcgcccaagccgtacgcccggatgctattatagcctgtatgcattggggagaagaatatcaatcactcccgaaccgtgagcaatgcgagcttgccgactggttgctgaaacagggggtgacccatattatcggttcgcatccgcacgtaatccagcctatggaattacgcacgaacggcaatcaacagcatgccatcgtctattctttaggaaacttcatctccaatatgagcgctgcaaatacagacggtggactcatctttacgctgcaacttgaaaaatatcctctccccaagcccatccgtccattacaaaaccattcaagtcattcaccgtcgcccgaatcttttgcctcttcttttccattcgcccgtgtcgtccgatgcggatacactttagtatggaccggccgccccactctcaccggagaaaaaaattacattttatatccttcttactcaccacatagccatttgccgcaatcagcccgtaaccgtctgaatatcttcattaaaaacactcgaaagttcctgatacagcataatacagaaatttatgaaaataataaatagctatttttttggaaaaaaaacgccaaaacatttgtaatatcaaagattatccatatctttgcaccgcatttaagaaatgcgacaacatggtgactgtagtttagt

SEQ ID NO: 4171 - DNA, 2161 bp, Unknown
  gut microbiota DNA sequence
agccgctttgagatggctccgggaaacaaagatgtagaacgcatcggaaaattcctccaggcaataagaaccggtgaaactgccggctgacggcataaccgccgaccggcagataacgtaactgtcaacaataaatctgtaataacaaactcactatgaatcgtatcaaccaactcttccaagacagccccaaaaacctgctgtctgtctacttttgtgccggcttccccacgctcgacagcacagccgatgtaatccgtacactcgaaaagaacggagtgaatatggtagaaatcggcattcccttcagcgatccgatggcagacggcatcgtcattcaagatgccgccacccgcgccctgcgcaacggaatgtctctccgcatcctctttgagcagttgcaggacatccgccgggatgtccgtatcccgttgatattaatgggctatctcaacccgattatgcacttcggctttgaggctttctgccggaaatgtacggaatgcggcattgacggcgtaatcatccccgacctgcctttcagggaatacgaagaaaattataaggccgtcgcacagaaatacgacatccgggtcatcatgctcatcacccccgaaaccagcgagaaacgcatccgcgaaatagatgcccataccgacggattcatctatatggtatcatcagcagccaccaccggcgcacagaaagatttcgacgcccggaaacaagtctatttcaagaagattcaagatatgaacctgcgtaatccacgcatggtaggtttcggcatcagtaaccggcagacgttcgatacagcctgctcccatgcgtccggagccattatcggaagccgcttcgttaccctgctcgacgaatacaaaggaaacgcacaaaaagccatctcacatctgaaagaagatttgggtaaaagcggtaaagcggtaggacagtaagacaactaaaattccatttttttgcgtatctctgtgaataatacgaagataagctacatttcaacataaaaaatggacaagttcattttattctgttatcggtttacattatctttgtgcccgaaaaaaagaaaaaagagatatttatgaaagcagattatccttccgttctcttgatttacacgggcggaactatcggaatgatagaaaatccggaaacaggtgcactggaaaatttcaatttcgcccacctgctcaagcatgttcccgaattgaagcgcttcaactatcacatctcgtcctatcagttcgatccgcctatcgactcctctgacatggaaccttccctgtgggccaaaattgtcgcaattataaatgacaactacgaaaactttgacggctttgtcatcctgcacggaaccgacactatggcatatacggcatcggcactcagcttcatgctcgaaaaccttgcaaagcctgttatccttaccggttcgcagctacccatcgggacattgcgcacggacggaaaagaaaatctgattacttccatcgaaatagctgccgccaaacgtccggacggcacagcctttgtccccgaagtgtgcatcttctttgaaaatgaactgatgcgcggcaaccggacaaccaaaatcaatgccgaaaatttcaacgctttccgctctttcaactaccccgctctggcaaaagctggaatccatatccgttacaacgaacacatcatccgtcgccccgaccctgcacgaccgatgaagccgcattatcttttcgacaccaatgtcgtagtcctcaccctgtttccgggtattcaggaaagcatcatcgattctgtacttcacgttccgggattgaaagcagtggttctcaagacattcggttccggcaatgcaccgcaaaaggactggttcatccggcaactgaaggacgcaacagaacgaggcatcgtcattgtcaacattacccaatgccaaagcggcggtgttgagatgggacgctacgaaaccggactgcatctgctcgaagccggcgttatcagcggctacgacagtacgcccgaatgcgctgttaccaaactcatgttcctgctcgggcacggacttagccaggcggaaatccgtcgccggatgaattcggatttggcaggggaaattaccaaagagtaatttcctctttttttcctcttt

SEQ ID NO: 4172 - DNA, 2618 bp, Unknown
  gut microbiota DNA sequence
cggaaaacacggatttcacagattttctttattctttttctgtgaaatccgtgttttccgcgtaatccgtgcctaaataaagaaacaaatagtaagcggattttagttttgacacatattctatccggattctggtactatctcattcggttatttgggcgattgtggcttttactctttcttgagttgtcacattccgttcaaattcattgatttgtacggttgcccccatcggtacccgttctttgcggtattgcatacggcttgctacggtttcccttgcagagaaatgaaattcgtggatacccgtttcacgggcaatgcgtgcgatgttgctctcatttactccgcaaccggcgagtaaggtaatgcgtcctgctgcttgcaactggagttctttcaatagaggaatgcccgcttcggcggtgggttgctgaccggaagtcaggatacggtcacatccgagactgataatatcttccaatgccttttgcggattgcggcaaacatcgaaagcccggtggaaagttaccgatatgtcttgggcagcttccataaactgcttcattagaggaatatccacttctccatctgccgtcagacagcctaaaacaataccgtctgcccctaaacggcgggcattgtctatgtcctttagcatgatacgttgctcgataggggaatacaggaaatcaccgctgcgggggcggataataacgtgcaacctggtgttttgcaagacttctctcgctatgacaatatcaccgtaggaaggggttgttcccccttcgggtattccggcgcacaattctacccgattggctccgccggcttgggcggcgatgcaactctctacggagtttgcgcagacttcaaataaatactccttcatggctttggtttttgcgttataccggcaaaaataagaaaactccgcaaactccggaacaatataaaataaaaaaaggagcgaaggtacgataccaacgctcctcttatggttttgattctcttgtttacttagcgtagcttactgcacgcgtttcgcggataacagtaatctttacctgtccgggataggtcatttcatcctgtatcttcttggctatttcgccggaaaggttttccgttgccttatcgtcaatcttgtctgcaccgacgattacgcgcaactcgcgtcctgcctggatagcatatgtcttcgttacgcccggataggacatagccagttgttcgaggtcgttcaagcgtttgatgtaagcctctacgatttcgcggcgtgctcccggacgtgctccggagatggcatcgcatacttgtacgatgggagccagcaggctggtcatctccacttcgtcatggtgagcaccgatggcattgcagatatccggtttttccttgaatttctccgccagtttcataccgtagagtgcgtgcggcaattccggttcttcatcgggcactttaccgatatcgtgcagcaatccggcacgttttgccttcttgggattcaaaccaagttcggatgccatcacagcacagagattggctgtttcgcgggcatgttgcaacaggttctgaccataggaagaacggtatttcatcttaccgatgatacggataagttcgggatgcaggccatggatacccaggtctatggtggtgcgtttaccggtttcgatgatttcttcttccacttgcttgcgtactttggctactacttcctcgatacgtgccgggtggatacgtccgtctgttaccagctggtgcagcgccagacgggcaatttcgcggcgaacagggtcgaaagctgataatacgatggcttccggagtgtcatccacaacgatttccacaccggtagctgcttccagcgcacggatattgcgtccttcacggccgatgatacgtcctttgatttcgtccgattcgatgtggaatacagtaacggaattttcaatggcggtttctgttgccacacgctggatagactgtatgacgatacgtttggcttctttacttgctgtcagtttggcatcatccataatatcattgatataggattgcgcctgtgtcttggcttcttccttcaaggattctaccatacgctctttggcctcttcggcagaaagtcctgagatggcttccagtttctcgatttcctggcgttgcatgtgctccagttcctctttcttcttgtcaacgatggccaattgggcttccaggttctcttttaccgcttctgcttccagttttttgcgttggatttcctcctggcgttggttcagcaccagttcgcgttgtttcaacttgttttccgcttgctgtatcttttggttacggagcgatacttctttctccaaatcggctttcttgttcaggaatttttcctttacttcaagcaacttgttctttttaatcacttctgcttcggtctcggcttctttgaggatgctgtcgtatttggacttcaatccatgcttgaagaacatgtacgaagcaaatccgccaacgatgaaacaggcaatggatactactattgtaactactgtcattttattaatttgttttttaaagtatataaataaaaaacactgcataaaagcctgtccgttgca

SEQ ID NO: 4173 - DNA, 7076 bp, Unknown
  gut microbiota DNA sequence
ttgaaataagcttccaatacttccgtcagttcttttatcttggctgtatagggctcagtatcattacggtctttcaactgaagggtctccaaagcaaattgataagccaccatggctataatcctctctgaagagatgttctgataatgttcccgatacgcattaatccggatatttacctgcttggcagcttcccttactatttcctcgtcctcgcggttgatggtgaggggataggctgctcctgccatttgcaggtttatctttatcttatcgttcatacatcctctttcttttattcattcaacaaagcgatgcatttatcgacttcacgcactaatttggacaatcgcagtttcgtctcttttacgtcactgccgttaaggctgattgtcgtagctgtttttaggttcgtgtagttgttttccagctctttgtaatcggcacgtactttcccgcattcttcttctttagcttgtagaagttgcttaagttcagtattttcgcgttttaattcatcatgcagatagattaaatgccgcagtctggcttcaaaagtacttaatagcttcttttcttcgtctgtcattactacaccaaaattgtacacaaaaatacaattaacttggagattacaaaagcttttcaaggaaaaatgttctgtatgcgttaaaataaggggaaaacaggactgttattaatttatttcatgctgaaattttctcgtccgacagccgtttctctttcgtccgacagttgttggacgaaagagaaacggctgtcggacgagaagtaaacaactgtcggacgattagattttggcagggttggcattagtccgtagttgtacgggtaattgcttcttctatcatttgggataagtttgtgtatatggttgttgaaatgtatataaaataatttattatataatttggtttataaaataaacttgttatctttgtatcggagttcgaacccggagttgtaacaatgtataataaaaagctggataagactatggaagatagaaaattgaatgagaaagaaagcttggagcttatcactcaaatgattcggaacacacgtcggaatctggatgccggtagtggaaatatgtttttattgtgggggtatgtttgtgtgttgctgactctggttgtttgggccggggtcggtctgacacaaaattctgcatggatgtggggcttttggggaattcccgttgtgggctatctgctgagttatatttttgtgcggaaaaaggacaagtcggtgagtttgtatatagataaagtattgaatgagatgtggcagtttatgggaatcgtctgtctggcggttgcgttgatggccgcatacttccatgctttcgaagtaatattgcctttgtgtgccatattgctttcgttgggcagtatctttacgggagttctcattcgttatacccggttttcgggcttgtcgagcatgggcgttctgttgggcttgagaatgttgtttgaggtttgggataagtcctcttttttgcagatattgccggagtttgttctggtggtcatactcgcaatgataataccgggacatattttgaactataaagcgaagaaggaaaacaaaaataagagtaagtgatatgtttaaggaattaaaccctttgcttcacagtgaactgaggcttgccgtaatgtcgttgctcatcagtgttgaagaagcggattttgtatacatccgccagcagaccggtgcaacgtccggcaatctcagtgtgcaactggataaacttgccaaagcggggtatatagttgtgaccaagacttttaaggggaagatgccctgcacgctttgcaagattaccccgcagggaatagatgcttttgaggaatatgtggaggcgttgaaatcgtatataatgaagtagggatgtgaacccgttagttaagagtctgtttaaattctcttcgagaaatgtttcggacagaatttaaacagactccggaataaaaataagaaaatatgaaaattttggtgacttatgccgttcaaggcgaatttacggaattgaaattccccggtttgataggggaggaagaagtgcaggtgggttatcttcgcaccggaataggaaaggtgaaatctgctttttaccttacggaagcgattaatcgtgcgcagcccgatttggttgtcaatgtgggcacggcaggaactgtccgccatcaggtgggggatatttttgtatgccgccattttgtagaccgtgatatgcagcggctgaaagggtttgatatggaatgcgagatagactcggcggcactgttggcgcaaaaaggatattgcctgcattggcagcgagaaggagtgtgcaatacgggtgatactttcctgacggaactgtcggatgtaaaaggcgatgtggtggatatggaggcttatgcccaggcatgggtgtgccgtaccaagaatacgccgttcattgccgtgaagtatgtgacggacattatcgggcagaattcggtgaagcactgggaagataaactggcggatgcccgtaaaggactgggagcgtttttcgaatctatttcagtgttttgaaagagaggatgtggtagcttgttcctgctgcaatcagcaacaacactgcctttagccaccagtaggggactatgaaaaagatacagttgaggatggttatccatatcagcgagaccgagatgattttggctcttaacgggatggctttattttcacggaagttacggatgtagcttcccaggtatttatggtgcagcagccggttgtaaaggcggggggaactgcgtacataaagggcggctgtgagcagcagaaacggagtagtaggcagtaacggcaggaaaatgccgatgatgccgagtgccagagaaagtgtaccgaacagaatataaaggactttcatgtcgcaaaaatacataaaaagatgaataataaaattgtttgggattgtttattgttcatatgtacagggaaatatgttttctgcctgcaaccggagtctttgtggacatcaggcagccgcgcagtgtcgtagtgctcactgtatgtatgaataagcgtcaatctcgtgtgtaaattccaagttttttgtacttttgctgccgcatcgaggtgacattagatgcacggttttataaaatgatattttaaccagcgtattaacagtatgtacacagtcattaaacgaatggaggtttcggctgcacacagtctgaatctttcttatcagagtaaatgtgagaatctgcatggtcacaattggataatcacagtctattgccgtgccaaagaactgaatgccgacgggatggtggttgatttcagccacatcaaacgggcggtgaaagaaaaattggatcaccggaacatcaatgaagtccttccctttaatccgacagccgagaatatggcacgctggatatgcagccagatacctgcctgctttaaagtggaagtgcaggaatccgagtcgaatatagccatctatgaggaggattgacaggagcgcttatgaggaagattaacgaaatattttacagcttgcaaggagagggctttcatacgggtactccggctgtttttgtgcgtttctccggttgcaacctgaaatgttctttttgcgacacgcagcacgaagagggtgtgtggatgtccgatgaggaaatcttggcggaagtggggaaatatcctgcggtgacggtgatactgacgggcggagagccttcgctctggattgaccgtgaatttgtggactgcctgcaccggatggggaagtatgtctgtatcgaaacgaacggtacgcatcccttgccggataatatagactgggtgacttgctcgcccaagcaaggtgcaaaattgtgcatttcccgtatggatgaggtgaaggtagtgtacgaaggacaggatattgccgtatatgaatcgcttcctgccggacactttttcctgcaaccctgttcttgcagcaatactgcggaaactgtggcttgcgtgatgcagcatccgaaatggcggctgagcttgcagacgcacaagctgatagaaataaaataagaccttgtaatttttaaaatttacaaggtcttgtcgttgcacgggaggagaggctcgaagaataacgattgtacctttaattttctatttgtattgattgtcaacatgctacgaattcattccttaaatgattaatatattgtgatgtccgatatttgtctgagaaactatatgttaattgaaaagtaaaaaatgaatacgaaaagctataggtcttttaatatttttaattcagtttcaaatctaagaatacaagcttttaattcttttttatcaaattctataagtcggcttttatcatattcgatcccattaatggttattttgttatcaaaaggaccgtcaatgggtaaatgatttccggacaaacagtctgttaactcttgaaatgtattttttaatctgtataagaggtccgtttgtttttcttcggtaattatcataaaaatatttaattagatagttattgcttatatacgttttttgataattttttcaagtaaccttaattcagtttcaattctagctatacatgcttcaagttcatctatatttatttctattaggtcgcttaatgcatattgatttttttttaactgtattgggcaatcatcaggtaaattacgtgttgattttattgaaggttcatttccttgagtacagcataataaagcttcgaacttttctttaaggtactcaatttcgttctttacatcatctttaagtactaatttaacttctgacatggttctatttgggggcgttcattaatatttgaattgttctttctttttcacttattactctttccttttcttccaaaagggcattgagatgttctatctctttctggcactcactcaaagttatatctcctgatatcttgttaccattacctttgacttgatgaccgatacttatccctaaagaattagtttctctgtcaaaaaaataatctattggcacattaaaataatctgctatgatttccagattgtcggcaccaggaattgaagtgttattgagccaaacatataaatttgatttagatatacttgtgtcttttataaactgtgcttgacttatatttctatcttcaaacagtcttcgtattttatcaggattaaacatgttgtattatttgtattggatttaaataataatatttggttaaaataataaggttaatattttgatattagattattattttagtcctttgcgttataaatataataataacaattgtaatatttaagattatgagcgaaaaaacatcaaaaatggtacttaagtaccattacgaccggatggagaaaagcacgagactaaagttccgtgatgaattcctaaaaagaagcggtatgtcgttgattacattctacgacaagttaagaaaagactccttcaaacctttagagagagaactatttgagaatttatataagtctattaacaactaaaatataacaattatgggaactaccttacttacagcagcaaaagcgaaagaaattacaaaaaatcataataatttggatgatttgttagaacgaattttctatactgcttttaaaggagaatcttcatttattgtatttgaagaactttctgttgatatcatatctaaacttgaagaattaggatataaagtggaaaatagaactaaggatctttacccaacattcgttatatcatggtattaaaagatataatctccaatatcgaattctataacacgccagaaggtgatgtgatgatgaaagaacttcatcatccggcagtggtactccgtgagactgaccgccccactatcgaggcgatacttgccatcatacgtgaccgctatcccaaggcacatgccaggttaatgaagctctattccagtaataccatgaatcgatggcactatgaattccgggtagttcaccgtttcatccgttgcaactacggagagtatgaccaatacaaccttgatatcaacaaggatgggcagtttatgttcgaggaggtgaattgtccgctgcgtggtgaatgtgaacatgaaggcgtgatttgccgtccagagtttaatacaacattgactgaccgcgagatggatgtatttcggctcattgccttcagttgtcagacggatgatattgcagcagcactgcatatctcgccttgtacggtgaaccgtcatcgggagaatattaaagcgaaaatcaaggttcgtaatgtcggtgagatgatttcctactggcatcagaatcaaatgaaatgaatttaaacaaagaaactatgattcgtaagaatttagcaatgcataacaaggtactttcctattttacagaaatagtgcatgaagaatctattccagtgaatgttgatattggttccagatatgtagatggtaatggagatacgcaaatagatgtattactggaatacggagaaccggatgaggattgtgttaatgaggtgttgacaagggctatcaatgtagcgattgaacaatggaagtaatttgaaaaatagttttatggttactaaaacaacattcaaaaagaagtttccggatgttaaagtccagaagttgcaaaccgaagtggtgtttagcagaaagcatgtagaagatgctgttttacaaatgtgtggaatgatggggttaggattgctttattacagttattccaataaatggataacagtctatacttccgataaaatgaaaaaggcactggattcaatgaaaccgggaactgaagtattccatgaacattatggagtatatggcaaggtcattagcgaagaacctttcattatctgtggggaactgtgtattcgggttgatttcggaggaatgctggaaagtggagtatacagttgtacatgttttgtaatatgacgatatgtagatactaattgaaaagtgcgccgtattctaattgaaaagagctccatccataactggttacaaaattactataagtttaaaatattca

SEQ ID NO: 4174 - DNA, 13289 bp, Unknown
  gut microbiota DNA sequence
acctaattttttcaaattacgggcactttcttttactccttctttatgaccttttgccaatcctttattcaacccctcttcaataccttcggctctaccttcagctctaccctcagctctgccctcggctctaccttcggctttgccttcagctcttccttcttcacgttcggtattgatattgtcacgaaggattacaatattatccaagtggcggtaatacgcagcaagctcatccttggtcatgctgtccagtttcaacctctcacgggcctcttccagaccgggagctgtagctgtagaaggtatctccccggtattcaaataataaatccattcttccaaaggactcctggctacctgattgaaatcgtttactttcaggatataatattcgggatataactggctcaccgcatccaccttgaatgtctgcttttggaaaggggtgagttcaagaaggtcattggtgtggatacctctgaactccgtctttccatgataaacgaaatcggttccatgtcccagagagaaatagacgatattaacgctatagaccttgcggaccttgtcatagctttcccctctattgatatactcggtcaccaatttggaagtgccgaacagcatacgctggaagtaggcgtattcattattgttctgtacctctatcaataccagctcacctttggaattctcggcaagcatgtcgacgcggttatacttgtcatactcgtcctcctgattgctttcgctctcaagaagccgccggataatgatcttttcacccaataacgtagtgagcagaccttccagtacactgaaattagccttgttcctgagcagacgtttcatcgcccagtcaaaacggattatctgattttcgttgctatttttcattatataatatattgattcttacaaagataggcaaaatactttagattacaaaagaatgcagggagataatataatcttcataagcgacaggtatactgttttcttcactgcgtcttgaaattttgtttctgcttatcttttgccgcacattccggacaaagccctttcagtacataattgatgctgttcagcgtaaatccttccggtacttgtactaccggtgtagggatattctggaagcagaatgtcttgttgcaactctcgcaatgaaaatgagtgtgcaggtcgttgacttcgcaagagcagcttgcactgcataccgcatatttaaaagaacctgtcccgtcatcgatgctgtgtatcaggtggtgagaaaggaaaagggtgatggtgcggaagatagaggatttgtcaaccgtatccagcatattttccaaatcgagtaaagagacggagcgtcctgccttgagcatggcctgcaatactaatatgcgtatggcggtgggctgtatctctctctttgccaacaaggctaaataatccttttctttcatatgcttttccctttctattttatcagtttctgtacgcggatggcatttactatggcgataagagccacgccgacatctgcaaagacagcttcccacagggtagccagtccgccggcacctaaagccagtaccaatagtttaactccgaaagccagcgaaatgttctgccatacaatccggcgtgtctgcttgccggcacaaatggctgtagctacttttgagggctggtcggtttgtattacgacatcggcagtctcgatggctgcgtcgctgcccagtccgcccattgcgatacctacatggctgagggcaaggacgggagcatcgttgatgccgtcgcctacaaaggctatccggttggcagtgtttcgtttcagttcctctatgtgctctactttaccgttgggcagcaggttgccatacgctcgcgccacccctaacttctctgcaaagttagtgacaattgcctgcttgtctcccgataatatctgaatattattgatatttaaagctttcagctcttctatggctgtacaggcatcgtctttcagtgtatcggatagcagcagataacctgcgtaggctgaacctatggcgcagactaccaccgtatcggcgatttcggataattcctgcgggtattccaccttatattcggacagtaagcgggtgtttcctgccaagacacgctgtccgtctatccttgcttcgagtccgcggcctgcaatttctgtaacttctgttgccggagacaagagtatatgcctttgctttgcatacccggtgatagctttggctatggggtgtgtactgttttgttccgcagaagctatgacttgaagcagcttctcttcggatatgccttgcggggtatgacaagactgtacttcaaacgttcctttggtcagcgtgcccgtcttgtcgaagaccaccgtattgattctggcaatggcatctaagtaattgccgcctttaaacagtattcccagacgggatgccgcaccgatgccgccgaaatatcccaagggaatgcttactaccagggcgcagggacatgagataaccagaaaaacaagtgcccgatacatccagtcgttaaagataaacgaaaactgcgcgtttgccaatgaatagaggaaagggagcagcacgatcaatgccgccagtccggttacaatcggcgtatagacgcgggcgaacttgcgtatgaacagttcggccggcgctttacgttcggacgcattctgtaccagttccagtatacgtgagagcgcgctcttctcaaaaggccgtgttacttccaccctgataaccttatccgtggaaatcattccggcaaggacttccccgcctttacggatggtgcgcggtatgctttcgcctgtgagtgcggaagtgttgaaggcggcagcttcatccagcatttttccatccaacggaacacgttctccggtttttacttcgatgatgtcgcccgtctgtacgtggcggggagatgtgacaacggcctcattgcctttgatgaccgttgccgtttccggacgtacgtcaatcagtgcgctgatatttcgctttgccttgctcaccgccctttcctgaaatagctctcccagtgagtagaacagcattacggctacgccttccggatactccttgatatagaaagctcctaatgtagcgatggacatcagtgtgaattcactgaaaatgtccttttgcaggatgctttcccatgcctctttcagtacgggcaggcctacaggcaggtatgccgccaggtaccaggcaaacataacagtgtcatctgcgaaaaatcccatacctgtagctttcatgatgattccgctgaaaagcagggcggccgaaagcaggattcttccgtattcctttaagaaaccggtgtgttccggttgtttgtctggctgtgcgttaccgtgtgcacaacaacatgtacaattattgtttcccatattatctcttgtttttgatgcaaaggtagataatagggaatgcaaccaggttgcaaagtcgctctgttgcgggcaatgctcagatttccagcatctttttttctctttccaaatctttttcgttgaacaaaggagaaggaacggagcaggttttgatataatcgcccggctggcaggtatagttataataaggtatctgttcttccgtcagctcttctttggggatgatagtgcctttcagttccaggaagtcgtccatgccggtgctgtccgagtgtttgatgaacagtattcttcgggctatcgggttgcggttgtagtcgagacagaggtaaagccctttgagcatatgcggaaaatcgtacataggcagttgcaggtagattgtgaacagtgccatttgcggtgactcccgttcattgaatatgatgtaggagttctggtggttgctgaaaatacctgttccgaaatgggtggtattgtaggcgctcatgtgtacgactttcacatagccgttgttttcggatgttgtaataagataaggctctactttcagggcattggtcgaagaggaaaggctgtaactgatgtatatgccgctgtagttatatgcgtcttgtacggaacggagcatctcttccgacagcatgtccagaaacggattttctttctgtccggtggcaaccgcaggctccagtgcatacaactgttcttttaactctttcagattgccgagaaggcgttttttcgatacattgttcacttgcgacagggcgtagtccaatgcttcttcttcattattcccttttttaatgcacccgatataggtaggcaatacgcttgagtagagcgaggacagtacacttgccgccatattggtatggtcggctatctctttcatctttacacctttgttgcgcaggtattcaatgcgtctgtatatttcaggcagttcgttcatgtcgttgtgatataatggctctttattcaaaatgtctgcaaagaaagccgtgggatgttatgctttcattacattaatattgcattaatgttacattataaaatgttgatttcatgaatattattaataatgggaattcatttttgctgttaaaataccgccttacttttgctgccggaatcaaaaacaagatagatgtcatgaatgcgataatcggtaaaaaagaactcacagtttccaataagaatttatctgatgccttattcattctttgggcgggtggagctgctttgctctcttattctttggtgtatgcattgcgtaaaccatttacagcggctacgtttgacggactcgattttttcggtatggactataagactgcaaccagcattgtacagatatccggctattttatttccaagctgataggtatcaaggtcatttccgagttgaagaaggaaaaccgcttgaagttcattatcctgtcagtggcggttgccgaactttcccttgtacttttcggagcgcttccgcaaccgttcaatgtatttgccctgtttttcaacgggctttccttagggtgtatgtggggagtgattttcagttttctggaagggcgtcgtgtcacggatttactggcaagtcttatggggttgagtatcgctatcagttcggggaccgcaaagtcgattggactttttgtgatggataatttgcatatcagtgaattctggatgcccgctttcatcggtgcgtttgcttttccgctgttgtcgtttctgggatggctgatgacacggatgccgcaacccacgcaagcagataaagaactgcgcacggaaagggttgccctggacagtaaggcacgtttaagtctgttcaagaactttatgcctgtgctggtaatgttgttctttgccaatctgttcgttacggtattgcaggatatcaaggaagattttctggtgaagatactcgatgtcgatgcggcgggactctcgtcatgggcgtttgccaaggtggatgcaacggttacattgataattctgtgtatgttcgggctgatgtccgcagtacggagcaacataaaggtgttgtgtatgctgttggggctggtcacttgcggtacggctacgttgagttttctggctttcaattattctgccttgcaattgcagcccatgacatggctgttccttcaaagcttgtcgctctacacggtctaccttagtttccagacactctttttcgagcgtttcatcgcttgtttcaagataaaagggaatgtgggctttttcattattacactggatttcatcggttatacgggtacagtggtggtgctgatattcaaggagttctttaatcctgctgtcaactggctggacttttacaatctgatgtccggttatgtgggtatagcatgcagtatagcttttataggttcggcagtttatctgatacagcgttatcgtcgtgagaaatatgcggaagtttccggtgaagaactcgatactccccacccggcgggtggtttatccggtaagcgtgttgcattggaacttcttccggatatggcaaaataaacggatagggaaataactcaaagatataaattatgaagaaaattgaatgtattattatggattgggcaggtacggcagtcgattacggctgtttcgctccggttgccgctttcattgagagttttaatgcgataggcactccggtaacggctgctgaaacgcgtgctcacatgggactgactaaagtagaggaaatacgcgccttgttcaatatagaccgcgtaagaaacgagtttcaggagaaatacggacgcccgtatgccgaggaagatatattggcgcgctatgcagactttcagcgtgtgttgtttgcctctctggaagattatacaacacctattcccggtgtggttgaaacgatatcgggattgcgtgcacaaggaattaagataggctccactaccggctatacccgtgcgatgatggatgtagtgttgccggctgccgcagcccgcggatatgtggttgataattgtgtcacgcccgacggacttcccgcaggacggcctgctccttatatgatttataagaatatgacggaacttgccgttccctcggtggattgtgttgtgaaggtaggcgacacgattgccgacatcaaagaaggagtgaatgccaaagtgtggacggtgggcgtagtgcttggcagtaacgaactgggtcttacccaggatgaagtgaatgctttgtctgctaccgaactggagctccgcaaacaggatgtccgcaaccgtatgctggctgccggagcccattacacagtagactccattgaagaacttcctgccgtaatagataatattaataactttaaactatcaagaatatgaaaccttacattttattgactcccggacctcttactacttccgaaaccgtaaaagaagccatgctcaccgattggtgtacatgggatgcggattataatgtgcatatcgtagaggaaatacgcaaatccctcgttgcactcgctacaaagcaaaccgatgaatatacttccgttcttctgcaaggcagtggaacctattgtgtggaagccgttataggaagtaccgttaagccgggtgacaaactgctgattttgagcaatggagcttatggtgaccgtatgggaaatatcgctgagtatcacggtatcaactatgatatgctggcctttgacgaaacggagcaggtgtccgtcagctatgtagacgattatctggcacataatgcggagattacgcatgtatcggtggtacattgcgaaaccactaccggcgtgctgaacccgttgaaggagatagcccacatcgtaaagatgcacggaaagaagctgattgtagatgctatgagcagctttggcggagtgcctttggatgtagaggaactgggtattgattttcttatcagcagcgccaataaatgtattcagggtgtaccgggattcggttttatcatcgcccgcaagtcggaactgatgcgctgcaagggtgtttccaaatctctttcgctcgatatttacgatcagtgggaaacgatggaaaaaggacatggaaagtggcgtttcacatcgcctacccatgtggtgagagcctttaaacaggctatggatgaattggctgaagaaggaggggtagaggcacgtcatcaaagatactgtaaaaatcataaggtattggtagatggtatgcgctcactcggcttcaagactctgttgcctgacgctatacagtctcccgtcataacttctttcctttatccgaatgcggattttgattttaaatcgttctatgcacagctcaaggaaaggggattcgtgatttatcccggcaagatttcgcaggcggacacattccgtattggcaatatcggagatgtgtatccggaggatttcagcaagttgatagaggtaatcaaagaatgtaagtattgatgaacgtttcgggaaaactatggtttctcgggcatatattgaggtactctaagtcatattctcagagtacctcagttgtatcctcagggtatcccgattgtaccttcaaggtacttcagccgtgcacttaggcattcctctgcccggaaaacgttgtggggtacaacaattatcgggggagaatcgttgtagacgtaagaaaaaattatatctttgttcgtggtgtcaggtattcatgaagatgttgaacccgattacgaacttaaatgtatctttatgaaacgattcttcctttttgctgccgcggctgtgtgcatggtgcttgcgggatgtaacgggcagcaaggtcataccccgtcttctgttgcgcaggtatcggaacctgttgatactgttgtgcctgtagtggaagtgcctttcagagagaaattgctgacggcagccgatgtgacgcttaccaaagatttgctttacgatacatatacgctggaagatacctatccgtacaaggataccgtgcgttctttcaaatgggatgtaatccgcaattgtctggcttatatagagaatatgcagcgggacagtgtgaagtgggtggtattgcagaattataagaatctgaatcgggaagcccctttggtgcgtaagttcgtgcgtaatgcctatcgccgtgtggcggatacgcttggggtggagcgttatcagtccgttcccttgtatttgccgggagatacgttggtgcccgaacgttatggcagggatgggacgttggcttacctgctgggtgaggaaggcggtttcagccgtattcttcctattacgctggaagatgagtggctggttcctcgccgttatttgaagctgctggcggacagcactgtctttaatcatgttattttcgtagaccgtcttgaccagaatatcgctacgttggagcgcatggataaaggtgaatggaaaatccgcagcatgaatcccgcaacgacaggacggcatgcaccgccttatgcacaggaaacgccgctgggcatgtatttactgcaacagaagaaatcgcgcatggtctttctgaaagacggctctgcggcaacgggcggatatgcgccttatgccagccgttttaccaacggagcctatattcatggagtaccggtgaatgttccgcgtacagccatgattgagtatagctggtcgctgggtactacgccgcgttcgcacatgtgtgtgcgaaatgctacttcacatgctaagtttgtatttgactgggcgccgacggagcgttctttagtagttgttatcgaatgattactttctttttaactatctgtatgatagtcgtatgggtggaaagtgctaactttgccgccggtatttttcaggtcggatagttatgttgagattttgcctctcttttttatttatgttttttccctgtttcctgtttttgggaaacagacctgctacctgcatgacggataagccggatgtttcgttggcggcagaatcggcagcatgtgccgatttgtatcgttccatgcaattggaaggggtagtgagttggaaagctttccgccaggcagtaacgggctatcataaaatagcaggccgtaaacgggatgtactgactctgattgatttttcacgtccttctaccgagaagcgtcttttcgtattcgatatgaagcagcgcaggctgcttttctcatcggtcgtctcgcacggaaaaaacagcggcgacaagtatgccacttcattttccaatgaatacggatcttataaaagttccctgggattctatctgacagaaacaacctatcaaggcaggaacggatattccctcatcctgaacggattggaaaaaggtattaacgaccgtgcccgcgagcgtgccattgtggtacatggagctgcttatgccgatccttcggttgcaagcaggggagggcgtttggggcggagtttcggttgtccggctgttccgcaaaaactcagccgccctattatcgacgccattaaagggggaagcgtgatgtatatctatgccgaggctcccgactatctggctcacagctccgtactgaagaaaacgaccgggttgtaagcgactctttgttcacgctccgtatttttcgtatcttttgatatgtatcaatttccctcagcatttcttttactaattttgcgtcgagtttcggggattagattgtatggcaacatcaagagaaatgacggaaggacgggctcttccgctcatatttaatttcactttgcctttattgttgggtaatttgctgcaacagacctattcgttggtggatgctgcaattgtcggtaaatttttggggataaatgcactggcttctgtcggagcgagtacatcggtcatattcctgatactcggtttctgcaacggatgttgcggaggattcggcattccggtggcacagaaattcggagcgagggattatattacaatgcgccgttatgtggcggtcagcttgcaactggctgcggtgatgtcggtggtgcttgccgtggtaacaagcatctgttgtgcagatattttgcgcatgatgcgtacgccggacaatatcttcaccggagcttattattatttgcttgtaacttttataggtgtcccctgtaccttcttctataatttgttgtccagcattatacgtgctttgggtgatagcaagacgccgttctggtttctgctcttttccaccgtcctgaatattctgcttgacttgttttgcatccttgttttggactggggtgtggcgggagcggcaatcgctactgtcttttctcaaggagtatcggcagtgctttgctacatctatatgatgaaacgttttgaaattctgagaactactcctgccgaacgtaaattcgacagtacgttggcacggacgctgatgtatatcggagtgcctatgggattgcagttttccattaccgctatcggcagtattatgctgcagagtgccaacaatgcgttgggtacggcatgtgtagcggcttttacggctgccatgcgtatcaagatgttctttatgtgtcccttcgagagcttgggtatggcgatggccacttatagcggacaaaactacggtgcaggcaagcccggacgtatatggcagggtgtcaaggcaagcgcgctgatgatgatagtctactgggcgttcacttttgcagtgctgatggttggagccaaaacgtttactctattgtttgtagaggcttcggaagtggaaattctgaaagatgcggagcttttcctgcatatatctgtctctttcttcccgatacttggtttgctttgtattttgcgttatacaattcagggagtaggttataccaatctggctatgctttcgggtgtttccgaaatgatagcccgtatcctgatcagtttgctggcagttccggcgttcggctatatcgctgtttgcttcggtgacccgactgcctggatttttgcagatttattcctcattcccgcttttgcttatgtctaccggcacatactgcgaatgaacaaaaattagtgtatctttgtatcggtagttggcaaggtaatgaccgaacgtaagattatacatattgatatggatgctttctatgcttccgtagaacagcgcgataatccggaactgcgtggcaaacccgtagcggtggggcatgcggaagagcgtggtgtggtagctgccgccagctatgaagcccgtcggttcggggtgcgttcggcaatgtcgtcacagaaggcaaagcggctgtgtccgcagcttatttttattccggggcgtatggacgtctataaatcggtgtcccgtcaaattcatgagatattccatgaatatacggatgtcatagaacctatctctttggatgaggcgtttctggatgtgacggaaaataagccgggtattcttctggctgtggatatagccagagaaataaaacggaaagtgcgcgagcggctgagtctggtggcctctgccggagtttcctacaataagtttcttgccaaaatagcatccgattaccgtaaacccgacggtttgtgtaccattcatcccgaccaggctttggattttatagcacatctgccgatagagagtttttggggagtgggtccggtgacggcaaggaagatgcatgttttggggatacataccggcgggcaactgcgtgcctgttcgcaagcgatgctgttgcgcgagttcggtaaggtggggaacatctattatgattttgcgcgcgggatagatcttcgtcctgtagaagcggtgcgcattcgtaagtctgtggggtgtgaacatactttggagaaggatatcaaccggcggtcgtcggtcattatcgagttgtatcatactgcggtggaactggtaacccgtctggaacataagaacttccgggggaatacgctgacgctgaaaatcaagttccacgatttcagccagataacccgcagcgttacgcagtccagggaattgacggcacttgatgtgatcctgccgttggcgaaacaactgttgagggaggttgattacgaacaccatcctatccgtctgataggcctttccgtatccaaccctcgtgaagaaagtgatgaaaaaggtgtttgggagcagctgagttttgaatttagtgactgggaattagatgaataaaaggcacgttcctgatataaataaattcttattattcgcttaagaccaaaagaatggtatctttgcaatgtagaacgtaaaaatgtaatgcaatgagttgtctgatgaatgttttatggctggtgtttggcggcatactaactgccgtggagtatatgattgccagtttgctgatgatgattacaatcgtcggcattcctttcggtatgcaaacaatgaagatggcggggcttgccctgtggcctttcggcaaagaggtgcgcagcggagagcgttcgggaggctgtctgtacatactgatgaatgtgttatggatttttctgggaggaatatggatttgcctttcgcatttgggcttcggcgtattgctgtgtatcaccgtcatcggtattcctttcgggatgcagcatttcaaacttgccgctttggcgttggcacctttcgggaaagatattgtggaatcataacatcctattatcctgtataggcaggaggcttgtaaaagaagagggcaggaaatgaaaatttcccgcccccgttcattttatttaaaggtgtaatttacatggtcatggcagcttgctttgcaagcagtttttgcagtttgccgtttaaagtttggcacatagttccgttacccattgcctgatagcgtttgatacggtactgtaacataaaaatttcatttgcattctttttcataatcgtcttctttttt

SEQ ID NO: 4175 - DNA, 5873 bp, Unknown
  gut microbiota DNA sequence
atatgttttataacatagaaatctgcgtttttttcttcattttcttgaaaaataccttgttttgccatctgcgtattacaaatatattgcataattctgcaataagaatatatctctttgaactcaagagagttagaagaattaccttgtttttgggtaacgagttggcaaccgttccaattgccgtggtctgcatcgctttgcttgttcggataactcttacggatgcaaaaatacaaaactaaattgagaaaacgccacacttatacatgattttattaagttgaataaacacagagagttattttgcctttattgccgttctcattttgtacctttgcaaaaagaatgagtttatggaaaacattatcagaaaaataagaatgtattatccagtttcagatgaagcgttggaagcattggtgtgtctttttaagagatttgtatttccggaaaaaacaaccatcattcatgctgggaagcaggacaggaaagtctatttcattgaaaaaggcatcacacgttcttttgttttacacaatggaaaacaaataacgacatggttttccaaagaaggagatgccgcttgtggctcatgggacttatatcgcaacaaagctggttttgaatatgtagaaacgttggaagaaactacggcttattctgtctcaatagtgcagttgaatgaattgtatcggtcttacattgaccttgcaaattggatgcgggtgttacagcaagaaaacttccttcgcttgcaagacatacatatccgccgattaaactggtctgccaaagaacgttatgaacatttgataaaagaatgtcccgaacttttccaaagggtgaacttgggatatatagcttctttcttgggtatcacgcaacaatcgctgagtcgaataagagctaatgggcgttttttaacataaggtaaagggaaagttatttcttcttcctaattttgtcaaattaaacaatatgcaaagattatggataagcaagggcaggaataccaatggttggaatgggctaaagagcttcagttcattgcgcaagcgggactgacttatacaaaagacctttttgacaaggagcgttttgagcgcattcgggaaatatcagccgaaataatgagcctgcaaagcaagctccctttgtcggaaataaaagatttgttttgcaatgagacgggttttcagacacccaaactcgatacccgcgcggccatttttaaggataataagattttgttggtagaagaaaatgacggcacttggtccatgcctggcggatgggtagatgtgatggagaccgtcaaatcgaataccgtcaaagaggtgaaagaggaagctgggcttgatgtagacgccgtacgggttatcgccttacatgaccgcaatttgcacaatcagcctccatacgcctacaatgtatgcaaggtgtttgtgctttgcaaggtaaaaggcggatgtttccatccgaatatagaaaccgtcggaagcggttatttcagcttggacgaactgcctccgttgtctgtagacaagaacagttatcagcaaatagaaatgtgttttattgcccgctcggaaaagaactggcaggtggagttcgattaaaaatgcagagattatgaaaacagaatacgagaaatgtttagcgggtgaatctttcattggaggcaaagacccgaagatagtagagacaattttgcgtacaaggcgactgctggcgcagtttaatgccaccgattatgctgatacggagcgcaagcaagccttgttgcgtgaaatgttcggcagcctgggtaaaggtgtgcatgtggatattgatttccattgcgaatacgggaaacatatttttattggcgacaaagtgattatcaacatgaactgcactttcgtggacaacaaccgcattgatatcggcagtaatgtattgattgcttccaatgtacagatatatacagccactcattccaccaaagtcagtgaacgcatggtgcagaattggtcggaaggcgaggaaatatgccgtacatacgctctgcccgtcaagatagaggacggcgtatggattggcggaggcgccatcctattgccgggagtcattatcggcaggaacagtgttatcggggcaggcagcgttgtcacccgttccatccctgccaattgtgtggcggtgggcaatccttgccgtgtaatcaaacagattgaaagtgatgagaaagtataagcatatcatatttgatattgatggtacgctgattgatacggaagaagccatactacaaagcctacaagataccgtgcatgaaatactgcataaagacatcgaaaagtccgaactgagatttgctcttggaataccgggaagcatgactttgcgtacattaggtataacggacacagaacatgccaacagcagatggaatgaacatctgctgaaatacaaatctcgtatcaggctttttgacggcattccgcaactgttgggtaacttgaaaatgaatgactatcagttgggcatagtcacgtccaagacccgaaacgaatacactaccgattttgcagttccttttgcattgtctgattatttttgtactgtgatatgtgtggaagatactcttcgccccaaaccttttccggaacctttgctttcttatctgaacgcatcccacataaatgccgagaatgctatttacataggagataccatttatgacagtcagtgtgcgcaaaaagcaggggttgatttcgggtttgccgcgtggggaaatgcggcaactcaaggagtacaagcagactacctattcaaaagacctgcggatataccgttttccctgataaagagttaacgaataggaaaccgttctctttctccaatccgctttgaaacgcttttcagccctctgcccaacttccgagattttcttctaactacttaaatttcagttcttatttcgttaatctgctgattttcttcgattattccagcgatattgcatatctttgtgtcatacaaccttaataactacgtatatcatgagatacactactttactttccggaataatctgtctgttatgtctgctggctgcttgcggtgactctcatttcatgacggatgcttcttaccgttcgcgtgtggagcgagacttccaacagaaaaaagctttgatgccgcaaggagacttatttgccatattcgaaacctctctcagcgattatgagcgtgaggcgctggaatttctttatgcctatatgcctttggcggatattgcggattattcaggggagtttcatctgatgaatgtgcgtgcttcccggcaggctgccgatgaaatgccgtggggaaagcgtattcccgaagatatattccggcactttgttcttccggtgcgggtgaacaatgagcatttggacagcgcgcgtgtcgtattctacaaggaattgaaggaccgggtaaaaacgctttccctgcaggatgccattctggaggtgaaccactggtgtcatgaaaaagccatttatacaccttccgatgcccgtacaagttcaccgctggcaacggtgcgtaccgcttacggccgttgtggcgaggaatccacatttctggttgccgctctccgttcggtgggcattccggcgcgacaggtatatactccccgttgggcgcataccgatgacaaccatgcgtgggtagaggcatgggcagacggaaaatggtattttctgggagcttgcgaacccgaaccggtacttaatctcggttggttcaacgcgcccgcaagccggggaatgctgatgcatacaaaagtattcggacgctatgagggagcggaagaggtaatgtccgttacccctacctatactgaaatcaatgtgattggcaactacgcacctactgcaaaggcttccgtaaccgtagtggatgccggcggtgttcctgtggacagtgcttgtgtggaattcaagctatacaattatgcggaattttatacggtagccaccaaatacacctctaccagcggcatttgcgggctgacggccggtaaaggggatatgttggtgtgggcatcgaaagacggacatttcggctttgccagactttctttcggcaaacagtcggaactgacggtgaaacttgataaaaaggaaggtgacgcatttgccatagatatggatatcgtaccgccgtcggaaacagccaatctgcctgaggtaaccccggaacagcgtgcggagaacgacagaaggctggcgcaggaagattctatccgcaatgcctatacggcaacgtttatgacggaggatgcggcgcgtgcttttgcccgccggtacaagttggatgaggatgcggttgccggaatattggtagcttcccgcggcaaccacaaggttatctgcgatttcatgacccgccttcgttccgaaaagtcgaagaagggcggtatcgacctgttgcaacggatttcggcaaaagaccttcgggatgtcaggctggaagtactgatagaccatatgttgtccaatgtacgcaccagtgcggagtatttccgcaagtatgtacgcaatccgcgcgtaagtaatgaaatgctgactccgtacaaggctttcttcagaaaggtggtttcaaaggaagatgcggaggcttatgtagcgcaaccgatgaagctggtggagtgggtagcagggaacatccgtgtggataagcattgcaatttgggaggtgaccccatatctcccgaaggtgtgtggaggacacggttggcagatgcacacagccgcgatattttctttgtatccatggcgcgcagcatgggcatacctgcacgtatagacgaggtgacgggcaaggtgcaactgatgaaagaagagggtgcgctggatgtggacttggactgtaaggatactgtatttatggaggaacttgttccgcagaaaggccggctggttgctgaatattcgcctgtcaagtctttggacgatcctaaatattactctcatttcaccctttcgaaagtgactccgcaaggcaggttgcaactgctgtcttacgatgagggtgatctcgatatgggcagcggcactacctggagcagcctgttgaagaaaggtacggtgctggatgctggcgattacctcctggtaaccggaacccgcctggcaagcggaggtgtactttcccgcctcacggaattcagtatcaatcccggacagaccacccggcttgagttggtgatgcgcgagagtaaggatgaggtgcaggtgataggcagcttcaattcggaatctctctttaccccgcttcaggcggagaattctgagcaaagcctgttggaggcctgcggtcggggatattttgtcgttggaatcttgggagtcaatcaggaacctaccaatcatgcgctgcgtgacattgctgctttcaaggccggtttggagaagtggggacgcaagatggtactgcttttcccgaatgaggctcaatataagaaattccgtccggatgaatttccgggcttgccgtctaccattatctacggtatagatacaagcggtattgcagcgcagattgcagaagccatgaaattaagacataaggaaactctgccggtatttatcattgctgatacattcaaccgggtggtgtttgtttcgcaaggctatacgataggcttgggagaacagttgatgaaaacggtggaaggactgtaacgtgggttatatcaaatccggataggagatgtcaaaatacacttaacgatttcttttaggcacggattacgcggaaaacacggatttcacagattttctttattctttttctgtgaaatccgtgttttccgcgtaatccgtgcctaaata

SEQ ID NO: 4176 - DNA, 3333 bp, Unknown
  gut microbiota DNA sequence
accccgtttacttcccataaagaaaaccggcctttcctccctaagcattatcttataaaactcttgcttgcccatttcatgctgtaccaacggcgcacaaaaatagccccgcgaatattctcgtccagcaaaaacgctacccacatgccgcaaatgccccaacccaacggaatgccgaacagatagccaagccctacggctacactccacatcaccaccaaccctacatagaacggataattcacatcgcccgccgcacgcagcgcattcgtcgcgaagatattgacaggacgccctatctccagcacaatatcgataaccagaatggtaacccccatctttataatctcggcattggacgtcagccagccgaaaataacatgcccgaaaagagcaagaatacaagacagaatcacagttatcatcaccgacttcttcattacatatttccccatcaggaaagccgcccgcggtttcttctcccctatcagatgcccgatgcatatcgccccgccctgtgccatggaaatgctgaacagataagcaaacatgatgatattgacacaataagtacgcgtggcaagcgcttccactcccagcatattgataaaataagtaatcaccacctgcgacgaactgtaagaaagctgctcgccggcagaaggcagccccaccttcatcaggttcttcaactccacccagggaaacggacggaagtaagccggcgggaaacggtggatatgcttgcggaacaagattacaaacaggatcaccatggacacccctctactgaaagccgtagagatggccgccccctccactcccaattccggaaagccgaaacgtccgaaaatcaaggaatagttgcctattatattcagcacattcaccaccaccgtcaccagcatcggatacaccgccttgttggcgctgcgcaacgaagcggaaagagtcagcgacaatgcctggaaaaaggcgaacgcccctacaatacgcatatagtccatgccgtcctgcatcagttcgggccccagccccatcagccgcaggataggctccgcacacccgaacagcagcatgctgatgcctacacccaccgcgaagttcaccaggagggatacccccaccacctgcaccacctgtttatgcagccgtgcgccgagatactgcgaacacagcacggaagtaccgagattaatcacctcaaacaccaggaaagtcagcatgataatctgattgaccacccctacggcagccacgctgttgtccgaatggcggctcagcataacggtatccaccgcgccaagcatcatgattaataatgtctctatgaaaatgggggccgccagcctggcaagccgtttcttcagattctcctgctgtatcattgttgtagaagcgctatgataaaaatcgcgcaaagatacggaaaggaaagggagaacaacttgacgcatatcaaatattttttgctacctttgccacgctaaatgacacccaaacctgcataaccgttatggacacattactcaaagaaacagtgaatgccaccgtcaactcccgctatcccggcatggcgcccgaaggcagacggcagttggaagaaatcctgatccgcagagaagtggaaaaaggcgaacttttactgaaagagggacaggtaagccataatatcgtactcgttggcaaaggtatgttgcgccagttctattacaaaaacggaaaagacgtcaccgagcatttctcctacgaaggatgtatcgtcatctgcattgaaagcacgctgaagaaagagcccacccacctcatgattgaagcgctcgaagacagcgtggtctacctgctgccctatgacaagctgatgcttcttaccgaaatatcgtgggaaatcaatatgttctatcgcaagatactcgaatattcccttattgtttcacaaatcaaagccgattcctggcggttcgagacagcacgcgaacgctacagccagctgatggagcaacagccggaagtcatcaagcgcgcccctctgtcgcacatcgcctcctacctgctgatgactccagagaccttaagccgggtacgttcgggcatactctgatttttacgggaatgcccggaccggtcataatctgaatccatatagaatatttaccctttctatatacggagcccctttgaattttcttcaaaaagaacttcccaaagaagctgaacaaaatttaaacggactcttaaacccgtcttatctcaaatctttttttgagatagcttgtttatcaagctcgttatccaacttaaaattcagattatgactaccatatacacttttgcgcaaagcgcaatcgaagaagccagaagcgccggccgctacggcacagccaacctgtactccggcgccatcaacagtttccggaattttaccggcgacatcccccttaccttcaaggaagtgacggcgggaatgataaaacgatacgaagaaagcctgttgcagaaaggccggcgccacaataccatctccgcctatatgcgcatgctgcgttccatattcaaccaggcataccagcaaggcattcccgatacgatacctgccgacgagctgttccgcttcgtattcaccggctacgagcctaccgccaaacgtgccatctcccccgcccttatacggcgtctctcgcaactgaatctggaacactctccccacctgcgcttcagccgcgatttattcctgctcagcttctacctgagaggcattccgtttgtcgacctggttcatctccgcaaaacggacatgaagcacaacaccatttactactaccgccgcaagacccgccagcagctatcggtctacctcgaaccgtacgccgccgagattctgcgacgctacaccgacaagcactccccctctccttaccttctgcccatactctcagcggtcggtccggaaggctaccggcagtacaaaagcgcactgcgtctttacaaccagcacctgcaccggctatccaagatgctgcgcctgagtgtgccgctcacctcctacgtggcacgccacagttgggccaccaccgccaaagaagaaggagtagccatcgccatgataagcgaaggactgggacacagttccgaaaaggtaacacacgtatacctctcttcttttaacaataatgcaatgagcaaagccaaccggaaggttatttccaccatccatgccaaaaagaaaaagagaaaaaaaggggaatagaataaaaaatagcatgtaaattaatattacttgctatataaaattgtttcatagatagttcattctcttacttacaaggtaagaga

SEQ ID NO: 4177 - DNA, 6455 bp, Unknown
  gut microbiota DNA sequence
aatatgtaagagttcctacgccgttcctgtcagaatgtcaaaacatcgctgctcccgttctcgaaagcgggtgcaaaagtaggactttataatatacgcgccaaatatatcaggggattttttcgcgtttttcttgaacatttttataaaacgctgattgacaaatgtgttgaagaacatatttttttaaggaggatggaaagtctggcaaaagggatacattataatatatgcgcatgcgcgcgaaaagaaacaacggaaggctgaaagaaaatacggagatacggaagggcattgtatgacacccgggtcttgacatgttcgacacccgggtcttggcatgtctgacatccgggtctcggtatgcacgacacccgggtgtcggacacaagaaaaaggctaacaggactaacagcacaggaagaaaccaatacggacacatacaaggaaaagaaatacaaacagaaaaatggcagagaaaaagatacaaaaaaaacaacggcatagcaaaagaacagacacaggaaataggagaaaggcggcaggcagcccggaaaacacgaagcaagccacaacccaacaaacctgttaaaggaagacgcacgttgtattaaatgttaacagaagcaactgtcttataaaccgtgttaccaaacaacagatttccagaaaaaatattggataataccagaaatagaataactttgcaatgtgtttttcatagtattagatttaaggttaacaaaaagattggctgtctgggagagatagcctttttttttatgaaaaccatcctcgtgttttcatgcaatcattgttctttagcctcttcctgcgggatgcgtatggatgtataaagctcaagaatagcagcgatagtcagtgaaacaatccactcattaccacgcgtaaaaaacataaaagctccggtaagcaccaacaacaatgcaccaaatatttgttggcgtctcagacgcctaatagtaggagttttatattgcgaaggtgaatttatttgcgccaaagcaacaaatgtagcacctaccgtatatatataaggcgaaagttgccaacctgtgacataaacggcagctcctatcagaagcattacggctcctacaacaaagagggcgggtatcaactgtttcattcttctatatcttcttggaatacataaatatcttcattgggtttcttcatcagatacttttcacgggctatcttctcaatagctcctgaatcgaccgcaagttcattcagacgacgggtattctcctcatattccgcacgatatctatctatctccccgcgcaaacgcgtttcctcacgataataccccaaacgacgcacaatgctgttttcatccagaaatccgacaagtacgacaaacagcacaaacgttatcagatatttacgtctgcggacaaacaaccaaagagaagcaagtttatccatgtaatccagttattgtttctttgagcacaaagataagacgaataactgagaattttcttttttttgcgtacatttgcacaaaagcaaagataaaccatacaacctttgcacgctatataagtgacaagaataccctgaatatggaaaattatatcgtttcggcacgaaaataccgcccttcaaccttcgagtcggtagtaggacaacgcgctttgactactaccttaaagaatgctatcgccacaggcaaactggcacacgcttatctgttctgcggtccgcgtggcgttggaaagacgacttgtgcacgtatttttgccaaaaccatcaactgcatgagtcccactgcagagggagaggcttgtaaccaatgcgaatcgtgtacagcattcaacgaacagcgctcatacaatattcacgagttggatgctgcatccaataattccgtagacgatatccggcaattggtagaacaggtacgtatcccgccccagataggcaaatacaaggtatacatcattgacgaggtgcacatgttgtcggcttccgctttcaacgcttttctgaaaacattggaagaacctccccgccatgccatatttatccttgccactactgaaaagcataagatattgccaaccatcttgtcgcgttgccagatatacgacttcaaccgcatcagtgtggaagataccgtagcacatctggcctatgtagcctccaaagaaggcattaccgccgaaccggaggcactgaacgtcatcgcactgaaagctgacggtggtatgcgcgacgccttgtccatattcgatcaggtagtgagttttaccggcggacacatcacctaccaaagcgtaatcgaaaatttgaatgtactggattacgagtactactttaaactgaccgaccattttcttgagaacaaagtcggcgatgccctattactgctgaatgatatactgagcaaaggattcgacggcagccatttcatcaccggactgtcctcgcatttccgcgatttgctggtaagtaaagatcccgccactcttcccctgcttgaagtgggagcaagcatacggcaacgttatcaaacgcaggcacaaaaatgtccgttacccttcctttaccgcgccatgaaattgtgcaatgactgtgatttaaactatcgcgccagcaaaaacaaacgattgctggtagagctcactttaatacaggtggcacaaataaccgccgaaggagacgatatagctaatgggcacagccctaaacaagtcataaaacctatatttacacagcctgcagccactcaacagccacaggctactcccgctgtatcccggccgcaagcacccgtcatagctaaaccgcaagcagttcctaccgttgctccctccaccggcactaccgccacaacagcaaatactgcttcgcacgccacccctacctccatcttgctggcacaaggcaaagaagaaaagaaaattccggttataaaaatgtcaggactcggcgtatccattaaacgcccgaaagccgaggaagaggtaaaaaatacggctacagccactatcacaccacaaacagcacaaacggaagaggactacatcttcaatgaaagagacataaactactattggcaagagtatgcaggacgtatgcccaaagagcaagtagccattgccaaacgcatgcagaatatgcacgtcactctactaaatgccactacttttgaagctgtcgtagataatgaaattgtggcaaaagaatttatctcgatgactccccaattacaagagtacctacgtacccgcctgaaaaaccgcaaggtaaccatgagtgtacgtatcagcactcccactgagaaagtccgcgcgtacggccgtgttgaaaaattccaaatgatggttcagaaaaacaatgctcttttacaattgaaagacgaattcggattggaactttactaagcattataagtaaagaggcttaatattcacatacacgtcacaacttattgaaaataaaagcattatattttattttgcatatcgctttttatgtttatttttgccaataatagacaaacaaagcaaacaatgagaaaagacgttgccgtattaatggtgctgtgggtgatgtgtataccatacgctacctttatatgtgcctcagccactccgaacaaattagatacgctgaaagcttttcttcgaaaaaaaatactttacaatgaatacgtaccgatagacagcgtcatttgctggagcgaaaacatcctaccggtcatcaagacaaacaatcggaatgacgaaaactactttttgctgcaactgcaacttgccaatgcctatacattacgaggcgacatcagcctcgccatagaccgggcacgactaatgtacgaagaagccaaagaaacggaatatgagttcggaattgcagttgccaaccaagccatcggcgatgcttacaccatagccaatcaatgcgacaaagcattggattcgtatcaggatgctttaaaggaattaaaccatctctcgcagcaacatccctaccggatacaactcttattaaagatatccaatgctttacaacgtaaaggacaactggaaaaggctcaaaaaacattgcatgacatagaacaaactcttcagaaacaaccggactatgccaccagtttttttgccaatatcgaaaaagccaactatgctatctctcacggacatctttcaaaggcttatctcaaggaagccgcagcatatctgcacaacatggattccatctaccggatacatcctgaaaagttttactgttttcacctgaaatatactaccgccgcctactatcgggcaatgggcaactggaacagaatgtattggaacaaagccctgcaactgtatgaagagctacgacaagaatacacggtcaacaaacagtctgcctattaccgatggatcacgcaagcaacaatatacctatataagatacaagggaaatcaatggccgcctgcctgttgtatcaagaattatattccactgttgacacactcactgcagaaggttatgtccgacaaatcaatattctacgagccaagtatcagatagatcaaatggaaatagccagtagagaagagcacaacaaattcatcactggcatattgaccgggagtatcctattagtcttcatatttattattataaccatcatgcttagaaaacagcgacaggaaatcgccctgtctacacaaaagctggaacacctgcgcaccaatgccgaaaatgccacatccgccaaaagcatattcctctcgaacatgagccatgaaatacgtactccgctcaatgcactctccggcttctcctcactattgaccgaagaaaaactggataatgagacgcgtcgtcagtgcaatgaagtaatcctgcaaaattccgagttattgttgaaactcatcaatgatgtgatagacctatcaagccttgaattcgggaaaatacaattctgtatcaacaaatataacgttgtcaatatttgccgaaatgtaatcgataccgtcagcaaaataaaacagactcaggcagccatatgcttcataaccgaattagagagcatggatatagagacagacgatgcacgtttgcagcaagtgctgataaacctactgattaatgcaaccaaatttacatcgcagggtagcattatcctggagcttaggaagcaatcggaacaagagctgctcttttctgtcacagatacaggttgcggtatccctaaagagaagcaagccgcaatcttccgaagattcgagaaactaaatgaaaatgcacaaggaagcgggctgggactttccatctgtcagcttatcattgaacatatcggcggaaaaatatggattgactccgactatacaggcggctcacgcttcttcttcacccaccccatccggcaatcacagtccactaacccccaaaaggagaataacgcatgaaaagatcatttatcataccaaccttactcatcctactcctgcccgtacaaattatcaatgccgatgtacaaagccagaattccgtgctccaccagcattctattgaaatagagagatgcataaacaacaacatccgaaaagccgattctttggtaaaagccggaaaaccagatgaagcacttacatattacaagagcagccttaagtcaaaagactcattatacaatcttattaccaactcccagatggaagaaatcctttcactctacaacatggataagctcatactgcaaagagaacaaaggcacagtatgtttcatcaaaccagtttatacatctcagtcatcattatcttagctctactactttccaatatccatatataccgaagccggaaacggctgcaaaagaatgaaaaagaaatcagaagattaacctccattgccgaagaagccaatgaaataaaaagtcactttctgacaaatatgagttacaacatccgtatactcttaaataatgtagtaggattctcgcaacttatgaccgaagacgggaacctgaacgaaaaggaaaaacgagaatactccggcatcattcaaagcaactcggctgaattaatccaacttgtgaataacgtattagacctttcacgtctggaagccaacatgatgaagttccagctacagaactgcaatgtgcaagagtggtgcaacgaactcccctatctggtgcagatgcgaagtgaagggtatatacatctggagcttcaagccgatgtggacaatgcaatcatatacacggatgtcagccgcttcacacaaataatttccagcatgctactctatcctgtagagtgcaaaaagccaagaagaataggtatgcaactggtttacaatcaggaaaaacaggaaataaacttccgaatagacaacagtccacttgctgattcggcatttgcctcacaaaaagaagctatattacaaaaaatcaatctattgttttttgaacatt

SEQ ID NO: 4178 - DNA, 819 bp, Unknown
  gut microbiota DNA sequence
cttttccacacgctccagcaaggctcacgcctcaccttcaacgccgagtggaatgctcccctaccgatgtttacacatcccaaagcttcggtagaatacttgatgcccgattattatccacgccaaactcctcgactagtgagctgttacgcactctttaaatgaatggctgcttccaagccaacatcctagctgtcttagcaatctgacttcgttagttcaacttagtattcattttgggaccttagctgttggtccggattgttctcctttaggacatggaccttagcacccatgccctcactcctgacatagaactgacacgcattcggagtttgtcaagacttgataggcggtgaagccctcgcatcttatcagtcgctctacctcatgccagtataagtcaaggctgcacctaaatgcatttcggggagtacgagctatctccaagtttgattagcctttcacccccaccctcaggtcatccagaagcttttcaacgcttattggttcggtcctccagatggtgttacccatccttcaacctgcccaagggtagatcacttggtttcgcgtctactccttccgactatacgccctgttcagactcgctttcgcttcggctgcagatctgaaatccttaacctcgccggaaaaagtaactcgtaggttcattatgcaaaaggcacgccgtcacaccagaaggtgctccgaccgcttgtaggcacatggtttcaggaactatttcactcttctgttcgaagtgcttttcacctttccttcacagtactggttcactatcggtctctcgggagtatt
